United States Patent Application Publication US 2014/0140959 A1 - sequence listing, part 2

SEQ ID NO: 65 - DNA, 196963 bp, Artificial Sequence
  GLV-1h311 (SL-tetO-CBG99-mRFP)
ttatgagaccatcaaagagagaaagagaataaaaatatttttgtaaaactttttttatgagaccatcaaagagagaaagagaataaaaatatttttgtaaaacttttttatgagaccatcaaagagagaaagagaataaaaatatttttgtaaaacttttttatgagaccatcaaagagagaaagagaataaaaatatttttgtaaaactttttttatgagaccatcaaagagagaaagagaataaaaatatttttgtaaaactttttttatgagaccatcaaagagagaaagagaataaaaatatttttgtaaaactttttttatgagaccatcaaagagagaaagagaataaaaatatttttgtaaaactttttttatgagaccatcaaagagagaaagagaataaaaatatttttgtaaaactttttttatgagaccatcaaagagagaaagagaataaaaatatttttgtaaaactttttttatgagaccatcaaagagagaaagagaataaaaatatttttgtaaaactttttttatgagaccatcaaagagagaaagagaataaaaatatttttgtaaaactttttttatgagaccatcaaagagagaaagagaataaaaatatttttgtaaaactttttttatgagaccatcaaagagagaaagagaataaaaatatttttgtaaaactttttttatgagaccatcaaagagagaaagagaataaaaatatttttgtaaaactttttttatgagaccatcaaagagagaaagagaataaaaatatttttgtaaaactttttttatgagaccatcagaaagaggtttaatatttttgtgatactctgaaaggaaataggaataggaataggaatagtgtcataatcgtatcacactattgagacagaaaaagaagaagtcgcgagaggtaactttttgtgaatgtagttaagaacatttttgttttgcaaaccggaatatagtgtccggtacacttttttaattcgtggtgtgcctgaatcgttcgattaaccctactcatccaatttcagatgaatagagttatcgattcagacacacgctttgagttttgttgaatcgatgagtgaagtatcatcggttgcaccttcagatgccgatccgtcgacatacttgaatccatccttgacctcaagttcagatgattccttgcacatgtctccgatacgaacgctaaactctagattcttgacgcattttgtatcgacgatcgttgaaccgatgatatcttcgtaactcactttcttatgagagatgttagacccgagtactggatgggtcttgatgtcgctgtctttctcttcttcgctacatctgatgtcgatagacacttcacagtctttgatcatagcaagagcttcttcatgagtgatcgcgggagagtccttaccttgtcctggggacacgctggacaatctagcattcactgtgtttccatcagcggattctgagatggatttaatctgaggacatttggtgaatccaaagttcattctcagacctccaccgatgatggagtaataagtggtaggaggatctacatcctcgactgatgtggaatcatcttctgattccacctcgggatctggatctgactcggactctgtaatttccgttacggattggcaaatcttatcattggtcggtgtttggtcttgctttgtgactttgataataacatcgattcccatatgatgtttgttttcttcttccgtacacgaggaggaggatgaggatgattgctgaagactggcaggcatagcagctgccgccaggcacatgcatgccaggacgatatattgtttcataattgctattgattgagtactgttctttatgattctacttccttaccgtgcaataaattagaatatattttctacttttacgagaaattaattattgtatttattatttatgggtgaaaaacttactataaaaagtgggtgggtttggaattagtgatcagtttatgtatatcgcaactaccgggcatatggctatcgacatcgagaacattacccacatgataagagattgtatcagtttcgtagtcttgagtattggtattactatatagtatatagatgtcgcccactagagttactgtctccgaatgcggcatgatagtatcattctttgctttcgttaactgtttggaggaagaatctttgttattgcatttaatctcgaaattcagagtgcacacctttctcctgtaaagaaacctgaagtcgctaccttattaagaacggagaagtatccatcacgaaatacgggattacagtctttatgattcatagtaatagttagttccgacgttgagatggattcgctgagaccggtagtggtcgtccgagtacacgacgtgtcgttaactggatacaggttaatttccacatcgatatagttaaacgtatttctgggtacgggttcgcatttatctgcggaagagacggtgtgagaatatgttccgagaccacacggagaacagatgacgtctccggatactccgtatcctattccacattttgtttgggaaacacatgccttgcatccggatgatcctttgagaagacaataatatccgggagagcattcacagattctattgtgagtcgtgttacacgatcgcgtcttccgttacaacttagacaagcgggtaaatgattattgcgagatgtgaaggtacccgaaccacacggcgtacatcgtgtgttagtcttgctatcgcataatctggaagcgtatgttcccggacacaaattatggcgtttgtattcgttgtctttacactttccatcggatggtgcatgcggtgctatatctcttccgtttattattatacatgagagaaacaatatatacgagtataatacggacttcatgatttaataatgtagtaatcgttgtcttgttcctgtttcctacttctccaatcatatagatattttctttctatcatggataatatttgtaatggttctttccgtacaacatactgtttagatgatattgcgcataatttccggaggcaaatacgatagtctagattgaccgatggtagactctaatttattgagtgctttgtcgacgagtttacttttacgctccatcgatagatggcactgttctatgagatcgtcgtacatgggaaatgaaatgtgactgtctgaatgtatggctttaagatagctgtgataccgtatacaggtcggtgtcggagattcgaatctctttgaggcgacttatgtcacgatgatggaatctatcttatcgaatgatatatttttcataaatacacttttatagtcctcgtttaaacagaatttactatgtagttccgcgaatgactcgtcccttaataggcagtaggctagtatcttttttacgtagtaatcgtcgtagggagagacatcttgtagaacaacgatttcgttttgttttctcttctgtaactgcttttctggatggccgtattgattatcgagcgtgatactcgctccatattccaataaccgctttgcaaattgtatattattgacatcgaccgcgtaatatagtagagttatcgatcatatctatatcatccatgtacttgcttagtatatcaaatacatctatcagtatggtttcataacagtgatacccgcaattattaaatctcgataatatcagaccgtacatacatagacggccattgttcgatacgtgatttacagccgcgtgtccatattttccacgataaaccttacgacgtttacatcgacgagattattattaacaaagtagtcgtgtagaggatagttgttgtccgttatctaacatgcatcgaacgaccatatcgccgtaatgtaagtagtttatcagtatggcttgtacgatggattcatcctgttgtctaaatctctttagaatgttatcgatgatgtagtggttatattctctggaatcgtacgaagtaatactacgcattacgtcgacaagagtatgacgtctctcaataagaagattaacgatttccatgtctacattatatggggttactctaaatcgcttgtttagataatacgcctctaatatagggctgacgtcgtatactctacacgtgtccacatcctttattaataataatttaacaatctctatatctatggttgagaaagaccagtagtattggatgggtaaagatcctccttcgtctctgccatggatggaaacattgttatcgatcaaacatttaattacatccttggatagagattgagattctctatgagacgatatatagtaatgaagagagttcttacacatatcactgtcgtacatacaggtacgaaatacgtaaccggtgctgtaacattctgatttaagaagccatagcaatacttctggtctcggattaggcgtcgttacgtatatatccaccaatccgagaccattgattgcataattcgtattcttggacggacgtatccgtttatccacaattaggtattttagcagacgtaagtcgatattatccgaatacagatcgaaatcatttatattcgacttgagttcgttagaggaatttgaatagctggatatcagtagatgcacaatctgagattttacgtatctatgcttactgtatactcctagcggagttaatccttcgttgtttctacaaagtctctcgactccgcgagagaacaatcttaatgtctgtatcgcatttattggagacgtaacaatgtagcgcattgtttcctcgtctatctatatgttttgataagttgtgacacgtttcaatttctagttttatttttttgtacgtcacatcttcatccagtagacgacatagaatagtgcactctctaccacaataatccatagctattctggtgctaattattcctatttcacgaaggcaatcattcctcataagatgataaaaagtgtagtggagatttagtatttagcagtgcggatatgatccaagagggtgagatagtcgttctcgttcagaatctttcgcagcataagtagtatgtcgatatacttatcgttgaagactctttataaaagtctatttgtttatatttattgcggatagcagtatttccctataaaaagtatacgtcctgtggtgtctttaatcatgtacatgaatggatggtttatgtagaccttcgtacgatataccatcgaaaagttaatcgtaaatactcctgtaacggccgatgcttctgtatactcctcattaacatctataaacgtcgtatgtagaaatttttctacagtgatagtttcattacacatcttgctaaaatctgcataatatccgaatatattagtaagtcctaaattttctaaaatcggtaccagattatacggttctgtcatttccactttaaactttggcatatacaagtctatacttttagtagataacataccacaccattttttaaatttttcatctgttatatttttttctatgttatatataccttctatgtcgtccggtagtataattaccatactagagtttccctcgtatggaatatcgataatagagaatcctccgaataattcattaatatgtacatattgcaagttattctcggtacccaccatcatatcaacgctggtaactatattcttagaaatataaaacttgtctgtatatgtaagatgtttagaaaatggatatttccacattgctttaaaatggacggcgctaacaactgtcatacgagtattaatggatagcggactagtcaataaggaattaattttaccatttgtcattgtcttaacccattcgttgattagttcctttgtttggttagcattattaaagtttacagtttgaaaatcgtcttttattttttgtaggaaggaggcgtggaactcgatactatcgctaccgtatattttatttgcggtagctagtgtcgcacaatacggaatatctacctccatgtcatcattattgtcatcgggtgtattctcattcatattctctatatattttgatagttgttcagctgtagaaccagctgctccatgatttagaatagataaagtagataaaatggaaactggagaaatcaaaacattttcatcagggtgttttaagattagttctttaaagatatccatggtatagacctaacgataacgatatatatcataaataaataatgttaaatttcaatttatgtttgtaccccgtattcatacttaacaaattggtattgcgtacacaatcaatcatattacataccattaataatgcaagcataaaaaattgttagtagatgtttctaaatataggttccgtaagcaaagaatataagaatgaagcggtaatgataaaatcaatcgttatctaaaatgatcatactcatttattttattctattatattaacacatacatttttaacagcaacacattcaatattgtattgttatttttatattatttacacaattaacaatatattattagtttatattactgaattaataatataaaattcccaatcttgtcataaacacacactgagaaacagcataaacacagaatccatcaaaaatgttgataaattatctgatgttgttgttcgctgctatgataatcagatcattcgccgatagtggtaacgctatcgaaacgacattgccagaaattacaaacgctacaacagatattccagctatcagattatgcggtccagagggagatggatattgtttacacggtgactgtatccacgctagagatattgacggtatgtattgtagatgctctcatggttatacaggcattagatgtcagcatgtagtattagtagactatcaacgttcagaaaacccaaacactacaacgtcatatatcccatctcccggtattatgcttgtattagtaggcattattatgtgttgtctattatctgtttataggttcactcgacgaactaaactacctatacaagatatggttgtgccataatttttataaatttttttatgagtatttttacaaaaatgtataaagtgtatgtcttatgtatatttataaaaatgctaagtatgcgatgtatctatgttatttgtatttatctaaacaatacctctacctctagatattatacaaaaattttttatttcggcatattaaagtaaaatctagttaccttgaaaatgaatacagtgggtggttccgtatcaccagtaagaacataatagtcaaatacagtatccgattgagattttgcatacaatactagtctagaaagaaatttgtaatcatcttctgtgacgggagtccatatatctgtatcatcgtctagtttatcagtgtcccatgctatattcctgttatcatcattagttaatgaaaataactctcgtgcttcagaaaagtcaaatattgtatccatacatacatctccaaaactatcgcttatacgtttatctttaacgatacctatacctagatggttatttactaacagacattttccagatctattgactataactcctatagtttccacatcaaccaagtaatgatcatctattgttatataacaataacataactcttttccatttttatcagtatgtatatctatatcaacgtcgtcgttgtagtgaatagtagtcattgatctattatatgaaacggatatgtctagaacggcaattgttttacgtccagttaacactttcgttgatttaaagtctagagtctttgcaaacataatatccttatccgactttatatttcctgtagggtggtataattttattttgcctccacatatcggtgtttccaaatatattactagacaatattccatatagttattagttaagggtacccaattagaacacgtacgcttattatcatcatttggatcgtatttcataaaagttattgtgttatcgatgtcaacacattctacattttttaatcgtctatatagtatttttctgatattttctataatatcagaattgtcttccatcggaagttgtatactatcggaatcagttacatgtttaaataattctctgatgtcattccttatacaatcaaattcattattaaacagtttaatagtctgtagacctttatcgtcgtaaatatccattgtcttattagttacgcttatttttatgtgtttttacgttgctttattatattttataagaatgattgtttgacgaatcacgagaactattaagacacattattaggtatatattataaaaaagtttttgattacgatgttataagaggaaagaggacacattaacatcatacatcaattaactacattcttataacatcgtaatcaaaagaattgcaattttgatgtataacaactgtcaatgggttatggaattgtatattacatattatacggtatgttggtaacgacaaataccggtcggtaattgtctgccggtgtaatagaattatatatatctatctattacaccggccttgtatacataataataagttgtggtagtatgatctccatatttataatttaggactttgtattcagtatttttggaatcataaaaaataaaaaaaagttttactaatttaaaatttaaaaagtatttacatttttttcactgtttagtcgcggatatggaattcgatcctgccaaaatcaatacatcatctatagatcatgtaacaatattacaatacatagatgaaccaaatgatataagactaacagtatgcattatccgaaatattatatcaatatcacaaaaataaatacacatttggctaatcaatttcgggcttggaaaaaacgtatcgccggaagggactatatgactaacttatctagagatacaggaatacaacaatcaaaacttactgaaactatacgtaactgtcaaaaaaatagaaacatatatggtctatatatacactacaatttagttattaattggataaccgatgtgattatcaatcaatattaagagggttggtaaattggtacatagctaataatacctatactccaaatacacccaataatacaacaaccatttctgagttggatatcatcaaaatactaaataaatacgaggacgtgtatagagtaagtaaagaaaaagaatgtggaatttgctatgaagttgtttactcaaaacgatagatactttggtttattggattcgtgtactcatatattttgcataacatgcatcaatatatggcatagaacacgaagagaaaccggtgcgtcggataattgtcctatatgccgtacccgttttagaaacataacaatgagcaagttctataagctagttaactaataaataaaaagtttaatttgttgacgacgtatgtcgttattttttctcgtataaaagattaatttgattctaatataatctttagtattggataaatatcaattcaaattaattccattagattatatcataaataaaaatagtagcacacaactacttcagcaaacattctttttataaatgccatctagcgtagcgaggacacaagtgaacctataattatcaaatttattagtatcagtcacatgaaggactttacgtagagtgacgattccactatctgtggtacgaacggtttcatcttctttgatgccatcacccagatgttctataaacttggtatcctcgtccgatttcatatcctttgccaaccaatacatatagctaaactcaggcatatgttccacacatcctgaacaatgaaattctccagaagatgttacaatgtctagatttggacatttggtttcaaccgcgttaacatatgagtgaacacacccatacatgaaagcgatgagaaataggattctcatcttgccaaaatatcactagaaaaaatttatttatcagttttaaaggtataaaaaatacttattgttgctcgaatattttgtatttgatggtatacggaagattagaaatgtaggtattatcatcaactgattctatggttttatgtattctatcatgtttcactattgcgttggaaataatatcatatgcttccacatatattttattttgttttaactcataatactcacgtaattctggattattggcatatctatgaataattttagctccatgatcagtaaatattaatgagaacatagtattaccacctaccattatttttttcatctcattcaattcttaattgcaaagatctatataatcattatagcgttgacttatggactctggaatcttagacgatgtacagtcatctataatcatggcatatttaatacattgttttatagcatagtcgttatctacgatgttagatatttctctcaatgaatcaatcacacaatctaatgtaggtttatgacataatagcattttcagcagttcaatgtttttagattcgttgatggcaatggctatacatgtatatccgttatttgatctaatgttgacatctgaaccggattctagcagtaaagatactagagattgtttattatatctaacagccttgtgaagaagtgtttctcctcgtttgtcaatcatgttaatgtctttaagataaggtaggcaaatgtttatagtactaagaattgggcaagcataagacatgtcacaaagacccttttttgtatgtataagtgtaaaaattataacatccatagttggatttacataggtgtccaatcgggatctctccatcatcgagataattgatggcatctcccttccttttttagtagatatttcatcgtgtaagaatcaatattaatatttctaaagtatccgtgtatagcctctttatttaccacagctccatattccactagagggatatcgccgaatgtcatatactcaattagtatatgttggaggacatccgagttcattgttttcaatatcaaagagatggtttccttatcatttctccatagtggtacaatactacacattattccgtgcggctttccattttccaaaaacaatttgaccaaatctaaatctacatctttattgtatctataatcactatttagataatcagccataattcctcgagtgcaacatgttagatcgtctatatatgaataagcagtgttatctattcctttcattaacaatttaacgatgtctatatctatatgagatgacttaatataatattgaagagctgtacaatagtttttatctataaaagacggcttgattccgtgattaattagacatttaacaacttccggacgcacatatgctctcgtatccgactctgaatacagatgagagatgatatacagatgcaatacggtaccgcaatttcgtagttgataatcatcatacgcgtatcagtactcgtcctcataaagaacactgcagccattttctatgaacaaatcaataattttagaaacaggatcattgtcattacataattttctataactgaacgatggttttcacatttaacactcaagtcaaatccatgttctaccaacacctttatcaagtcaacgtctacatttttggatttcatatagctgaatatattaaagttatttatgttgctaaatccagtggcttctagtagagccatcgctatatccttattaactttaacatgtctactatttgtgtattcttctaatggggtaagctgtctccaatttttgcgtaatggattagtgccactgtctagtagtagtttgacgacctcgacattattacaatgctcattaaaaaggtatgcgtgtaaagcattattcttgaattggttcctggtatcattaggatctctgtctttcaacatctgtttaagttcatcaagagccacctcctcattttccaaatagtcaaacattttgactgaatgagctactgtgaactctatacacccacacaactaatgtcattaaatatcatgtcaaaaacttgtacaattattaataaaaataatttagtgtttaaattttaccagttccagattttacacctccgttaatacctccattaaccccactggacgatcctcctccccacattccaccgccaccagatgtataagttttagatcctttattactaccatcatgtccatggataaagacactccacatgccgccactaccccctttagaagacatattaataagacttaaggacaagtttaacaataaaattaatcacgagtaccctactaccaacctacactattatatgattatagtttctatttttacagtaccttgactaaagtttctagtcacaagagcaatactaccaacctacactattatatgattatagtttctatttttataggaacgcgtacgagaaaatcaaatgtctaatttctaacggtagtgttgataaacgattgttatccgcggatacctcctctatcatgtcgtctattttcttactttgttctattaacttattagcattatatattatttgattataaaacttatattgcttattagcccaatctgtaaatatcggattattaacatatcgtttctttgtaggtttatttaacatgtacatcactgtaagcatgtccttaccatttattttaatttgacgcatatccgcaatttctttttcgcagtcggttataaattctatatatgatggatacatgctacatgtgtacttataatcgactaatatgaagtacttgatacatattttcagtaacgatttattattaccacctatgaataagtacctgtgatcgtctaggtaatcaactgttttcttaatacattcgatggttggtaatttactcagaataatttccaatatcttaatatataattctgctatttctgggatatatttatctgccagtataacacaaatagtaatacatgtaaacccatattttgttattatattaatgtctgcgccattatctattaaccattctactaggctgacactatgcgactcaatacaatgataaagtatactacatccatgtttatctattttgtttatatcatcaatatacggcttacaaagttttagtatcgataacacatccaactcacgcatagagaaggtagggaataatggcataatatttattaggttatcatcattgtcattatctacaactaagtttccattttttaaaatatactcgacaactttaggatctctattgccaaatttttgaaaatatttatttatatgcttaaatctatataatgtagctccttcatcaatcatacatttaataacattgatgtatactgtatgataagatacatattctaacaatagatcttgtatagaatctgtatatcttttaagaattgtggatattaggatattattacataaactattacacaattctaaaatataaaacgtatcacggtcgaataatagttgatcaactatataattatcgattttgtgatttttcttcctaaactgtttacgtaaatagttagatagaatattcattagttcatgaccactatagttactatcgaataacgcgtcaaatatttcccgtttaatatcgcatttgtcaagataataatagagtgtggtatgttcacgataagtataataacgcatctctttttcgtgtgaaattaaatagtttattacgtccaaagatgtagcataaccatcttgtgacctagtaataatataataatagagaactgttttacccattctatcatcataatcagtggtgtagtcgtaatcgtaatcgtctaattcatcatcccaattataatattcaccagcacgtctaatctgttctattttgatcttgtatccatactgtatgttgctacatgtaggtattcctttatccaataatagtttaaacacatctacattgggatttgatgttgtagcgtatttttctacaatattaataccatttttgatactatttatttctatacctttcgaaattagtaatttcaataagtctatattgatgttatcagaacatagatattcgaatatatcaaaatcattgatatttttatagtcgactgacgacaataacaaaatcacaacatcgtttttgatattattatttttcttggtaacgtatgcctttaatggagtttcaccatcatactcatataatggatttgcaccactttctatcaatgattgtgcactgctggcatcgatgttaaatgttttacaactatcatagagtatcttatcgttaaccatgattggttgttgatgctatcgcattttttggtttctttcatttcagttatgtatggatttagcacgtttgggaagcatgagctcatatgatttcagtactgtagtgtcagtactattagtttcaataagatcaatctctagatctatagaatcaaaacacgataggtcagaagataatgaatatctgtaggcttcttgttgtactgtaacttctggttttgttagatggttgcatcgtgctttaacgtcaatggtacaaattttatcctcgctttgtgtatcatattcgtccctactataaaattgtatattcagattatcatgcgatgtgtatacgctaacggtatcaataaacggagcacaccatttagtcataaccgtaatccaaaaatttttaaagtatatcttaacgaaagaagttgtgtcattgtctacggtgtatggtactagatcctcataagtgtatatatctagagtaatgtttaatttattaaatggttgataatatggatcctcgtgacaatttccgaagatggaaataagacataaacacgcaataaatctaattgcggacatggttactccttaaaaaaatacgaataatcaccttggctatttagtaagtgtcatttaacactatactcatattaatccatggactcataatctctatacgggattaacggatgttctatatacggggatgagtagttctcttctttaactttatactttttactaatcatatttagactgatgtatgggtaatagtgtttgaagagctcgttctcatcatcagaataaatcaatatctctgtttttttgttatacagatgtattacagcctcatatattacgtaatagaacgtgtcatctaccttattaactttcaccgcatagttgtttgcaaatacggttaatcctttgacctcgtcgatttccgaccaatctgggcgtataatgaatctaaactttaattgcttgtaatcattcgaaataatttttagtttgcatccgtagttatcccctttatgtaactgtaaatttctcaacgcgatatctccattaataatgatgtcgaattcgtgctgtatacccatactgaatggatgaacgaataccgacggcgttaatagtaatttactttttcatctttacatattgggtactagttttactatcataagtttataaattccacaagctactatggaataagccaaccatcttagtataccacacatgtcttaaagtttattaattaattacatgttgttttatatatatcgctacgaatttaaagagaaattagtttaggaagaaaaattatctatctacatcatcacgtctctgtattctacgatagagtgctactttaagatgcgacagatccgtgtcatcaaatatatactccattaaaatgattattccggcagcgaacttgatattggatatatcacaacctttgttaatatctacgacaatagacagcagtcccatggttccataaacagtgagtttatctttctttgaagagatattttgtagagatcttataaaactgtcgaatgacatcgcatttatatctttagctaaatcgtatatgttaccatcgtaatatctaaccgcgtctatcttaaacgtttccatcgctttaaagacgtttccgatagatggtctcatttcatcagtcatactgagccaacaaatataatcgtgtataacatctttgatagaatcagactctaaagaaaacgaatcggctttattatacgcattcatgataaacttaatgaaaaatgtttttcgttgtttaagttggatgaatagtatgtcttaataattgttattatttcattaattaatatttagtaacgagtacactctataaaaacgagaatgacataactaatcataactagttatcaaagtgtctaggacgcgtaattttcatatggtatagatcctgtaagcattgtctgtattctggagctattttctctatcgcattagtgagttcagaatatgttataaatttaaatcgaataacgaacataactttagtaaagtcgtctatattaactcttttattttctagccatcgtaataccatgtttaagatagtatattctctagttactacgatctcatcgttgtctagaatatcacatactgaatctacatccaattttagaaattggtctgtgttacatatctcttctatattattgttgatgtattgtcgtagaaaactattacgtagaccattttctttataaaacgaatatatagtactccaattatctttaccgatatatttgcacacataatccattctctcaatcactacatctttaagattttcgttgttaagatatttggctaaactatataattctattagatcatcaacagaatcagtatatatttttctagatccaaagacgaactctttggcgtcctctataatattcccagaaaagatattttcgtgttttagtttatcgagatctgatctgttcatatacgccatgattgtacggtacgttatgataaccgcataaaataaaaatccattttcatttttaaccaatactattcataattgagattgatgtaatactttgttactttgaacgtaaagacagtacacggatccgtatctccaacaagcacgtagtaatcaaatttggtgttgttaaacttcgcaatattcatcaatttagatagaaacttatactcatcatctgttttaggaatccatgtattattaccactttccaacttatcattatcccaggctatgtttcgtccatcatcgttgcgcagagtgaataattcttttgtattcggtagttcaaatatatgatccatgcatagatcggcaaagctattgtagatgtgatttttcctaaatctaatataaaactcgtttactagcaaacactttcctgatttatcgaccaagacacatatggtttctaaatctatcaagtggtggggatccatagttatgacgcagtaacatatattattacattcttgactgtcgctaatatctaaatatttattgttatcgtattggattctgcatatagatggcttgtatgtcaaagatatagaacacataaccaatttatagtcgcgctttacattctcgaatctaaagttaagagatttagaaaacattatatcctcggatgatgttatcactgtttctggagtaggatatattaaagtctttacagatttcgtccgattcaaataaatcactaaataatatcccacattatcatctgttagagtagtatcattaaatctattatattttatgaaagatatatcactgctcacctctatatttcgtacatttttaaactgtttgtataatatctctctgatacaatcagatatatctattgtgtcggtagacgataccgttacatttgaattaatggtgttccattttacaacttttaacaagttgaccaattcatttctaatagtatcaaactctccatgattaaatattttaatagtatccattttatatcactacggacacaaagtagctgacataaaccattgtataatttttatgttttatgtttattagcgtacacattttggaagttccggcttccatgtatttcctggagagcaagtagatgatgaggaaccagatagtttatatccgtacttgcacttaaagtctacattgtcgttgtatgagtatgatcttttaaacccgctagacaagtatccgtttgatattgtaggatgtggacatttaacaatctgacacgtgggtggatcggaccattctcctcctgaacacaggacactagagttaccaatcaacgaatatccactattgcaactataagttacaacgctcccatcggtataaaaatcctcgtatccgttatgtcttccgttggatatagatggaggggattggcatttaacagattcacaaataggtgcctcgggattccataccatagatccagtagatcctaattcacaatacgatttagattcaccgatcaactgatatccgctattacaagagtacgttatactagagccaaagtctactccaccaatatcaagttggccattatcgatatctcgaggcgatgggcatctccgtttaatacattgattaaagagtgtccatccagtacctgtacatttagcatatataggtcccattttttgctttctgtatccaggtagacatagatattctatagtgtctcctatgttgtaattagcattagcatcagtctccacactattcttaaatttcatattaatgggtcgtgacggaatagtacagcatgatagaacgcatcctattcccaacaatgtcaggaacgtcacgctctccaccttcatatttatttatccgtaaaaatgttatcctggacatcgtacaaataataaaaagcccatatatgttcgctattgtagaaattgtttttcacagttgctcaaaaacgatggcagtgacttatgagttacgttacactttggagtctcatctttagtaaacatatcataatattcgatattacgagttgacatatcgaacaaattccaagtatttgattttggataatattcgtattttgcatctgctataattaagatataatcaccgcaagaacacacgaacatctttcctacatggttaaagtacatgtacaattctatccatttgtcttccttaactatatatttgtatagataattacgagtctcgtgagtaattccagtaattacatagatgtcgccgtcgtactctacagcataaactatactatgatgtctaggcatgggagacttttttatccaacgatttttagtgaaacattccacatcgtttaatactacatatttctcatacgtggtataaactccacccattacatatatatcatcgtttacgaataccgacgcgcctgaatatctaggagtaattaagtttggaagtcttatccatttcgaagtgccgtgtttcaaatattctgccacacccgttgaaatagaaaattctaatcctcctattacatataactttccatcgttaacacaagtactaacttctgattttaacgacgacatattagtaaccgttttccattttttcgttttaagatctacccgcgatacggaataaacatgtctattgttaatcatgccgccaataatgtatagacaattatgtaaaacatttgcattatagaattgtctatctgtattaccgactatcgtccaatattctgttctaggagagtaatgggttattgtggatatataatcagagtttttaatgactactatattatgttttataccatttcgtgtcactggctttgtagatttggatatagttaatcccaacaatgatatagcattgcgcatagtattagtcataaacttgggatgtaaaatgttgatgatatctacatcgtttggatttttatgtatccactttaataatatcatagctgtaacatcctcatgatttacgttaacgtcttcgtgggataagatagttgtcagttcatcctttgataattttccaaattctggatcggatgtcaccgcagtaatattgttgattatttctgacatcgacgcattatatagttttttaattccatatcttttagaaaagttaaacatccttatacaatttgtgaaattaatattatgaatcatagtttttacacatagatctactacaggcggaacatcaattattatggcagcaactagtatcatttctacattgtttatggtgatgtttatcttcttccagcgcatatagtctaatagcgattcaaacgcgtgatagtttataccattcaatataatcgcttcatcctttagatggtgatcctgaatgcgtttaaaaaaattatacggagacgccgtaataatttccttattcacttgtataatttccccattgatagaaaatattacgctttccattcttaaagtactataagtaattatagtataatgtaaacgtttatatattcaatatttttataaaaatcattttgacattaattcctttttaaatttccgtctatcatctatagaaacgtattctatgaatttataaaatgcttttacgtgtcctatcgtaggcgatagaaccgctaaaaagcctatcgaatttctacaaaagaatctgttatatggtatagggagagtataaaacattaaatgtccgtacttattaaagtattcagtagccaatcctaactctttcgaatacttattaatggctcttgttctgtacgaatctatttttttgaacaacggacctagtggtatatcttgttctatgtatctaaaataatgtctgactagatccgttagtttaatatccgcagtcatcttgtctagaatggcaaatctaactgcgggtttaggctttagtttagtttctatatctacatctatgtctttatctaacaccaaaaatataatagctaatattttattacaatcatccggatattcttctacgatctcactaactaatgtttctttggttatactagtatagtcactatcggacaaataaagaaaatcagatgatcgatgaataatacatttaaattcatcatctgtaagatttttgagatgtctcattagaatattattagggttagtactcattatcattcggcagctattacttattttattatttttcaccatatagatcaatcattagatcatcaaaatatgtttcaatcatcctaaagagtatggtgaatgactcttcccatctaatttctgaacgttcaccaatgtctctagccactttggcactaatagcgatcattcgcttagcgtcttctatattattaactggttgatttaatctatctagcaatggaccgtcggacagcgtcattctcatgttcttaatcaatgtacatacatcgccgtcatctaccaattcatccaacaacataagctttttaaaatcatcattataataggtttgatcgttgtcatttctccaaagaatatatctaataagtagagtcctcatgcttagttaacaactattttttatgttaaatcaattagtacaccgctatgtttaatacttattcatattttagtttttaggattgagaatcaatacaaaaattaatgcatcattaattttagaaatacttagtttccacgtagtcaatgaaacatttgaactcatcgtacaggacgttctcgtacaggacgtaactataaaccggtttatatttgttcaagatagatacaaatccgataactttttttacgaattctacgggatccactttaaaagtgtcataccgggttctttttatttttttaaacagatcaatggtgtgatgttgattaggtcttttacgaatttgatatagaatagcgtttacatattctccataatggtcaatcgccatttgttcgtatgtcataaattctttaattatatgacactgtgtattatttagttcatccttgttcattgttaggaatctatccaaaatggcaattatactagaactataggtgcgttgtatacacatattgatgtgtctgtttatacaatccatgatatttggatccatgctactaccttcgggtaaaattgtagcatcatataccatttctagtactttaggttcattattatccattgcagaggacgtcatgatcgaatcataaaaaaatatattatttttatgttattttgttaaaaataatcatcgaatacttcgtaagatactccttcatgaacataatcagttacaaaacgtttatatgaagtaaagtatctacgatttttacaaaagtccggatgcataagtacaaagtacgcgataaacggaataataatagatttatctagtctatctttttctatagctttcatagttagatacatggtctcagaagtaggattatgtaacatcagcttcgataaaatgactgggttatttagtcttacacattcgctcatacatgtatgaccgttaactacagagtctacactaaaatgattgaacaatagatagtctaccattgtttcgtattcagatagtacagcgtagtacatggcatcttcacaaattatatcattgtctaatagatatttgacgcatcttatggatcccacttcaacagccatcttaaaatcatattgctttcctttatcattaataatttctagaacatcatctctatcataaaagatacaaatattaactgtttgatccgtaataacattgctagtcaatagcaatttgttaataagatgcgctgggctcaatgtcttaataagaagtgtaagaggactatctccgaatttgttttgtttattaacatccgttgatggaagtaaaagatctataatgtctacattcttgactgttttagagcatacaatatggagaggtgtatttccatcatgatctggttttgagggactaattcctagtttcatcatccatgagattgtagaagcttttggattgtctgacataagatgtctatgaatatgatttttgccaaatttatccactatcctggcttcgaatccgatggacattatttttttaaacactctttctgaaggatctgtacacgccaacaacggaccacatccttcttcatcaaccgagttgttaatcttggctccatactgtaccaataaatttattctctctatgacttcatcatctgttcccgagagataatatagaggtgttttatgctgtttatcacacgcgtttggatctgcgccgtgcgtcagcagcatcgcgactattctattattattaattttagaagctatatgcaatggataatttccatcatcatccgtctcatttggagagtatcctctatgaagaagttcttcgacaaatcgttcatctagtcctttaattccacaatacgcatgtagaatgtgataattatttccagaaggttcgatagcttgtagcatattcctaaatacatctaaatttttactattatatttggcataaagagatagataatactcggccgacataatgttgtccattgtagtataaaaattaatatttctatttctatttctgtatatttgcaacaatttactctctataacaaatatcataacttagtttttttatgtcaagaaggcactggtttagttcatctataaatgtcacgccataactaccacgcatgccatactcagaattatgataaagatatttatccttggggtgtaggtaatggggattaatctttgttggatcagtctctaagttaacacatgtcacacatgatccatttatagttatatcacacgatgatgatttatgaattgattccggaagatcgctatcgtattttgtggttccacaattcatttccatacatgttattgtcacactaatattatgatgaactttatctagccgctgagtggtaaacaacagaacagatagtttattatctttaccaacaccctcagccgctgccacaaatctctgatccgtatccatgatggtcatgtttatttctagtccgtatccagtcaacactatgttagcatttctgtcgatatagctttcactcatatgacactcaccaataatagtagaattaatgtcgtaatttacaccaatagtgagttcggcggcaaagtaccaataccggtaatcttgtcgaggaggacatatagtattcttgtattctaccgaatacccgagagatgcgatacaaaagagcaagactaatttgtaaaccatcttactcaaaatatgtaacaatagtacgatgcaatgagtaagacaataggaaatctatcttatatacacataattattctatcaattttaccaattagttagtgtaatgttaacaaaaatgtgggagaatctaattagtttttctttacacaattgacgtacatgagtctgagttccttgtttttgctaattatttcatccaatttattattcttgacgatatcgagatcttttgtataggagtcaaacttgtattcaacatgcttttctataatcattttagctatttcggcatcatccaatagtacattttccagattagcagaatagatattaatgtcgtatttgaacagagcctgtaacatctcaatgtctttattatctatagccaatttaatgtccggaatgaagagaagggaattattggtgtttgtcgacgtcatatagtcgagcaagagaatcatcatatccacgtgtccattttttatagtgatgtgaatacaactaaggagaatagccagatcaaaagtagatggtatctctgaaagaaagtaggaaacaatacttacatcattaagcatgacggcatgataaaatgaagttttccatccagttttcccatagaacatcagtctccaatttttcttaacaaacagttttaccgtttgcatgttaccactatcaaccgcataatacaatgcggtgtttcccttgtcatcaaattgtgaatcatccagtccactgaatagcaaaatctttactattttggtatcttccaatgtggctgcctgatgtaatggaaattcattctctagaagatttttcaatgctccagcgttcaacaacgtacatactagacgcacgttattatcagctattgcataatacaaggcactatgtccatggacatccgccttaaatgtatctttactagagagaaagcttttcagctgcttagacttccaagtattaattcgtgacagatccatgtctgaaacgagacgctaattagtgtatattttttcattttttataattttgtcatattgcaccagaattaataatatctttaatagatctgattagtagatacatggctatcgcaaaacaacatatacacatttaataaaaataatatttattaagaaaattcagatttcacgtacccatcaatataaataaaataatgattccttacaccgtacccatattaaggagattccaccttacccataaacaatataaatccagtaatatcatgtctgatgatgaacacaaatggtgtattaaattccagtttttcaggagatgatctcgccgtagctaccataatagtagatgcctctgctacagttccttgttcgtcgacatctatctttgcattctgaaacattttataaatatataatgggtccctagtcatatgtttaaacgacgcattatctggattaaacatactaggagccatcatttcggctatcgacttaatatccctcttattttcgatagaaaatttagggagtttaagattgtacactttattccctaattgagacgaccaatagtctaattttgcagccgtgatagaatctgtgaaatgggtcatattatcacctattgccaggtacatactaatattagcatccttatacggaaggcgtaccatgtcatattctttgtcatcgattgtgattgtatttccttgcaatttagtaactacgttcatcatgggaaccgttttcgtaccgtacttattagtaaaactagcattgcgtgttttagtgatatcaaacggatattgccatatacctttaaaatatatagtattaatgattgcccatagagtattattgtcgagcatattagaatctactacattagacataccggatctacgttctactatagaattaattttattaaccgcatctcgtctaaagtttaatctatataggccgaatctatgatattgttgataatacgacggtttaatgcacacagtattatctacgaaactttgataagttagatcagtgtacgtatatttagatgttttcagcttagctaatcctgatattaattctgtaaatgctggacccagatctctttttctcaaatccatagtcttcaataattctattctagtattacctgatgcaggcaatagcgacataaacatagaaaacgaataaccaaacggtgagaagacaatattatcatcttgaatatttttatacgctactataccggcattggtaaatccttgtagacgataggcggacgctgaacacgctaacgatagtatcaataacgcaatcatgattttatggtattaataattaaccttatttttatgttcggtataaaaaaattattgatgtctacacatccttttgtaattgacatctatatatccttttgtataatcaactctaatcactttaacttttacagttttccctaccagtttatccctatattcaacatatctatccatatgcatcttaacactctctgccaagatagcttcagagtgaggatagtcaaaaagataaatatatagagcataatcattctcgtatactctgccctttattacatcacccgcattgggcaacgaataacaaaatgcaagcatcttgttaacgggctcgtaaattgggataaaaattatgtttttattgtcttatatctattttattcaagagaatattcaggaatttctttttccggttgtatctcgtcgcagtatatatcatttgtacattgtttcatattttttaatagtttacaccttttagtaggactagtatcgtacaattcatagctgtattttgaattccaatcacgcataaaaatatcttccaattgttgacgaagacctaatccatcatccggtgtaatattaatagatgctccacatgtatccgtaaagtaatttcctgtccaatttgaggtacctatataggccgttttatcggttaccatatatttggcatggtttaccctagaatacggaatgggaggatcagcatctggtacaataaatagctttacttctatatttatgtttttagattttagcatagcgatagatcttaaaaagtttctcatgataaacgaagatcgttgccagcaactaatcaatagcttaacggatacttgtctgtctatagcggatcttcttaattcatcttctatataaggccaaaacaaaattttacccgccttcgaataaataatagggataaagttcataacagatacataaacgaatttactcgcatttctaatacatgacaataaagcggttaaatcattggttctttccatagtacatagttgttgcggtgcagaagcaataaatacagagtgtggaacgccgcttacgttaatactaagaggatgatctgtattataatacgacggataaaagtttttccaattatatggtagattgttaactccaagataccagtatacctcaaaaatttgagtgagatccgctgccaagttcctattattgaagatcgcaatacccaattccttgacctgagttagtgatctccaatccatgttagcgcttcctaaataaatatgtgtattatcagatatccaaaattttgtatgaagaactcctcctaggatatttgtaatatctatgtatcgtacttcaactccggccatttgtagtctttcaacatcctttaatggtttgttagatttattaacggctactctaactcgtactcctcttttgggtaattgtacaatctcgtttaatattatcgtgccgaaattcgtacccacttcatccgataaactccaataaaaagatgatatatctagtgtttttgtggtattggatagaatttccctccacatgttaaatgtagacaaatatactttatcaaattgcatacctataggaatagtttctgtaatcactgcgattgtattatccggattcattttatttgttaaaagaataatcctatatcacttcactctattaaaaatccaagtttctatttctttcatgactgattttttaacttcatccgtttccttatgaagatgatgtttggcaccttcataaatttttatttctctattacaatttgcatgttgcatgaaataatatgcacctaaaacatcgctaatcttattgtttgttccctggagtatgagagtcggggggtgttaatcttggaaattatttttctaaccttgttggtagccttcaagacctgactagcaaatccagccttaattttttcatgattgactaatgggtcgtattggtatttataaactttatccatatctctagatactgattctggacatagctttccgactggcgcatttggtgtgatggttcccataagtttggcagctagcagattcagtcttgaaacagcatctgcattaactagaggagacattagaatcattgctgtaaacaagtttggattatcgtaagaggctagctcccatggaatgacccaataagtagatttaatagttaccacgtgctgtaccaaagtcatcaatcatcattttttcaccattacttcttccatgtccaatatgatcatgtgagaatactaaaattcctaacgatgatatgttttcagctagttcgtcataacgtccagaatgtttaccagctccatgacttatgaatactaatgccttaggatatgtaataggtttccaatatttacaatatatgtaatcattgtccagattgaacatacagtttgcactcatgattcacgttatataactatcaatattaacagttcgtttgatgatcatattatttttatgttttattgataattgtaaaaacatacaattaaatcaatatagaggaaggagacggctactgtcttttgtaagatagtcatggcgactaaattagattatgaggatgctgttttttactttgtggatgatgataaaatatgtagtcgcgactccatcatcgatctaatagatgaatatattacgtggagaaatcatgttatagtgtttaacaaagatattaccagttgtggaagactgtacaaggaattgatgaagttcgatgatgtcgctatacggtactatggtattgataaaattaatgagattgtcgaagctatgagcgaaggagaccactacatcaattttacaaaagtccatgatcaggaaagtttattcgctaccataggaatatgtgctaaaatcactgaacattggggatacaaaaagatttcagaatctagattccaatcattgggaaacattacagatttgatgaccgacgataatataaacatcttgatactttttctagaaaaaaaattgaattgatgatataggggtcttcataacgcataattattacgttagcattctatatccgtgttaaaaaaaattatcctatcatgtatttgagagttttatatgtagcaaacatgatagctgtgatgccaataagctttagatattcacgcgtgctagtgttagggatggtattatctggtggtgaaatgtccgttatataatctacaaaacaatcatcgcatatagtatgcgatagtagagtaaacatttttatagtttttactggattcatacatcgtctacccaattcggttataaatgaaattgtcgccaatcttacacccaaccccttgttatccattagcatagtattaacttcgttatttatgtcataaactgtaaatgattttgtagatgccatatcatacatgatattcatgtccctattataatcattactaactttatcacaatatatgttgataatatctatatatgatctagtctttgtgggcaactgtctatacaagtcgtctaaacgttgtttactcatatagtatcgaacagccatcattacatggtcccgttccgttgatagataatcgagtatgttagtggacttgtcaaatctatataccatattttctggaagtggatatacatagtcgtgatcaacattattgctagcctcatcttctatatcctgtactataccattatctatatcatctacataatctatgatattattacacataaacatcgacaacatactattgtttattatctaagtcctgttgatccaaacccttgatctcctctatttgtactatctagagattgtacttcttccagttctggataatatatacgttgatagattagctgagctattctatctccagtatttacattaaacgtacattttccattattaataagaatgactcctatgtttcccctataatcttcgtctattacaccacctcctatatcaatgccttttagtgacagaccagacctaggagctattctaccatagcagaacttaggcatggacatactaatatctgtcttaattaactgtctttctcctggagggatagtataatcgtaagcgctatacaaatcatatccggcagcacccggcgattgcctagtaggagatttagctctgttagtttccttaacaaatctaactggtgagttaatattcatgttgaacataaaactaatattttatttcaaaattatttaccatcccatatattccatgaataagtgtgatgattgtacacttctatagtatctatatacgatccacgataaaatcctcctatcaatagcagtttattatccactatgatcaattctggattatccctcggataaataggatcatctatcagagtccatgtattgctggattcacaataaaattccgcatttctaccaaccaagaataaccttctaccgaacactaacgcgcatgatttataatgaggataataagtggatggtccaaactgccactgatcatgattgggtagcaaatattctgtagttgtatcagtttcagaatgtcctcccattacgtatataacattgtttatggatgccactgctggattacatctaggtttcagaagactcggcatattaacccaagcagcatccccgtggaaccaacgctcaacagatgtgggatttggtagacctcctactacgtataatttattgttagcgggtatcccgctagcatacagtctggggctattcatcggaggaattggaatccaattgtttgatatataatttacagctatagcattgttatgtatttcattgttcatccatccaccgatgagatatactacttctccaacatgagtacttgtacacatatggaatatatctataatttgatccatgttcataggatactctatgaatggatacttgtatgatttgcgtggttgtttatcacaatgaaatattttggtacagtctagtatccattttacattatttatacctctgggagaaagataatttgacctgattacatttttgataaggagtagcagatttcctaatttatttcttcgcctcatataccacttaatgacaaaatcaactacataatcctcatctggaacatttagttcatcgctttctagaataagtttcatagatagataatcaaaattgtctatgatgtcatcttccagttccaaaaagtgtttggcaataaagtttttagtatgacataagagattggatagtccgtattctatacccatcatgtaacactcgacacaatattcctttctaaaatctcgtaagataaagtttatacaagtgtagatgataaattctacagaggttaatatagaagcacgtaataaattgacgacgttatgactatctatatatacctttccagtatatgagtaaataactatagaagttaaactgtgaatgtcaaggtctagacaaacccttgtaactggatctttatttttcgtgtatttttgacgtaaatgtgtgcgaaagtaaggagataactttttcaatatcgtagaattgactattatattgcctcctatggcatcaataattgttttgaatttcttagtcatagacaatgctaatatattcttacagtacacagtattgacaaatatcggcatttatgtttctttaaaagtcaacatctagagaaaaatgattatctttttgagacataactcccattttttggtattcacccacacgtttttcgaaaaaattagtttttccttccaatgatatattttccatgaaatcaaacggattggtaacattataaatttttttaaatcccaattcagaaatcaatctatccgcgacgaattctatatatgttttcatcatttcacaattcattcctataagtttaactggaagagccgcagtaagaaattcttgttcaatggatactgcatctgttataatagatctaacggtttcttcactcggtggatgcaataaatgtttaaacatcaaacatgcgaaatcgcagtgcagaccctcgtctctactaattagttcgttggaaaacgtgagtccgggcattaggccacgctttttaagccaaaatatggaagcgaatgatccagaaaagaaaattccttctactgcagcaaaggcaataagtctctctccataaccggcgctgtcatgtatccacttttgagcccaatcggccttcttttttacacaaggcatcgtttctatggcattaaagagatagtttttttcattactatctttaacataagtatcgatcaaaagactatacatttccgaatgaatgttttcaatggccatctgaaatccgtagaaacatctagcctcggtaatctgtacttctgtacaaaatcgttccgccaaattttcattcactattccgtcactggctgcaaaaaacgccaatacatgttttataaaatatttttcgtctggtgttagtttattccaatcattgatatctttagatatatctacttcttccactgtccaaaatgatgcctctgcctttttatacatgttccagatgtcatgatattggattgggaaaataacaaatctatttggatttggtgcaaggatgggttccataactaaattaacaataacaataaattttttttcagttatctatatgcctgtacttggattttttgtacatcgatatcgccgcaatcactacaataattacaagtattattgatagcattgttattagtactatcataattaaattatctacattcatgggtgctgaataatcgttattatcatcattatcattttgtaattgtgacatcatactagataaatcgtttgcgagattgttgtgggaagcgggcatggaggatgcattatcattattatttaacgccttccatttggattcacaaatgttacgcacattcaacattttatggaaactataattttgtgaaaacaaataacaagaaaactcgtcatcgttcaaatttttaacgatagtaaaccgattaaacgtcgagctaatttctaacgctagcgactctgttggatatgggtttccagatatatatcttttcagttcccctacgtatctataatcatctgtaggaaatggaagatatttccatttatctactgttcctaatatcatatgtggtggtgtagtagaaccattaagcgcgaaagatgttatttcgcatcgtattttaacttcgcaataatttctggttagataacgcactctaccagtcaagtcaatgatattagcctttacagatatattcatagtagtcgtaacgatgactccatcttttagatgcgatactcctttgtatgtaccagaatcttcgtacctcaaactcgatatatttaaacaagttaatgagatattaacgcgttttatgaatgatgatatataaccagaagttttatcctcggtggctagcgctataaccttatcattataataccaactagtgtgattaatatgtgacacgtcagtgtgggtacaaatatgtacattatcgtctacgtcgtattcgatacatccgcatacagccaacaaatataaaatgacaaatactctaacgccgttcgtacccatcttgatgcggtttaataaatgttttgatttcaatttattgtaaaaaaagattcggttttatactgttcgatattctcattgcttatattttcatctatcatctccacacagtcaaatccgtggttagcatgcacctcatcaaccggtaaaagactatcggactcttctatcattataactctagaatatttaatttggtcattattaatcaagtcaattatcttatttttaacaaacgtgagtattttactcattttttataaaaacttttagaaatatacagactctatcgtgtgtctatatcttctttttatatccaatgtatttatgtctgatttttcttcatttatcatatataatggtccaaattctacacgtgcttcggattcatccagatcattaaggttcttataattgtaacatccttctcttccctcttctacatcttccttcttattcttattcttagcgtcacagaatctaccacagcaggatcccatgacgagcgtcatattaaactaatccattttcaattataatatatgattagtaatgaccattaaaataaaaaatattcttcataaccggcaagaaagtgaaaagttcacattgaaactatgtcagtagtatacatcatgaaatgatgatatatatatactctattttggtggaggattatatgatataattcgtggataatcatttttaagacacatttctttattcgtaaatcttttcacgttaaatgagtgtccatattttgcaatttcttcatatgatggcggtgtacgtggacgaggctgctcctgttcttgttgtggtcgccgactgtcgtgtctgcgtttagatccctccattatcgcgattgcgtagatggagtactattttataccttgtaattaaatttttttattaattaaacgtataaaaacgttccgtatctgtatttaagagccagatttcgtctaatagaacaaatagctacagtaaaaataactagaataattgctacacccactagaaaccacggatcgtaatacggcaatcggttttcgataataggtggaacgtatattttatttaaggacttaacaattgtctgtaaaccacaatttgcttccgcggatcctgtattaactatctgtaaaagcatatgttgaccgggcggagccgaacattctccgatatctaatttctgtatatctataatattattaacctccgcatacgcattacagttcttttctagcttggataccgcactaggtacatcgtctagatctattcctatttcctcagcgatagctcttctatccttttccggaagcaatgaaatcacttcaataaatgattcaaccatgagtgtgaaactaagtcgagaattactcatgcatttgttagttattcggagcgcgcaatttttaaactgtcctataacctctcctatatgaatagcacaagtgacattagtagggatagaatgttgagctaatttttgtaaataactatctataaaaagattatacaaagttttaaactctttagtttccgccatttatccagtctgagaaaatgtctctcataataaatttttccaagaaactaattgggtgaagaatggaaacctttaatctatatttatcacagtctgttttggtacacatgatgaattcttccaatgccgtactaaattcgatatctttttcgatttctggatatgtttttaataaagtatgaacaaagaaatggaaatcgtaataccagttatgtttaactttgaaattgttttttattttcttgttaatgattccagccacttgggaaaagtcaaagtcgtttaatgccgatttaatacgttcattaaaaacaaactttttatcctttagatgaattattattggttcattggaatcaaaaagtaagatattatcgggtttaagatctgcgtgtaaaaagttgtcgcaacagggtagttcgtagattttaatgtataacagagccatctgtaaaaagataaactttatgtattgtaccaaagatttaaatcctaatttgatagctaactcggtatctactttatctgccgaatacagtgctaggggaaaaattataatgtttcctctttcatattcgtagttagttctcttttcatgttcgaaaaagtgaaacatgcggttaaaatagtttataacattaatattactgttaataactgccggataaaagtgggatagtaatttcacgaatttgatactgtcctttctctcgttaaacgcctttaaaaaaactttagaagaatatctcaatgagagttcctgaccatccatagtttgtatcaataatagcaacatatgaagaacacgtttatacagagtatgtaaaaatgttaatttatagtttaatcccatggcccacgcacacacgattaattttttttcatctccctttagattgttgtatagaaatttgggtactgtgaactccgccgtagtttccatgggactatataattttgtggcctcgaatacaaattttactacatagttatctatcttaaagactataccatatcctcctgtagatatgtgataaaaatcgtcgtttataggataaaatcgtttatccttttgttggaaaaaggatgaattaatgtaatcattctcttctatctttagtagtgtttccttattaaaattcttaaaataatttaacaatctaactgacggagcccaattttggtgtaaatctaattgggacattatattgttaaaatacaaacagtctcctaatataacagtatctgataatctatggggagacatccattgatattcaggggatgaatcattggcaacacccatttattgtacaaaaagccccaatttacaaacgaaagtccaggtttgatagagacaaacaattaactattttgtctctgtttttaacacctccacagtttttaatttctttagtaatgaaattattcacaatatcagtatcttctttatctaccagagattttactaacttgataaccttggctgtctcattcaatagggtagtaatatttgtatgtgtgatattgatatctttttgaattgtttcttttagaagtgattctttgatggtgccagcatacgaattacaataatgcagaaactcggttaacatgcaggaattatagtaagccaattccaattgttgcctgtgttgtattagagtgtcaatatgagcaatggtgtccttgcgtttctctgatagaatgcgagcagcgattttggcgttatcatttgacgatatttctggaatgacgaatcctgtttctactaactttttggtaggacaaagtgaaacaatcaagaagatagcttctcctcctatttgtggaagaaattgaactcctctagatgatctactgacgatagtatctccttgacagatattggaccgaattacagaagtacctggaatgtaaagccctgaaaccccctcattttttaagcagattgttgccgtaaatcctgcactatgcccaagatagagagctcctttggtgaatccatctctatgtttcagtttaaccaagaaacagtcagctggtctaaaatttccatctctatctaatacagcatctaacttgatgtcaggaactatgaccggtttaatgttatatgtaacattgagtaaatccttaagttcataatcatcactgtcatcagttatgtacgatccaaacaatgtttctaccggcatagtggatacgaagatgctatccatcagaatgtttccctgattagtattttctatatagctattcttctttaaacgattttccaaatcagtaactatgttcatttttttaggagtaggacgcctagccagtatggaagaggattttctagatcctctcttcaacatctttgatctcgatggaatgcaaaaccccatagtgaaacaaccaacgataaaaataatattgtttttcactttttataattttaccatctgactcatggattcattaatatctttataagagctactaacgtataattctttataactgaactgagatatatacaccggatctatggtttccataattgagtaaatgaatgctcggcaataactaatggcaaatgtatagaacaacgaaattatactagagttgttaaagttaatattttctatgagctgttccaataaattatttgttgtgactgcgttcaagtcataaatcatcttgatactatccagtaaaccgtttttaagttctggaatattatcatcccattgtaaagcccctaattcgactatcgaatatcctgctctgatagcagtttcaatatcgacggacgtcaatactgtaataaaggtggtagtattgtcatcatcgtgataaactacgggaatatggtcgttagtaggtacggtaactttacacaacgcgatatataactttccttttgtaccatttttaacgtagttgggacgtcctgcagggtattgttttgaagaaatgatatcgagaacagatttgatacgatatttgttggattcctgattattcactataatataatctagacagatagatgattcgataaatagagaaggtatatcgttggtaggataatacatccccattccagtattctcggatactctattgatgacactagttaagaacatgtcttctattctagaaaacgaaaacatcctacatggactcattaaaacttctaacgctcctgattgtgtctcgaatgcctcgtacaaggatttcaaggatgccatagattctttgaccaacgatttagaattgcgtttagcatctgatttttttattaaatcgaatggtcggctctctggtttgctaccccaatgataacaatagtcttgtaaagataaaccgcaagaaaatttatacgcatccatccaaataaccctagcaccatcggatgatattaatgtattattatagattttccatccacaattattgggccagtatactgttagcaacggtatatcgaatagattactcatgtaacctactagaatgatagttcgtgtactagtcataatatctttaatccaatctaaaaaatttaaaattagattttttacactgttaaagttaacaaaagtattacccgggtacgtggatatcatatatggcattggtccattatcagtaatagctccataaactgatacggcgatggtttttatatgtgtttgatctaacgaggaagaaattcgcgcccacaattcatctctagatatgtatttaatatcaaacggtaacacatcaatttcgggacgcgtatatgtttctaaatttttaatccaaatataatgatgacctatatgccctattatcatactgtcaactatagtacacctagggaacttacgatacatctgtttcctataatcgttaaattttacaaatctataacatgctaaaccttttgacgacagccattcattaatttctgatatggaatctgtattctcgataccgtatcgttctaaagccagtgctatatctccctgttcgtgggaacgctttcgtataatatcgatcaacggataatctgaagtttttggagaataatatgactcatgatctatttcgtccataaacaatctagacataggaattggaggcgatgatcttaattttgtgcaatgagtcgtcaatcctataacttctaatcttgtaatattcatcatcgacataatactatctatgttatcatcgtatattagtataccatgaccttcttcatttcgtgccaaaatgatatacagtcttaaatagttacgcaatatctcaatagtttcataattgttagctgttttcatcaaggtttgtatcctgtttaacatgatggcgttctataacgtctctattttctatttttaattttttaaatttttaacgatttactgtggctagatacccaatctctctcaaatatttttttagcctcgcttacaagctgtttatctatactattaaaactgacgaatccgtgattttggtaatgggttccgtcgaaatttgccgaagtgatatgaacatattcgtcgtcgactatcaacaattttgtattattctgaatagtgaaaaccttcacagatagatcattttgaacacacaacgcatctagacttttggcggttgccatagaatatacgtcgttcttatcccaattaccaactagaagtctgatcttaactcctctattaatggctgcttctataatggagttgtaaatgtcgggccaatagtagctattaccgtcgacacgtgtagtgggaactatggccaaatgttcaatatctatactagtcttagctgacctgagtttatcaataactacatcggtatctagatctctagaatatcccaataggtgttccggagaatcagtaaagaacactccacctataggattcttaatatgatacgcagtgctaactggcaaacaacaagccgcagagcataaattcaaccatgaattttttgcgctattaaaggctttaaaagtatcaaatcttctacgaagatctgtggccagcgggggataatcagaatatacacctaacgttttaatcgtatgtatagatcctccagtaaatgacgcgtttcctacataacatctttcatcatctgacacccaaaaacaaccgagtagtagtcccacattattttttttatctatattaacggttataaaatttatatccgggcagtgactttgtagctctcccagatttcttttccctcgttcatctagcaaaactattattttaatccctttttcagatgcctcttttagtttatcaaaaataagcgctcccctagtcgtactcagaggattacaacaaaaagatgctatgtatatatatttcttagctagagtgataatttcgttaaaacattcaaatgttgttaaatgatcggatctaaaatccatattttctggtagtgtttctaccagcctacattttgctcccgcaggtaccgatgcaaatggccacatttagttaacataaaaacttatacatcctgttctatcaacgattctagaatatcatcggctatatcgctaaaattttcatcaaagtcgacatcacaacctaactcagtcaatatattaagaagttccatgatgtcatcttcgtctatttctatatccgtatccattgtagattgttgaccgattatcgagtttaaatcattactaatactcaatccttcagaatacaatctgtgtttcattgtaaatttataggcggtgtatttaagttggtagattttcaattatgtattaatatagcaacagtagttcttgctcctccttgattctagcatcctcttcattattttcttctacgtacataaacatgtccaatacgttagacaacacaccgacgatggcggccgcagatctcgagttatgatctacttccttaccgtgcaataaattagaatatattttctacttttacgagaaattaattattgtatttattatttatgggtgaaaaacttactataaaaagcgggtgggtttggaattagtgaaagcttaaaaattgaaattttattttttttttttggaatataaataagctcgaagtcgacagatctaggcctggtaccaggaggaggaattcagcttaaagatgacttcgaaagtttatgatccagaacaaaggaaacggatgataactggtccgcagtggtgggccagatgtaaacaaatgaatgttcttgattcatttattaattattatgattcagaaaaacatgcagaaaatgctgttatttttttacatggtaacgcggcctcttcttatttatggcgacatgttgtgccacatattgagccagtagcgcggtgtattataccagatcttattggtatgggcaaatcaggcaaatctggtaatggttcttataggttacttgatcattacaaatatcttactgcatggtttgaacttcttaatttaccaaagaagatcatttttgtcggccatgattggggtgcttgtttggcatttcattatagctatgagcatcaagataagatcaaagcaatagttcacgctgaaagtgtagtagatgtgattgaatcatgggatgaatggcctgatattgaagaagatattgcgttgatcaaatctgaagaaggagaaaaaatggttttggagaataacttcttcgtggaaaccatgttgccatcaaaaatcatgagaaagttagaaccagaagaatttgcagcatatcttgaaccattcaaagagaaaggtgaagttcgtcgtccaacattatcatggcctcgtgaaatcccgttagtaaaaggtggtaaacctgacgttgtacaaattgttaggaattataatgcttatctacgtgcaagtgatgatttaccaaaaatgtttattgaatcggatccaggattcttttccaatgctattgttgaaggcgccaagaagtttcctaatactgaatttgtcaaagtaaaaggtcttcatttttcgcaagaagatgcacctgatgaaatgggaaaatatatcaaatcgttcgttgagcgagttctcaaaaatgaacaagcggccgccgccaccatgagcaagggcgaggaactgttcactggcgtggtcccaattctcgtggaactggatggcgatgtgaatgggcacaaattttctgtcagcggagagggtgaaggtgatgccacatacggaaagctcaccctgaaattcatctgcaccactggaaagctccctgtgccatggccaacactggtcactaccttcacctatggcgtgcagtgcttttccagatacccagaccatatgaagcagcatgactttttcaagagcgccatgcccgagggctatgtgcaggagagaaccatctttttcaaagatgacgggaactacaagacccgcgctgaagtcaagttcgaaggtgacaccctggtgaatagaatcgagctgaagggcattgactttaaggaggatggaaacattctcggccacaagctggaatacaactataactcccacaatgtgtacatcatggccgacaagcaaaagaatggcatcaaggtcaacttcaagatcagacacaacattgaggatggatccgtgcagctggccgaccattatcaacagaacactccaatcggcgacggccctgtgctcctcccagacaaccattacctgtccacccagtctgccctgtctaaagatcccaacgaaaagagagaccacatggtcctgctggagtttgtgaccgctgctgggatcacacatggcatggacgagctgtacaagtgagcggccgccctgctagcaagcttgctagcggccgctcgagatctgcggccgctacagacacgaatatgactaaaccgatgaccatttaaaaacccctctctagctttcacttaaactgtatcgatcattcttttagcacatgtataatataaaaacattattctatttcgaatttaggcttccaaaaatttttcatccgtaaaccgataataatatatatagacttgttaatagtcggaataaatagattaatgcttaaactatcatcatctccacgattagagatacaatatttacattctttttgctgtttcgaaactttatcaatacacgttaatacaaacccaggaaggagatattgaaactgaggctgttgaaaatgaaacggtgaatacaataattcagataatgtaaaatcatgattccgtattctgatgatattagaactgctaatggatgtcgatggtatgtatctaggagtatctattttaacaaagcatcgatttgctaatatacaattatccttttgattaattgttattttattcatattcttaaaaggtttcatatttatcaattcttctacattaaaaatttccatttttaatttatgtagccccgcaatactcctcattacgtttcattttttgtctataatatccattttgttcatctcggtacatagattatccaattgagaagcgcatttagtagttttgtacattttaagtttattgacgaatcgtcgaaaactagttatagttaacattttattatttgataccctgatattaatacccctgccgttactattatttataactgatgtaatccacgtaacattggaattaactatcgatagtaatgcatcgacgcttccaaaattgtctattataaactcaccgataatttttttattgcatgttttcatattcattaggattatcaaatctttaatcttattacgattgtatgcgttgatattacaagacgtcattctaaaagacggaggatctccatcaaatgccagacaatcacgtacaaagtacatggaaataggttttgttctattgcgcatcatagatttatatagaacacccgtagaaatactaatttgttttactctataaaatactaatgcatctatttcatcgttttgtataacgtctttccaagtgtcaaattccaaatttttttcattgatagtaccaaattcttctatctctttaactacttgcatagataggtaattacagtgatgcctacatgccgttttttgaaactgaatagatgcgtctagaagcgatgctacgctagtcacaatcaccactttcatatttagaatatatatatgtaaaaatatagtagaatttcattttgtttttttctatgctataaatgaattctcattttgcatctgctcatactccgttttatattaataccaaagaaggaagatatctggttctaaaagccgttaaagtatgcgatgttagaactgtagaatgcgaaggaagtaaagcttcctgcgtactcaaagtagataaaccctcatcgcccgcgtgtgagagaagaccttcgtccccgtccagatgcgagagaatgaataaccctggaaaacaagttccgtttatgaggacggacatgctacaaaatatgttcgcggctaatcgcgataatgtagcttctagacttttgtcctaaaatactattatatccttttcgatattaataaatccgtgtcgtccaggttttttatctctttcagtatgtgaatagataggtattttatctctattcatcatcgaatttaagagatccgataaacattgtttgtattctccagatgtcagcatctgatacaacaatatatgtgcacataaacctctggcacttatttcatgtaccttccccttatcactaaggagaatagtatttgagaaatatgtatacatgatattatcatgaattagatatacagaatttgtaacactctcgaaatcacacgatgtgtcggcgttaagatctaatatatcactcgataacacattttcatctagatacactagacattttttaaagctaaaatagtctttagtagtaacagtaactatgcgattattttcatcgatgatacatttcatcggcatattattacgcttaccatcaaagactataccatgtgtatatctaacgtattctagcatggttgccatacgcgcattaaacttttcaggatctttggatagatcttccaatctatctatttgagaaaacatttttatcatgttcaatagttgaaacgtcggatccactatatagatattatctataaagattttaggaactacgttcatggtatcctggcgaatattaaaactatcaatgatatgattatcgttttcatcttttatcaccatatagtttctaagatatgggattttacttaatataatattatttcccgtgataaattttattagaaaggccaaatctataagaaaagtcctagaattagtctgaagaatatctatatcgccgtatagtatatttggattaattagatatagagaatatgatccgtaacatatacaacttttattatggcgtctaagatattcttccatcaacttattaacatttttgactagggaagatacattatgacgtcccattacttttgccttgtctattactgcgacgttcatagaatttagcatatctcttgccaattcttccattgatgttacattataagaaattttagatgaaattacatttggagctttaatagtaagaactcctaatatgtccgtgtatgtggtcactaatacagattgtagttctataatcgtaaataatttacctatattatatgtttgagtctgtttagaaaagtagctaagtatacgatcttttatttctgatgcagatgtattaacatcggaaaaaaatctttttttattcttttttactaaagatacaaatatgtctttgttaaaaacagttattttctgaatatttctagcttgtaattttaacatatgatattcgttcacactaggtactctgcctaaataggtttctataatctttaatgtaatattaggaaaagtattctgatcaggattcctattcattttgaggatttaaaactctgattattgtctaatatggtctctacgcaaactttttcacagagcgatagagtttttgataactcgtttttcttaagaaatataaaactactgtctccagagctcgctctatcttttattttatctaattcgatacaaactcctgatactggttcagaaagtaattcattaattttcagtcctttatagaagatatttaatatagataatacaaaatcttcagtttttgatatcgatctgattgatcctagaactagatatattaataacgtgctcattaggcagtttatggcagcttgataattagatatagtatattccagttcatatttattagataccgcattgcccagattttgatattctatgaattcctctgaaaataaatccaaaataactagacattctattttttgtggattagtgtactctcttccctctatcatgttcactactggtgtccacgatgataaatatctagagggaatataatatagtccataggatgccaatctagcaatgtcgaataactgtaattttattcttcgctcttcattatgaattgattcttgaggtataaacctaacacaaattatattattagacttttcgtatgtaatgtctttcatgttataagtttttaatcctggaatagaatctattttaatgaggcttttaaacgcagagttctccaacgagtcaaagcataatactctgttgtttttcttatatacgatgttacgattttcttctttgaatggaataggtttttgaattagtttataattacaacataatagataaggaagtgtgcaaatagtacgcggaaaaaacataatagctcccctgttttcatccatggttttaagtaaatgatcactggcttctttagtcaatggatattcgaacattaaccgtttcatcatcattggacagaatccatatttcttaatgtaaagagtgatcaaatcattgtgtttattgtaccatcttgttgtaaatgtgtattcggttatcggatctgctcctttttctattaaagtatcgatgtcaatctcgtctaagaattcaactatatcgacatatttcatttgtatacacataaccattactaacgtagaatgtataggaagagatgtaacgggaacagggtttgttgattcgcaaactattctaatacataattcttctgttaatacgtcttgcacgtaatctattatagatgccaagatatctatataattattttgtaagatgatgttaactatgtgatctatataagtagtgtaataattcatgtattttgatatatgttccaactctgtctttgtgatgtctagtttcgtaatatctatagcatcctcaaaaaatatattcgcatatattcccaagtcttcagttctatcttctaaaaaatcttcaacgtatggaatataataatctattttacctcttctgatatcattaatgatatagtttttgacactatcttctgtcaattgattcttattcactatatctaagaaacggatagcgtccctaggacgaactactgccattaatatctctattatagcttctggacataattcatctattataccagaattaatgggaactattccgtatctatctaacatagttttaagaaagtcagaatctaagacttgatgttcatatattggttcatacatgaaatgatctctattgatgatagtgactatttcattctctgaaaattggtaactcattctatatatgctttccttgttgatgaaggatagaatatactcaatagaatttgtaccaacaaactgttctcttatgaatcgtatatcatcatctgaaataatcatgtaaggcatacatttaacaattagagacttgtctcctgttatcaatatactattcttgtgataatttatgtgtgaggcaaatttgtccacgttctttaattttgttatagtagatatcaaatccaatggagctacagttcttggcttaaacagatatagtttttctggaacaaattctacaacattattataaaggactttgggtagataagtgggatgaaatcctattttaattaatgcgatagccttgtcctcgtgcagatatccaaacgcttttgtgatagtatggcattcattgtctagaaacgctctacgaatatctgtgacagatatcatctttagagaatatactagtcgcgttaatagtactacaatttgtattttttaatctatctcaataaaaaaattaatatgtatgattcaatgtataactaaactactaactgttattgataactagaatcagaatctaatgatgacgtaaccaagaagtttatctactgccaatttagctgcattatttttagcatctcgtttagattttccatcggccttatcgaatactcttccgtcgatgtctacacaggcataaaatgtaggagagttactaggcccaactgattcaatacgaaaagaccaatctctcctagtaatttggcagtactcattaataacggtgacagggttagcatctttccaatcaataatttttttagccggaataacatcatcaaaagacttatgatcctctctcattgatttttcgcgggatacatcatctattatgacgtcagccatagcatcagcatccggcttatccgcctccgttgtcataaaccaacgaggaggaatatcgtcggagctgtacaccatagcactacgttgaagatcgtacagagctttattaacttctcgcttctccatattaagttgtctagttagttgtgcagcagtagctccttcgattccaatgtttttaatagccgcacacacaatctctgcgtcagaacgctcgtcaatatagatcttagacatttttagagagaactaacgcaaccagcaataaaactgaacctactttatcatttttttattcatcatcctctggtggttcgtcgttcctatcaaatgtagctctgattaacccgtcatctataggtgatgctggttctggagattctggaggagatggattattatctggaagaatctctgttatttccttgttttcatgtatcgattgcgttgtaacattaagattgcgaaatgctctaaatttgggaggcttaaagtgttgtttgcaatctctacacgcgtgtctaactagtggaggttcgtcagctgctctagtttgaatcatcatcggcgtagtattcctacttttacagttaggacacggtgtattgtatttctcgtcgagaacgttaaaataatcgttgtaactcacatcctttattttatctatattgtattctactcctttcttaatgcattttataccgaataagagatagcgaaggaattctttttcggtgccgctagtacccttaatcatatcacatagtgttttatattccaaatttgtggcaatagacggtttatttctatacgatagtttgtttctggaatcctttgagtattctataccaatattattctttgattcgaatttagtttcttcgatattagattttgtattacctatattcttgatgtagtactttgatgatttttccatggcccattctattaagtcttccaagttggcatcatccacatattgtgatagtaattctcggatatcagtagcggctaccgccattgatgtttgttcattggatgagtaactactaatgtatacattttccatttataacacttatgtattaactttgttcatttatattttttcattattatgttgatattaacaaaagtgaatatatatatgttaataattgtattgtggttatacggctacaattttataatgagtgaaagtcagtgtccgatgatcaatgacgatagctttactctgaaaagaaagtatcaaatcgatagtgcggagtcaacaataaaaatggataagaagaggataaagtttcagaatagagccaaaatggtaaaagaaataaatcagacaataagagcagcacaaactcattacgagacattgaaactaggatacataaaatttaagagaatgattatgactactactctagaagatatagcaccatctattccaaataatcagaaaacttataaactattctcggacatttcagccatcggcaaagcatcacagaatccgagtaagatggtatatgctctgctgctttacatgtttcccaatttgtttggagatgatcatagattcattcgttatagaatgcatccaatgagtaaaatcaaacacaagatcttctctcctttcaaacttaatcttattagaatattagtggaagaaagattctataataatgaatgcagatctaataaatggagaataattggaacacaagttgataaaatgttgatagctgaatctgataaatatacaatagatgcaaggtataacctaaaacccatgtatagaatcaagggagaatctgaagaagataccctctttatcaaacagatggtagaacaatgtgtgacatcccaggaattggtggaaaaagtgttgaagatactgtttagagatttgttcaagagtggagaatacaaagcgtacagatacgatgatgatgtagaaaatggatttattggattggatacactaaaattaaacattgttcatgatatagttgaaccatgtatgcctgttcgtaggccagtggctaagatactgtgtaaagaaatggtaaataaatactttgagaatccgctacatattattggtaaaaatcttcaagagtgcattgactttgttagtgaataggcatttcatctttctccaatactaattcaaattgttaaattaataatggatagtataaatagttattagttataagatagtaaaaataattattagaataagagtgtagtatcatagataactctcttctataaaaatggattttattcgtagaaagtatcttatatacacagtagaaaataatatagattttttaaaggatgatacattaagtaaagtaaacaattttaccctcaatcatgtactagctctcaagtatctagttagcaattttcctcaacacgttattactaaggatgtattagctaataccaatttttttgttttcatacatatggtacgatgttgtaaagtgtacgaagcggttttacgacacgcatttgatgcacccacgttgtacgttaaagcattgactaagaattatttatcgtttagtaacgcaatacaatcgtacaaggaaaccgtgcataaactaacacaagatgaaaaatttttagaggttgccgaatacatggacgaattaggagaacttataggcgtaaattatgacttagttcttaatccattatttcacggaggggaacccatcaaagatatggaaatcatttttttaaaactgtttaagaaaacagacttcaaagttgttaaaaaattaagtgttataagattacttatttgggcatacctaagcaagaaagatacaggcatagagtttgcggataatgatagacaaaatatatacactctatttcaacaaactggtagaatcgtccatagcaatctaacagaaacgtttagagattatatctttcccggagataagactagctattgggtgtggttaaacgaaagtatagctaatgatgcggatatcgttcttaatagacacgccattaccatgtatgataaaattcttagttatatatactctgagataaaacaaggacgcgttaataaaaacatgcttaagttagtttatatctttgagcctgaaaaagatatcagagaacttctgctagaaatcatatatgatattcctggagatatcctatctattattgatgcaaaaaacgacgattggaaaaaatattttattagtttttataaagctaattttattaacggtaatacatttattagtgatagaacgtttaacgaggacttattcagagttgttgttcaaatagatcccgaatatttcgataatgaacgaattatgtctttattctctacgagtgctgcggacattaaacgatttgatgagttagatattaataacagttatatatctaatataatttatgaggtgaacgatatcacattagatacaatggatgatatgaagaagtgtcaaatctttaacgaggatacgtcgtattatgttaaggaatacaatacatacctgtttttgcacgagtcggatcccatggtcatagagaacggaatactaaagaaactgtcatctataaaatccaagagtagacggctgaacttgtttagcaaaaacattttaaaatattatttagacggacaattggctcgtctaggtcttgtgttagatgattataaaggagacttgttagttaaaatgataaaccatcttaagtctgtggaggatgtatccgcattcgttcgattttctacagataaaaaccctagtattcttccatcgctaatcaaaactattttagctagttataatatttccatcatcgtcttatttcaaaggtttttgagagataatctatatcatgtagaagaattcttggataaaagcatccatctaaccaagacggataagaaatatatacttcaattgataagacacggtagatcatagaacagaccaaatatattattaataatttgtatatacatagatataattatcacacatttttgataaatgggaactgctgcaacaattcagactcccaccaaattaatgaataaagaaaatgcagaaatgattttggaaaaaattgttgatcatatagttatgtatattagtgacgaatcaagtgattcagaaaataatcctgaatatattgattttcgtaacagatacgaagactatagatctctcattataaaaagtgatcacgagtttgtaaagctatgtaaaaatcatgcggagaaaagttctccagaaacgcaacaaatgattatcaaacacatatacgaacaatatcttattccagtatctgaagtactattaaaacctataatgtccatgggtgacataattacatataacggatgtaaagacaatgaatggatgctagaacaactctctaccctaaactttaacaatctccgcacatggaactcatgtagcataggcaatgtaacgcgtctgttttatacattttttagttatctgatgaaagataaactaaatatataagtataatcccattctaatactttaacctgatgtattagcatcttattagaatattaacctaactaaaagacataacataaaaactcattacatagttgataaaaagcggtaggatataaatattatggctgccaccgttccgcgttttgacgacgtgtacaaaaatgcacaaagaagaattctagatcaagaaacattttttagtagaggtctaagtagaccgttaatgaaaaacacatatctatttgataattacgcgtatggatggataccagaaactgcaatttggagtagtagatacgcaaacctagatgctagtgactattatcccatttcgttgggattacttaaaaagttcgagtttctcatgtctctatataaaggtcctattcccgtatatgaagaaaaagtaaatactgaattcatagccaatggatcgttctctggtagatacgtatcatatcttcgaaagttttctgcccttccaacaaacgagtttattagttttttgttactgacttccattccaatctataatatcttgttctggtttaaaaacacacagtttgatattactaaacacacattattcagatacgtctatacagataatgccaaacacctggcgttggctaggtatatgcatcaaacaggagactataagcctttgtttagtcgtctcaaagagaattatatatttaccggtcccgttccaataagtatcaaagatatagatcaccctaatcttagtagagcaagaagtccatccgattatgagacattagctaatattagtactatattgtactttaccaagtatgatccggtattaatgtttttattgttttacgtacctgggtattcaattactacaaaaattactccagccgtagaatatctaatggataaactgaatctaacaaagagcgacgtacaactgttgtaaattattttatgcttcgtaaaatgtaggttttgaaccaaacattctttcaaagaatgagatgcataaaactttattatccaatagattgactatttcggacgtcaatcgtttaaagtaaacttcgtaaaatattctttgatcactgccgagtttaaaacttctatcgataattgtctcatatgttttaatatttacaagttttttggtccatggtacattagccggacaaatatatgcaaaataatatcgttctccaagttctatagtttctggattatttttattatattcagtaactaaatacatattagggttatctgcggatttataatttgagtgatgcattctactcaacataaataattctagaggagacgatctactatcaaattcggatcgtaaatctgtttctaaagaacggagaatatctatacatacctgattagaattcatccgtccttcagacaacatctcagacagtctggttttgtacatcttaatcatattcttatgaaacttggaaacatctcttctagtttcactagtacctttattaattctctcaggtacagattttgaattcgacgatgctgagtatttcatcgttgtatatttcttcttcgattgcataatcagattcttatataccgcctcaaactctattttaaaattattaaacaatactctattattaatcagtcgttctaactctttcgctatttctatagacttatctacatcttgactgtctatctctgtaaacacggagtcggtatctccatacacgctacgaaaacgaaatctgtaatctataggcaacgatgttttcacaatcggattaatatctctatcgtccatataaaatggattacttaatggattggcaaaccgtaacataccgttagataactctgctccatttagtaccgattctagatacaagatcattctacgtcctatggatgtgcaactcttagccgaagcgtatgagtatagagcactatttctaaatcccatcagaccatatactgagttggctactatcttgtacgtatattgcatggaatcatagatggccttttcagttgaactggtagcctgttttagcatctttttatatctggctctctctgccaaaaatgttcttaatagtctaggaatggttccttctatcgatctatcgaaaattgctatttcagagatgaggttcggtagtctaggttcacaatgaaccgtaatatatctaggaggtggatatttctgaagcaatagctgattatttatttcttcttccaatctattggtactaacaacgacaccgactaatgtttccggagatagatttccaaagatacacacattaggatacagactgttataatcaaagattaatacattattactaaacattttttgttttggagcaaataccttaccgccttcataaggaaacttttgttttgtttctgatctaactaagatagttttagtttccaacaatagctttaacagtggacccttgatgactgtactcgctctatattcgaataccatggattgaggaagcacatatgttgacgcacccgcgtctgtttttgtttctactccataatactcccacaaatactgacacaaacaagcatcatgaatacagtatctagccatatctaaagctatgtttagattataatccttatacatctgagctaaatcaacgtcatcctttccgaaagataatttatatgtatcattaggtaaagtaggacataatagtacgactttaaatccattttcccaaatatctttacgaattactttacatataatatcctcatcaacagtcacataattacctgtggttaaaacctttgcaaatgcagcggctttgcctttcgcgtctgtagtatcgtcaccgatgaacgtcatttctctaactcctctatttaatactttacccatgcaactgaacgcgttcttggatatagaatccaatttgtacgaatccaatttttcaaatttttgaatgaatgaatatagatcgaaaaatatagttccattattgttattaacgtgaaacgtagtattggccatgccgcctactcccttatgactagactgatttctctcataaatacagagatgtacagcttcctttttgtccggagatctaaagataattttctctcctgttaataactctagacgattagtaatatatctcagatcaaagttatgtccgttaaaggtaacgacgtagtcgaacgttagttccaacaattgtttagctattcgtaacaaaactatttcagaacatagaactagttctcgttcgtaatccatttccattagtgactgtatcctcaaacatcctctatcgacggcttcttgtatttcctgttccgttaacatctcttcattaatgagcgtaaacaataatcgtttaccacttaaatcgatataacagtaacttgtatgcgagattgggttaataaatacagaaggaaacttcttatcgaagtgacactctatatctagaaataagtacgatcttgggatatcgaatctaggtatttttttagcgaaacagttacgtggatcgtcacaatgataacatccattgttaatctttgtcaaatattgctcgtccaacgagtaacatccgtctggagatatcccgttagaaatataaaaccaactaatattgagaaattcatccatggtggcattttgtatgctgcgtttctttggctcttctatcaaccacatatctgcgacggagcattttctatctttaatatctagattataacttattgtctcgtcaatgtctatagttctcatctttcccaacggcctcgcattaaatggaggaggagacaatgactgatatatttcgtccgtcactacgtaataaaagtaatgaggaaatcgtataaatacggtctcgccatttcgacatctggatttcagatataaaaatctgttttcaccgtgactttcaaaccaattaatgcaccgaacatccatttatagaatttagaaatatattttcatttaaatgaatcccaaacattggggaagagccgtatggaccattatttttatagtactttcgcaagcgggtttagacggcaacatagaagcgtgtaaacgaaaactatatactatagttagcactcttccatgtcctgcatgtagacggcacgcgactatcgctatagaggacaataatgtcatgtctagcgatgatctgaattatatttattattttttcatcagattatttaacaatttggcatctgatcccaaatacgcgatcgatgtgacaaaggttaaccctttataaacttaacccattataaaacttatgattagtcacaactgaaataaccgcgtgattattttttggtataattctacacggcatggtttctgtgactatgaattcaacccccgttacattagtgaaatctttaacaaacagcaagggttcgtcaaagacataaaactcattgtttacaatcgaaatagaccccctatcacacttaaaataaaaaatatccttatcctttaccaccaaataaaattctgattggtcaatgtgaatgtattcacttaacagttccacaaatttatttattaactccgaggcacatacatcgtcggtattttttatggcaaactttactcttccagcatccgtttctaaaaaaatattaacgagttccatttatatcatccaatattattgaaatgacgttgatggacagatgatacaaataagaaggtacggtacctttgtccaccatctcctccaattcatgctctattttgtcattaactttaatgtatgaaaacagtacgccacatgcttccatgacagtgtgtaacactttggatacaaaatgtttgacattagtataattgtccaagactgtcaatctataatagatagtagctataatatattctatgatggtattgaagaagatgacaaccttggcatattgatcatttaacacagacatggtatcaacagatagcttgaatgaaagagaatcagtaattggaataagcgtcttctcgatagagtgtccgtataccaacatgtctgatattttgatgtattccattaaattatttagttttttctttttattctcgttaaacagcatttctgtcaacggaccccaacatcgttgaccgattaagttttgattgatttttccgtgtaaggcgtatctagtcagatcgtatagcctatccaataatccatcgtctgtgtgtagatcacatcgtacactttttaattctctatagaagagcgacagacatctggagcaattacagacagcaatttctttattctctacagatgtaagatacttgaagacattcctatgatgatgcagaattttggataacacggtattgatggtatctgttaccataattcctttgatggctgatagtgtcagagcacaagatttccaatctttgacaatttttagcaccattatctttgttttgatatctatatcagacagcatggtgcgtctgacaacacagggattaagacggaaagatgaaatgattctctcaacatcttcaatagataccttgctattttttctggcattatctatatgtgcgagaatatcctctagagaatcagtatcctttttgatgatagtggatctcaatgacatgggacgtttaaaccttcttattctatcaccagattgcatggtgatttgtcttctttcttttatcataatgtaatctctaaattcatcggcaaattgtctatatctaaaatcataatatgagatgtttacctctacaaatatctgttcgtccaatgttagagtatttacatcagttttgtattccaaattaaacatggcaacggatttaattttatattcctctattaagtcctcgtcgataataacagaatgtagataatcatttaatccgtcgtacatggttggaagatgcttgttgacaaaatctttaattgtcttgatgaaggtgggactatatctaacatcttgattaataaaatttataacattgtccataggatactttgtaactagttttatacacatctcttcatcggtaagtttagacagaatatcgtgaacaggtggtatattatattcatcagatatacgaagaacaatgtccaaatctatattgtttaatatattatatagatgtagcgtagctcctacaggaatatctttaactaagtcaatgatttcatcaaccgttagatctattttaaagttaatcatataggcattgatttttaaaaggtatgtagccttgactacattctcattaattaaccattccaagtcattgtgtgtaagaagattatattctatcataagcttgactacatttggtcccgataccattaaagaattcttatgatataaggaaacagattttaggtactcatctactctacaagaattttggagagccttaacgatatcagtgacgtttattatttcaggaggaaagaatctaacattgagaatatcggaattaatagcttccagatacagtgattttggcaatagtccgtgtaatccataatccagtaacacgagctggtgcttgctagacaccttttcaatgtttaatttttttgaaataagctttgataaagccttcctcgcaaattccggatacatgaacatgtcggcgacatgattaagtattgttttttcattatttttatattttctcaacaagttctcaataccccaatagatgatagaatatcacccaatgcgtccatgttgtctatttccaacaggtcgctatatccaccaatagaagtttttccaaaaaagattctaggaacagttctaccaccagtaatttgttcaaaataatcccgcaattcattttcgggtttaaattctttaatatcgacaatttcatacgctcctcttttgaaactaaacttatttagaatatccagtgcatttctacaaaaaggacatgtatacttgacaaaaattgtcactttgttattggccaacctttgttgtacaaattcctcggccattttaatatttaagtgatataaaactatctcgacttatttaactctttagtcgagatatatggacgcagatagctatatgatagccaactacagaaggcaaacgctataaaaaacataattacgacgagcatatttataaatatttttattcagcattacttgatatagtaatattaggcacagtcaaacattcaaccactctcgatacattaactctctcattttctttaacaaattctgcaatatcttcgtaaaaagattcttgaaactttttagaatatctatcgactctagatgaaatagcgttcgtcaacatactatgttttgtatacataaaggcgcccattttaacagtttctagtgacaaaatgctagcgatcctaggatcctttagaatcacatagattgacgattcgtctctcttagtaactctagtaaaataatcatacaatctagtacgcgaaataatattatccttgacttgaggagatctaaacaatctagttttgagaacatcgataagttcatcgggaatgacatacatactatctttaatagaactcttttcatccagttgaatggattcgtccttaaccaactgattaatgagatcttctattttatcattttccagatgatatgtatgtccattaaagttaaattgtgtagcgcttctttttagtctagcagccaatactttaacatcactaatatcgatatacaaaggagatgatttatctatggcattaagaattcgtttttcgacatccgtcaaaaccaattcctttttgcctgtatcatccagttttccatcctttgtaaagaaattattttctactagactattaataagactgataaggattcctccataattgcacaatccaaactttttaacaaaactagactttacgagatctacaggaatgcgtacttcaggttttttagcttgtgattttttcttttgcggacattttctagtaaccaactcatctaccatttcattgattttagcagtgaaataagctttcaatgcacgggcactgatactattgaaaacgagttgatcttcaaattccgccatttaagttcaccaaacaacttttaaatacaaatatatcaatagtagtagaataagaactataaaaaaaataataattaaccaaccccaacaaccggtattattagttgatgtggtagttttctcatcacttagaacagatttaacaatttctataaagtctgtcaaatcatcttccggagaccccataaatacaccaaatatagcggcgtacaacttatccatttatacattgaatattggcttttctttatcgctatcttcatcatattcatcatcaatatcaacaagtcccagattacgagccagatcttcttctacattttcagtcattgatacacgttcactatctccagagagtccgataacgttagccaccacttctctatcaatgattagtttcttgagcgcgaaagtaatttttgtttccgttccggatctatagaagacgataggtgtgataattgccttggccaattgtctttctcttttactgagtgattctagttcaccttctatagatctgagaatggatgattctccagtcgaaacatattctaccatggatccgtttaatttgttgatgaagatggattcatccttaaatgttttctctgtaatagtttccaccgaaagactatgcaaagaatttggaatgcgttccttgtgcttaatgtttccatagacggcttctagaagttgatacaacataggactagccgcggtaacttttatttttagaaagtatccatcgcttctatcttgtttagatttatttttataaagtttagtctctccttccaacataataaaagtggaagtcatttgactagataaactatcagtaagttttatagagatagacgaacaattagcgtattgagaagcatttagtgtaacgtattcgatacattttgcattagatttactaatcgattttgcatactctataacacccgcacaagtctgtagagaatcgctagatgcagtaggtcttggtgaagtttcaactctcttcttgattaccttactcatgattaaacctaaataattgtactttgtaatataatgatatatattttcactttatctcatttgagaataaaaatgtttttgtttaaccactgcatgatgtacagatttcggaatcgcaaaccaccagtggttttattttatccttgtccaatgtgaattgaatgggagcggatgcgggtttcgtacgtagatagtacattcccgtttttagaccgagactccatccgtaaaaatgcatactcgttagtttggaataactcggatctgctatatggatattcatagattgactttgatcgatgaaggctcccctgtctgcagccatttttatgatcgtcttttgtggaatttcccaaatagttttataaactcgcttaatatcttctggaaggtttgtattctgaatggatccaccatctgccataatcctattcttgatctcatcattccataattttctctcggttaaaactctaaggagatgcggattaactacttgaaattctccagacaatactctccgagtgtaaatattactggtatacggttccaccgactcattatttcccaaaatttgagcagttgatgcagtcggcataggtgccaccaataaactatttctaagaccgtatgttctgattttatcttttagaggttcccaattccaaagatccgacggtacaacattccaaagatcatattgtagaataccgttactggcgtacgatcctacatatgtatcgtatggtccttccttctcagctagttcacaactcgcctctaatgcaccgtaataaatggtttcgaagatcttcttatttagatcttgtgcttccaggctatcaaatggataatttaagagaataaacgcgtccgctaatccttgaacaccaataccgataggtctatgtctcttattagagatttcagcttctggaataggataataattaatatctataattttattgagatttctgacaattactttgaccacatccttcagtttgagaaaatcaaatcgcccatctattacaaacatgttcaaggcaacagatgccagattacaaacggctacctcattagcatccgcatattgtattatctcagtgcaaagattactacacttgatagttcctaaattttgttgattactctttttgttacacgcatccttataaagaatgaatggagtaccagtttcaatctgagattctataatcgctttccagacgactcgagcctttattatagatttgtatctcctttctctttcgtatagtgtatacaatcgttcgaactcgtctccccaaacattgtccaatccaggacattcatccggacacatcaacgaccactctccgtcatccttcactcgtttcataaagagatcaggaatccaaagagctataaatagatctctggttctatgttcctcgtttcctgtattctttttaagatcgaggaacgccataatatcagaatgccacggttccaagtatatggccataactccaggccgtttgtttcctccctgatctatgtatctagcggtgttattataaactctcaacattggaataataccgtttgatataccattggtaccggagatatagcttccactggcacgaatattactaattgatagacctattccccctgccattttagagattaatgcgcatcgttttaacgtgtcatagataccctctatgctatcatcgatcatgttaagtagaaaacagctagacatttggtgacgactagttcccgcattaaataaggtaggagaagcgtgcgtaaaccatttttcagaaagtagattgtacgtctcaatagctgagtctatatcccattgatgaattcctactgcgacacgcattaacatgtgctgaggtctttcaacgatcttgttgtttattttcaacaagtaggatttttccaaagttttaaaaccaaaatagttgtatgaaaagtctcgttcgtaaataataaccgagttgagtttatccttatatttgttaactatatccatggtgatacttgaaataatcggagaatgtttcccatttttaggattaacatagttgaataaatcctccatcacttcactaaatagtttttttgtttccttgtgtagatttgatacggctattctggcggctagaatggcataatccggatgttgtgtagtacaagtggctgctatttcggctgccagagtgtccaattctaccgttgttactccattatatattccttgaataaccttcatagctattttaataggatctatatgatccgtgtttaagccataacataattttctaatacgagacgtgattttatcaaacatgacattttccttgtatccatttcgtttaatgacaaacatttttgttggtgtaataaaaaaattatttaacttttcattaatagggatttgacgtatgtagcgtacaaaatgattgttcctggtatatagataaagagtcctatatatttgaaaatcgttacggctcgattaaactttaatgattgcatagtgaatatatcattaggatttaactccttgactatcatggcggcgccagaaattaccatcaaaagcattaatacagttataccgatcgcagttagaacggttatagcatccaccatttatatctaaaaattagatcaaagaatatgtgacaaagtcctagttgtatactgagaattgacgaaacaatgtttcttacatatttttttcttattagtaaccgacttaatagtaggaactggaaaactagacttgattattctataagtatagatacccttccaaataatattctctttgataaaagttccagaaaatgtagaattttttaaaaagttatcttttgctattaccaagattgtgtttagacgcttattattaatatgagtgatgaaatccacaccgcctctagatatcgcctttatttccacattagatggtaaatccaatagtgaaactatctttttaggaatgtatggactcgcgtttagaggagtaaacgtcttaggcgtcggaaaggatgattcatcaaacgaataaacaatttcacaaatggatgttaatgtattagtaggaaattttttgacgctattggaattgaagattctaatggatgatgttctacctatttcatccgataacatgttaatttccgacaccaacggttttaatatttcgatgatatacggtagtctctctttcggacttatatagcttattccacaatacgagtcattatatactccaaaaaacaaaataactagtataaaatctgtatcgaatgggaaaaacgaaattatcgacataggtatagaatccggaacattgaacgtattaatacttaattctttttctgtggtaagtaccgataggttattgacattgtatggttttaaatattctataacttgagacttgatagatattagtgatgaattgaaaattatttttatcaccacgtgtgtttcaggatcatcgtcgacgcccgtcaaccaaccgaacggagtaaaataaatatcattaatatatgctctagatattagtatttttatcaatcctttgattatcatcttctcgtaggcgaatgattccatgatcaagagtgatttaagaacatcctccggagtattaatgggcttagtaaacagtccatcgttgcaataataaaagttatccaagttaaaggatattatgcattcgtttaaagatatcacctcatctgacggagacaattttttggtaggttttagagactttgaagctacttgtttaacaaagttattcatcgtcgtctactattctatttaattttgtagttaatttatcacatatcacattaattgactttttggtccacttttccatacgtttatattcttttaatcctgcgttatccgtttccgttatatccagggatagatcttgcaagttaaatagaatgctcttaaataatgtcattttcttatccgctaaaaatttaaagaatgtataaacctttttcagagatttgaaactcttaggtggtgtcctagtacacaatatcataaacaaactaataaacattccacattcagattccaacagctgattaacttccacattaatacagcctattttcgctccaaatgtacattcgaaaaatctgaataaaacatcgatgtcacaatttgtattatccaatacagaatgtttgtgattcgtgttaaaaccatcggagaaggaatagaaataaaaattattatagtggtggaattcagttggaatattgcctccggagtcataaaaggatactaaacattgttttttatcataaattacacatttccaatgagacaaataacaaaatccaaacattacaaatctagaggtagaacttttaattttgtctttaagtatatacgataagatatgtttattcataaacgcgtcaaatttttcatgaatcgctaaggagtttaagaatctcatgtcaaattgtcctatataatccacttcggatccataagcaaactgagagactaagttcttaatacttcgattgctcatccaggctcctctctcaggctctattttcatcttgacgacctttggattttcaccagtatgtattcctttacgtgataaatcatcgattttcaaatccatttgtgagaagtctatcgccttagatactttttcccgtagtcgaggtttaaaaaaatacgctaacggtatactagtaggtaactcaaagacatcatatatagaatggtaacgcgtctttaactcgtcggttaactctttcttttgatcgagttcgtcgctactattgggtctgctcaggtgccccgactctactagttccaacatcataccgataggaatacaagacactttgccggcggttgtagatttatcatatttttccactacatatccgttacaatttgttaaaaatttagatacatctatattgctacataatccagctagtgaatatatatgacataataaattggtaaatcctagttctggtattttactaattactaaatctgtatatctttccatttatcatggaaaagaatttaccagatatcttcttttttccaaactgcgttaatgtattctcttacaaatattcacaagatgaattcagtaatatgagtaaaacggaacgtgatagtttctcattggccgtgtttccagttataaaacatagatggcataacgcacacgttgtaaaacataaaggaatatacaaagttagtacagaagcacgtggaaaaaaagtatctcctccatcactaggaaaacccgcacacataaacctaaccgcgaagcaatatatatacagtgaacacacaataagctttgaatgttatagttttctaaaatgtataacaaatacagaaatcaattcgttcgatgagtatatattaagaggactattagaagctggtaatagtttacagatattttccaattccgtaggtaaacgaacagatactataggtgtactagggaataagtatccatttagcaaaattccattggcctcattaactcctaaagcacaacgagagatattttcagcgtggatttctcatagacctgtagttttaactggaggaactggagtgggtaagacgtcacaggtacccaagttattgctttggtttaattatttatttggtggattctctactctagataaaatcactgactttcacgaaagaccagtcattctatctcttcctaggatagctttagttagattgcatagcaataccattttaaaatcattgggatttaaggtactagatggatctcctatttctttacggtacggatctataccggaagaattaataaacaaacaaccaaaaaaatatggaattgtattttctacccataagttatctctaacaaaactatttagttatggcactcttattatagacgaagttcatgagcatgatcaaataggagatattattatagcagtagcgagaaagcatcatacgaaaatagattctatgtttttaatgactgccacgttagaggatgacagggaacggctaaaagtatttttacctaatcccgcatttatacatattcctggagatacactgtttaaaattagcgaggtatttattcataataagataaatccatcttccagaatggcatacatagaagaagaaaagagaaatttagttactgctatacagatgtatactcctcctgatggatcatccggtatagtctttgtggcatccgttgcacagtgtcacgaatataaatcatatttagaaaaaagattaccgtatgatatgtatattattcatggtaaggtcttagatatagacgaaatattagaaaaagtgtattcatcacctaatgtatcgataattatttctactccttatttggaatccagcgttactatacgcaatgttacacacatttatgatatgggtagagtttttgtccccgctccttttggaggatcgcaacaatttatttctaaatctatgagagatcaacgaaaaggaagagtaggaagagttaatcctggtacatacgtctatttctatgatctgtcttatatgaagtctatacagcgaatagattcagaatttctacataattatatattgtacgctaataagtttaatctaacactccccgaagatttgtttataatccctacaaatttggatattctatggcgtacaaaggaatatatagactcgttcgatattagtacagaaacatggaataaattattatccaattattatatgaagatgatagagtatgctaaactttatgtactaagtcctattctcgctgaggagttggataactttgagaggacgggagaattaactagtattgtacgagaagccattttatctctaaatttacaaattaagattttaaattttaaacataaagatgatgatacgtatatacacttttgtaaaatattattcggtgtctataacggaacaaacgctactatatattatcatagacctctaacgggatatatgaatatgatttcagatactatatttgttcctgtagataataactaaaaatcaaactctaatgaccacatctttttttagagatgaaaaattttccacatctccttttgtagacacgactaaacattttgcagaaaaaagtttattagtgtttagataatcgtatacttcatcagtgtagatagtaaatgtgaacagataaaaggtattcttgctcaatagattggtaaattccatagaatatattaatcctttcttcttgagatcccacatcatttcaaccagagacgttttatccaatgatttacctcgtactataccacatacaaaactagattttgcagtgacgtcgtacctggtattcctaccaaacaaaattttacttttagttcttttagaaaattctaaggtagaatctctatttgccaatatgtcatctatggaattaccactagcaaaaaatgatagaaatatatattgatacatcgcagctggttttgatctactatactttaaaaacgaatcagattccataattgcctgtatatcatcagctgaaaaactatgttttacacgtattccttcggcatttctttttaatgatatatcttgtttagacaatgataaagttatcatgtccatgagagacgcgtctccgtatcgtataaatatttcattagatgttagacgcttcattaggggtatacttctataaggtttcttaatcagtccatcattggttgcgtcaagaactactatcggatgttgttgggtatctctagtgttacacatggccttactaaagtttgggtaaataactatgatatctctattaattatagatgcatatatttcattcgtcaaggatattagtatcgacttgctatcgtcattaatacgtgtaatgtaatcatataaatcatgcgatagccaaggaaaatttaaatagatgttcatcatataatcgtcgctataattcatattaatacgttgacattgactaatttgtaatatagcctcgccacgaagaaagctctcgtattcagtttcatcgataaaggataccgttaaatataactggttgccgatagtctcatagtctattaagtggtaagtttcgtacaaatacagaatccctaaaatattatctaatgttggattaatctttaccataactgtataaaatggagacggagtcataactattttaccgtttgtacttactggaatagatgaaggaataatctccggacatgctggtaaagacccaaatgtctgtttgaagaaatccaatgttccaggtcctaatctcttaacaaaaattacgatattcgatcccgatatcctttgcattctatttaccagcatatcacgaactatattaagattatctatcatgtctattctcccaccgttatataaatcgcctccgctaagaaacgttagtatatccatacaatggaatacttcatttctaaaatagtattcgttttctaattctttaatgtgaaatcgtatactagaaagggaaaaattatctttgagttttccgttagaaaagaaccacgaaactaatgttctgattgcgtccgattccgttgctgaattaatggatttacaccaaaaactcatataacttctagatgtagaagcattcgctaaaaaattagtagaatcaaaggatataagtagatgttccaacaagtgagcaattcccaagatttcatctatatcattctcgaatccgaaattagaaattcccaagtagatatcctttttcatccgatcgttgatgaaaatacgaactttattcggtaagacaatcatttactaaggagtaaaataggaagtaatgttcgtatgtcgttatcatcgtataaattaaaggtgtgttttttaccattaagtgacattataattttaccaatattggaattataatataggtgtatttgcgcactcgcgacggttgatgcatcggtaaatatagctgtatctaatgttctagtcggtatttcatcatttcgctgtctaataatagcgttttctctatctgtttccattacagctgcctgaagtttattggtcggataatatgtaaaataataagaaatacatacgaataacaaaaataaaataagatataataaagatgccatttagagatctaattttgtttaacttgtccaaattcctacttacagaagatgaggaatcgttggagatagtgtcttccttatgtagaggatttgaaatatcttataatgacttgataacttactttccagataggaaataccataaatatatttataaagtatttgaacatgtagatttatcggaggaattaagtatggaattccatgatacaactctgagagatttagtctatcttagattgtacaagtattccaagtgtatacggccgtgttataaattaggagataatctaaaaggcatagttgttataaaggacaggaatatttatattagggaagcaaatgatgacttgatagaatatctcctcaaggaatacactcctcagatttatacatattctaatgagcgcgtccccataactggttcaaaattaattctttgtggattttctcaagttacatttatggcgtatacaacgtcgcatataacaacaaataaaaaggtagatgttctcgtttccaaaaaatgtatagatgaactagtcgatccaataaattatcaaatacttcaaaatttatttgataaaggaagcggaacaataaacaaaatactcaggaagatattttattcggtaacaggtggccaaactccataggtagctttttctatttcggattttagaatttccaaattcaccagcgatttatcggttttggtgaaatccaaggatttattaatgtccacaaatgccatttgttttgtctgtggattgtatttgaaaatggaaacgatgtagttagatagatgcgctgcgaagtttcctattagggttccgcgcttcacgtcacccagcatacttgaatcaccatcctttaaaaaaaatgataagatatcaacatggagtatatcatactcgaattttaattcttctactgactcactgacattttcacaaatactacaatacggtttaccgaaaataatcagtacgttcttcatttatgggtatcaaaaacttaaaatcgttactgctggaaaataaatcactgacgatattagatgataatttatacaaagtatacaatggaatatttgtggatacaatgagtatttatatagccgtcgccaattgtgtcagaaacttagaagagttaactacggtattcataaaatacgtaaacggatgggtaaaaaagggagggcatgtaaccctttttatcgatagaggaagtataaaaattaaacaagacgttagagacaagagacgtaaatattctaaattaaccaaggacagaaaaatgttagaattagaaaagtgtacatccgaaatacaaaatgttaccggatttatggaagaagaaataaaggcagaaatgcaattaaaaatcgataaactcacatttcaaatatatttatctgattctgataacataaaaatatcattgaatgagatactaacacatttcaacaataatgagaatgttacattattttattgtgatgaacgagacgcagaattcgttatgtgtctcgaggctaaaacacatttctctaccacaggagaatggccgttgataataagtaccgatcaggatactatgctatttgcatctgctgataatcatcctaagatgataaaaaacttaactcaactgtttaaatttgttccctcggcagaggataactatttagcaaaattaacggcgttagtgaatggatgtgatttctttcctggactctatggggcatctataacacccaccaacttaaacaaaatacaattgtttagtgattttacaatcgataatatagtcactagtttggcaattaaaaattattatagaaagactaactctaccgtagacgtgcgtaatattgttacgtttataaacgattacgctaatttagacgatgtctactcgtatattcctccttgtcaatgcactgttcaagaatttatattttccgcattagatgaaaaatggaatgaatttaaatcatcttatttagaaagcgtgccgttaccctgccaattaatgtacgcgttagaaccacgcaaggagattgatgtttcagaagttaaaactttatcatcttatatagatttcgaaaatactaaatcagatatcgatgttataaaatctatatcctcgatcttcggatattctaacgaaaactgtaacacgatagtattcggcatctataaggataatttactactgagtataaataattcattttactttaacgatagtctgttaataaccaatactaaaagtgataatataataaatataggttactagattaaaaatggtgttccaactcgtgtgctctacatgcggtaaagatatttctcacgaacgatataaattgattatacgaaaaaaatcattaaaggatgtactcgtcagtgtaaagaacgaatgttgtaggttaaaattatctacacaaatagaacctcaacgtaacttaacagtgcaacctctattggatataaactaatatggatccggttaattttatcaagacatatgcgcctagaggttctattatttttattaattataccatgtcattaacaagtcatttgaatccatcgatagaaaaacatgtgggtatttattatggtacgttattatcggaacacttggtagttgaatctacctatagaaaaggagttcgaatagtcccattggatagtttttttgaaggatatcttagtgcaaaagtatacatgttagagaatattcaagttatgaaaatagcagctgatacgtcattaactttattgggtattccgtatggatttggtcatgatagaatgtattgttttaaattggtagctgactgttataaaaatgccggtattgatacatcgtctaaacgaatattgggcaaagatatttttctgagccaaaacttcacagacgataatagatggataaagatatatgattctaataatttaacattttggcaaattgattaccttaaagggtgagttaatatgcataactactcctccgttgttttttccctcgttctttttcttaacgttgtttgccatcactctcataatgtaaagatattctaaaatggtaaacttttgcatatcggacgcagaaattggtataaatgttgtaattgtattatttcccgtcaatggactagtcacagctccatcagttttatatcctttagagtatttctcactcgtgtctaacattctagagcattccatgatctgtttatcgttgatattggccggaaagatagattttttattttttattatattactattggcaattgtagatataacttctggtaaatatttttctaccttttcaatctcttctattttcaagccggctatatattctgctatattgttgctagtatcaataccttttctggctaagaagtcatatgtggtattcactatatcagttttaactggtagttccattagcctttccacttctgcagaataatcagaaattggttctttaccagaaaatccagctactataataggctcaccgatgatcattggcaaaatcctatattgtaccagattaatgagagcatatttcatttccaataattctgctagttcttgagacattgatttatttgatgaatctagttggttctctagatactctaccatttctgccgcatacaataacttgttagataaaatcagggttatcaaagtgtttagcgtggctagaatagtgggcttgcatgtattaaagaatgcggtagtatgagtaaaccgttttaacgaattatatagtctccagaaatctgtggcgttacatacatgagccgaatgacatcgaagattgtccaatatttttaatagctgctctttgtccattatttctatatttgactcgcaacaattgtagataccattaatcaccgattcctttttcgatgccggacaatagcacaattgtttagctttggactctatgtattcagaattaatagatatatctctcaatacagattgcactatacattttgaaactatgtcaaaaattgtagaacgacgctgttctgcagccatttaactttaaataatttacaaaaatttaaaatgagcatccgtataaaaatcgataaactgcgccaaattgtggcatatttttcagagttcagtgaagaagtgtctataaatgtagactcgacggatgagttaatgtatatttttgccgccttgggcggatctgtaaacatttgggcaattatacctctaagtgcatcagtgttttaccgaggagccgaaaatattgtgtttaatcttcctgtgtccaaggtaaaatcgtgtttgtgtagttttcacaatgatgccatcatagatatagaacctgatctggaaaataatctagtaaaactttctagttatcatgtagtaagtgtcgattgtaacaaggaactgatgcctattaggacagatactactatttgtctaagtatagatcaaaagaaatcttacgtgtttaattttcacaagtatgaagaaaaatgttgtggtagaaccgtcattcatctagaatggttgttgggctttatcaagtgtattagtcagcatcagcatctggctattatgtttaaagatgacaatattattatgaagactcctggtaatactgatgcgttttccagggaatattctatgactgaatgttctcaagaactacaaaagttttctttcaaaatagctatctcgtctctcaacaaactacgaggattcaaaaagagagtcaatgtttttgaaactagaatcgtaatggataatgacgataacattttaggaatgttgttttcggatagagttcaatcctttaagatcaacatctttatggcgtttttagattaatactttcaatgagataaatatgggtggcggagtaagtgttgagctccctaaacgggatccgcctccgggagtacccactgatgagatgttattaaacgtggataaaatgcatgacgtgatagctcccgctaagcttttagaatatgtgcatataggaccactagcaaaagataaagaggataaagtaaagaaaagatatccagagtttagattagtcaacacaggacccggtggtctttcggcattgttaagacaatcgtataatggaaccgcacccaattgctgtcgcacttttaatcgtactcattattggaagaaggatggaaagatatcagataagtatgaagagggtgcagtattagaatcgtgttggccagacgttcacgacactggaaaatgcgatgttgatttattcgactggtgtcagggggatacgttcgatagaaacatatgccatcagtggatcggttcagcctttaataggagtaatagaactgtagagggtcaacaatcgttaataaatctgtataataagatgcaaacattatgtagtaaagatgctagtgtaccaatatgcgaatcatttttgcattatttacgcgcacacaatacagaagatagcaaagagatgatcgattatattctaagacaacagtctgcggactttaaacagaaatatatgagatgtagttatcccactagagataagttagaagagtcattaaaatatgcggaacctcgagaatgttgggatccagagtgttcgaatgccaatgttaatttcttactaacacgtaattataataatttaggactttgcaatattgtacgatgtaataccagcgtgaacaacttacagatggataaaacttcctcattaagattgtcatgtggattaagcaatagtgatagattttctactgttcccgtcaatagagcaaaagtagttcaacataatattaaacactcgttcgacctaaaattgcatttgatcagtttattatctctcttggtaatatggatactaattgtagctatttaaatgggtgccgcggcaagcatacagacgacggtgaatacactcagcgaacgtatctcgtctaaattagaacaagaagcgaacgctagtgctcaaacaaaatgtgatatagaaatcggaaatttttatatccgacaaaaccatggatgtaacctcactgttaaaaatatgtgctctgcggacgcggatgctcagttggatgctgtgttatcagccgctacagaaacatatagtggattaacaccggaacaaaaagcatacgtgccagctatgtttactgctgcgttaaacattcagacgagtgtaaacactgttgttagagattttgaaaattatgtgaaacagacttgtaattctagcgcggtcgtcgataacaaattaaagatacaaaacgtaatcatagatgaatgttacggagccccaggatctccaacaaatttggaatttattaatacaggatctagcaaaggaaattgtgccattaaagcgttgatgcaattgacgactaaggccactactcaaatagcacctagacaagttgctggtacaggagttcagttttatatgattgttatcggtgttataatattggcagcgttgtttatgtactatgccaagcgtatgttgttcacatccaccaatgataaaatcaaacttattttagccaataaggaaaacgtccattggactacttacatggacacattctttagaacttctccgatggttattgctaccacggatatgcaaaactgaaaatatattgataatattttaatagattaacatggaagttatcgctgatcgtctagacgatatagtgaaacaaaatatagcggatgaaaaatttgtagattttgttatacacggtctagagcatcaatgtcctgctatacttcgaccattaattaggttgtttattgatatactattatttgttatagtaatttatatttttacggtacgtctagtaagtagaaattatcaaatgttgttggtggtgctagtcatcacattaactattttttattactttatactataatagtactagactgacttctaacaaacatctcacctgccataaataaatgcttgatattaaagtcttctatttctaacactattccatctgtggaaaataatactctgacattatcgctaattgacacatcggtgagtgatatgcctataaagtaataatcttctttgggcacatataccagtgtaccaggttctaacaacctatttactggtgctcctgtagcatactttttctttaccttgagaatatccatcgtttgcttggtcaatagcgatatgtgattttttatcaaccactcaaaaaagtaattggagtgttcatatcctctacgggctattgtctcatggccgtgtatgaaatttaagtaacacgactgtggtagatttgttctatagagccgattgccgcaaatagatagaactaccaatatgtctgtacaaatgttaaacattaattgattaacagaaaaaacaatgttcgttctgggaatagaaaccagatcaaaacaaaattcgttagaatatatgccacgtttatacatggaatataaaataactacagtttgaaaaataacagtatcatttaaacatttaacttgcggggttaatctcacaactttactgtttttgaactgttcaaaatatagcatcgatccgtgagaaatacgtttagccgcctttaatagaggaaatcccaccgcctttctggatctcaccaacgacgatagttctgaccagcaactcatttcttcatcatccacctgttttaacatataataggcaggagatagatatccgtcattgcaatattccttctcgtaggcacacaatctaatattgataaaatctccattctcttctctgcatttattatcttgtctcggtggctgattaggctgtggtcttggtttaggccttggtctatcgttgttgaatctattttggtcattaaatctttcatttcttcctggtatatttctatcacctcgtttggttggatttttgtctatattatcgtttgtaacatcggtacgggtattcatttatcacaaaaaaaacttctctaaatgagtctactgctagaaaacctcatcgaagaagataccatattttttgcaggaagtatatctgagtatgatgatttacaaatggttattgccggcgcaaaatccaaatttccaagatctatgctttctatttttaatatagtacctagaacgatgtcaaaatatgagttggagttgattcataacgaaaatatcacaggagcaatgtttaccacaatgtataatataagaaacaatttgggtctaggagatgataaactaactattgaagccattgaaaactatttcttggatcctaacaatgaagttatgcctcttattattaataatacggatatgactgccgtcattcctaaaaaaagtggtaggagaaagaataagaacatggttatcttccgtcaaggatcatcacctatcttgtgcattttcgaaactcgtaaaaagattaatatttataaagaaaatatggaatccgcgtcgactgagtatacacctatcggagacaacaaggctttgatatctaaatatgcgggaattaatgtcctgaatgtgtattctccttccacatccataagattgaatgccatttacggattcaccaataaaaataaactagagaaacttagtactaataaggaactagaatcgtatagttctagccctcttcaagaacccattaggttaaatgattttctgggactattggaatgtgttaaaaagaatattcctctaacagatattccgacaaaggattgattactataaatggagaatgttcctaatgtatactttaatcctgtgtttatagagcccacgtttaaacattctttattaagtgtttataaacacagattaatagttttatttgaagtattcgttgtattcattctaatatatgtattttttagatctgaattaaatatgttcttcatgcctaaacgaaaaatacccgatcctattgatagattacgacgtgctaatctagcgtgtgaagacgataaattaatgatctatggattaccatggatgacaactcaaacatctgcgttatcaataaatagtaaaccgatagtgtataaagattgtgcaaagcttttgcgatcaataaatggatcacaaccagtatctcttaacgatgttcttcgcagatgatgattcattttttaagtatttggctagtcaagatgatgaatcttcattatctgatatattgcaaatcactcaatatctagactttctgttattattattgatccaatcaaaaaataaattagaagctgtgggtcattgttatgaatctctttcagaggaatacagacaattgacaaaattcacagactttcaagattttaaaaaactgtttaacaaggtccctattgttacagatggaagggtcaaacttaataaaggatatttgttcgactttgtgattagtttgatgcgattcaaaaaagaatcctctctagctaccaccgcaatagatcctgttagatacatagatcctcgtcgcaatatcgcattttctaacgtgatggatatattaaagtcgaataaagtgaacaataattaattctttattgtcatcatgaacggcggacatattcagttgataatcggccccatgttttcaggtaaaagtacagaattaattagacgagttagacgttatcaaatagctcaatataaatgcgtgactataaaatattctaacgataatagatacggaacgggactatggacgcatgataagaataattttgaagcattggaagcaactaaactatgtgatgtcttggaatcaattacagatttctccgtgataggtatcgatgaaggacagttctttccagacattgtttaattctgtgagcgtatggcaaacggtaccgagctcttttttttttttttttttttggcatataaataagtcgactccctatcagtgatagagaatggtgaagcgtgagaaaaatgtcatctatggccctgagcctctccatcctttggaggatttgactgccggcgaaatgctgtttcgtgctctccgcaagcactctcatttgcctcaagccttggtcgatgtggtcggcgatgaatctttgagctacaaggagttttttgaggcaaccgtcttgctggctcagtccctccacaattgtggctacaagatgaacgacgtcgttagtatctgtgctgaaaacaatacccgtttcttcattccagtcatcgccgcatggtatatcggtatgatcgtggctccagtcaacgagagctacattcccgacgaactgtgtaaagtcatgggtatctctaagccacagattgtcttcaccactaagaatattctgaacaaagtcctggaagtccaaagccgcaccaactttattaagcgtatcatcatcttggacactgtggagaatattcacggttgcgaatctttgcctaatttcatctctcgctattcagacggcaacatcgcaaactttaaaccactccacttcgaccctgtggaacaagttgcagccattctgtgtagcagcggtactactggactcccaaagggagtcatgcagacccatcaaaacatttgcgtgcgtctgatccatgctctcgatccacgcgtgggcactcagctgattcctggtgtcaccgtcttggtctacttgcctttcttccatgctttcggctttagcattactttgggttactttatggtcggtctccgcgtgattatgttccgccgttttgatcaggaggctttcttgaaagccatccaagattatgaagtccgcagtgtcatcaacgtgcctagcgtgatcctgtttttgtctaagagcccactcgtggacaagtacgacttgtcttcactgcgtgaattgtgttgcggtgccgctccactggctaaggaggtcgctgaagtggccgccaaacgcttgaatcttccagggattcgttgtggcttcggcctcaccgaatctaccagcgctaacattcactctctcggggatgagtttaagagcggctctttgggccgtgtcactccactcatggctgctaagatcgctgatcgcgaaactggtaaggctttgggcccgaaccaagtgggcgagctgtgtatcaaaggccctatggtgagcaagggttatgtcaataacgttgaagctaccaaggaggccatcgacgacgacggctggttgcattctggtgattttggatattacgacgaagatgagcatttttacgtcgtggatcgttacaaggagctgatcaaatacaagggtagccaggttgctccagctgagttggaggagattctgttgaaaaatccatgcattcgcgatgtcgctgtggtcggcattcctgatctggaggccggcgaactgccttctgctttcgttgtcaagcagcctggtaaagaaattaccgccaaagaagtgtatgattacctggctgaacgtgtgagccatactaagtacttgcgtggcggcgtgcgttttgttgactccatccctcgtaacgtaacaggcaaaattacccgcaaggagctgttgaaacaattgttggagaaggccggcggtggttccggagccacgaacttctctctgttaaagcaagcaggagacgtggaagaaaaccccggtcccatggcctcctccgaggacgtcatcaaggagttcatgcgcttcaaggtgcgcatggagggctccgtgaacggccacgagttcgagatcgagggagagggcgagggccgcccctacgagggcacccagaccgccaagctgaaggtgaccaagggcggccccctgcccttcgcctgggacatcctgtcccctcagttccagtacggctccaaggcctacgtgaagcaccccgccgacatccccgactacttgaagctgtccttccccgagggcttcaagtgggagcgcgtgatgaacttcgaggacggcggcgtggtgaccgtgacccaggactcctccctgcaggacggcgagttcatctacaaggtgaagctgcgcggcaccaacttcccctccgacggccccgtaatgcagaagaagaccatgggctgggaggcctccaccgagcggatgtaccccgaggacggcgccctgaagggcgagatcaagatgaggctgaagctgaaggacggcggccactacgacgccgaggtcaagaccacctacatggccaagaagcccgtgcagctgcccggcgcctacaagaccgacatcaagctggacatcacctcccacaacgaggactacaccatcgtggaacagtacgagcgcgccgagggccgccactccaccggcgcctaattaattaatttttatcgatctaattcaacaatgtctggagagctcggatccttctgtgagcgtatggcaaacgaaggaaaaatagttatagtagccgcactcgatgggacatttcaacgtaaaccgtttaataatattttgaatcttattccattatctgaaatggtggtaaaactaactgctgtgtgtatgaaatgctttaaggaggcttccttttctaaacgattgggtgaggaaaccgagatagaaataataggaggtaatgatatgtatcaatcggtgtgtagaaagtgttacatcgactcataatattatattttttatctaaaaaactaaaaataaacattgattaaattttaatataatacttaaaaatggatgttgtgtcgttagataaaccgtttatgtattttgaggaaattgataatgagttagattacgaaccagaaagtgcaaatgaggtcgcaaaaaaactgccgtatcaaggacagttaaaactattactaggagaattattttttcttagtaagttacagcgacacggtatattagatggtgccaccgtagtgtatataggatctgctcccggtacacatatacgttatttgagagatcatttctataatttaggagtgatcatcaaatggatgctaattgacggccgccatcatgatcctattttaaatggattgcgtgatgtgactctagtgactcggttcgttgatgaggaatatctacgatccatcaaaaaacaactgcatccttctaagattattttaatttctgatgtgagatccaaacgaggaggaaatgaacctagtacggcggatttactaagtaattacgctctacaaaatgtcatgattagtattttaaaccccgtggcgtctagtcttaaatggagatgcccgtttccagatcaatggatcaaggacttttatatcccacacggtaataaaatgttacaaccttttgctccttcatattcagctgaaatgagattattaagtatttataccggtgagaacatgagactgactcgagttaccaaattagacgctgtaaattatgaaaaaaagatgtactaccttaataagatcgtccgtaacaaagtagttgttaactttgattatcctaatcaggaatatgactattttcacatgtactttatgctgaggaccgtgtactgcaataaaacatttcctactactaaagcaaaggtactatttctacaacaatctatatttcgtttcttaaatattccaacaacatcaactgaaaaagttagtcatgaaccaatacaacgtaaaatatctagcaaaaattctatgtctaaaaacagaaatagcaagagatccgtacgcggtaataaatagaaacgtactactgagatatactaccgatatagagtataatgatttagttactttaataaccgttagacataaaattgattctatgaaaactgtgtttcaggtatttaacgaatcatccataaattatactccggttgatgatgattatggagaaccaatcattataacatcgtatcttcaaaaaggtcataacaagtttcctgtaaattttctatacatagatgtggtaatatctgacttatttcctagctttgttagactagatactacagaaactaatatagttaatagtgtactacaaacaggcgatggtaaaaagactcttcgtcttcccaaaatgttagagacggaaatagttgtcaagattctctatcgccctaatataccattaaaaattgttagatttttccgcaataacatggtaactggagtagagatagccgatagatctgttatttcagtcgctgattaatcaattagtagagatgagataagaacattataataatcaataatatatcttatatcttatatcttatatcttatatcttgtttagaaaaatgctaatattaaaatagctaacgctagtaatccaatcggaagccatttgatatctataatagggtatctaatttcctgatttaaatagcggacagctatattctcggtagctactcgtttggaatcacaaacattatttacatctaatttactatctgtaatggaaacgtttcccaatgaaatggtacaatccgatacattgcattttgttatatttttttttaaagaggctggtaacaacgcatcgcttcgtttacatggctcgtaccaacaataatagggtaatcttgtatctattcctatccgtactatgcttttatcaggataaatacatttacatcgtatatcgtctttgttagcatcacagaatgcataaatttgttcgtccgtcatgataaaaatttaaagtgtaaatataactattatttttatagttgtaataaaaagggaaatttgattgtatactttcggttctttaaaagaaactgacttgataaaaatggctgtaatctctaaggttacgtatagtctatatgatcaaaaagagattaatgctacagatattatcattagtcatgttaaaaatgacgacgatatcggtaccgttaaagatggtagactaggtgctatggatggggcattatgtaagacttgtgggaaaacggaattggaatgtttcggtcactggggtaaagtaagtatttataaaactcatatagttaagcctgaatttatttcagaaattattcgtttactgaatcatatatgtattcactgcggattattgcgttcacgagaaccgtattccgacgatattaacctaaaagagttatcgggacacgctcttaggagattaaaggataaaatattatccaagaaaaagtcatgttggaacagtgaatgtatgcaaccgtatcaaaaaattactttttcaaagaaaaaggtttgtttcgtcaacaagttggatgatattaacgttcctaattctctcatctatcaaaagttaatttctattcatgaaaagttttggccattattagaaattcatcaatatccagctaacttattttatacagactactttcccatccctccgttgattattagaccggctattagtttttggatagatagtatacccaaagagaccaatgaattaacttacttattaggtatgatcgttaagaattgtaacttgaatgctgatgaacaggttatccagaaggcggtaatagaatacgatgatattaaaattatttctaataacactaccagtatcaatttatcatatattacatccggcaaaaataatatgattagaagttatatcgtcgcccgacgaaaagatcagaccgctagatctgtaattggtcccagtacatctatcaccgttaatgaggtaggaatgcccgcatatattagaaatacacttacagaaaagatatttgttaatgcctttacagtggataaagttaaacaactattagcgtcaaaccaagttaaattttactttaataaacgattaaaccaattaacaagaatacgccaaggaaagtttattaaaaataaaatacatttattgcctggtgattgggtagaagtagctgttcaagaatatacaagtattatttttggaagacagccgtctctacatagatacaacgtcatcgcttcatctatcagagctaccgaaggagatactatcaaaatatctcccggaattgccaactctcaaaatgctgatttcgacggggatgaggaatggatgatattagaacaaaatcctaaagctgtaattgaacaaagtattcttatgtatccgacgacgttactcaaacacgatattcatggagcccccgtttatggatctattcaagatgaaatcgtagcagcgtattcattgtttaggatacaagatctttgtttagatgaagtattgaacatcttggggaaatatggaagagagttcgatcctaaaggtaaatgtaaattcagcggtaaagatatctatacttacttgataggtgaaaagattaattatccgggtctcttaaaggatggtgaaattattgcaaacgacgtagatagtaattttgttgtggctatgaggcatctgtcattggctggactcttatccgatcataagtcgaacgtggaaggtatcaactttattatcaagtcatcttatgtttttaagagatatctatctatttacggttttggggtgacattcaaagatctgagaccaaattcgacgttcactaataaattggaggccatcaacgtagaaaaaatagaacttatcaaagaagcatacgccaaatatctcaacgatgtaagagacgggaaaatagttccattatctaaagctttagaggcggactatgtggaatccatgttatccaacttgacaaatcttaatatccgagagatagaagaacatatgagacaaacgctgatagatgatccagataataacctcctgaaaatggccaaagcgggttataaagtaaatcccacagaactaatgtatattctaggtacgtatggacaacaaaggattgatggtgaaccagcagagactcgagtattgggtagagttttaccttactatcttccagactctaaggatccagaaggaagaggttacattcttaattctttaacaaaaggattaacgggttctcaatattacttttcgatgctggttgccagatctcaatctactgatatcgtctgtgaaacatcacgtaccggaacactggctagaaaaatcattaaaaagatggaggatatggtggtcgacggatacggacaagtagttataggtaatacgctcatcaagtacgccgccaattataccaaaattctaggctcagtatgtaaacctgtagatcttatctatccagatgagtccatgacttggtatttggaaattagtgctctgtggaataaaataaaacagggattcgtttactctcagaaacagaaacttgcaaagaagacattggcgccgtttaatttcctagtattcgtcaaacccaccactgaggataatgctattaaggttaaggatctgtacgatatgattcataacgtcattgatgatgtgagagagaaatacttctttacggtatctaatatagattttatggagtatatattcttgacgcatcttaatccttctagaattagaattacaaaagaaacggctatcactatctttgaaaagttctatgaaaaactcaattatactctaggtggtggaactcctattggaattatttctgcacaggtattgtctgagaagtttacacaacaagccctgtccagttttcacactactgaaaaaagtggtgccgtcaaacaaaaacttggtttcaacgagtttaataacttgactaatttgagtaagaataagaccgaaattatcactctggtatccgatgatatctctaaacttcaatctgttaagattaatttcgaatttgtatgtttgggagaattaaatccaaacatcactcttcgaaaagaaacagataaatatgtagtagatataatagtcaatagattatacatcaagagagcagaaataaccgaattagtcgtcgaatatatgattgaacgatttatctcctttagcgtcattgtaaaggaatggggtatggagacattcattgaggacgaggataatattagatttactgtctacctaaatttcgttgaaccggaagaattgaatcttagtaagtttatgatggttcttccgggggcagccaacaagggaaagattagtaaattcaagattcctatctctgattatacgggatatgacgacttcaatcaaacaaaaaagctcaataagatgactgtagaactcatgaatctaaaagaattgggttctttcgatttggaaaacgtcaacgtgtatcctggagtatggaatacatacgatatcttcggtatcgaggccgctcgtgaatacttgtgcgaagccatgttaaacacctatggagaagggttcgattatctgtatcagccttgtgatcttctcgctagtttactatgtgctagttacgaaccagaatcagtgaataaattcaagttcggcgcagctagtactcttaagagagctacgttcggagacaataaagcattgttaaacgcggctcttcataaaaagtcagaacctattaacgataatagtagctgccacttttttagcaaggtccctaatataggaactggatattacaaatactttatcgacttgggtcttctcatgagaatggaaaggaaactatctgataagatatcttctcaaaagatcaaggaaatggaagaaacagaagacttttaattcttatcaataacatatttttctatgatctgtcttttaaacgatggattttccacaaatgcgcctctcaagtccctcatagaatgatacacgtataaaaaatatagcataggcaatgactccttatttttagacattagatatgccaaaatcatagccccgcttctatttactcccgcagcacaatgaaccaacacgggctcgtttcgttgatcacatttagataaaaaggcggttacgtcgtcaaaatatttactaatatcggtagttgtatcatctaccaacggtatatgaataatattaatattagagttaggtaatgtatatttatccatcgtcaaatttaaaacatatttgaacttaacttcagatgatggtgcatccatagcatttttataatttcccaaatacacattattggttacccttgtcattatagtgggagatttggctttgtgcatatctccagttgaacgtagtagtaagtatttatacaaacttttcttatccatttataacgtacaaatggataaaactactttatcggtaaacgcgtgtaatttagaatacgttagagaaaaggctatagtaggcgtacaagcagccaaaacatcaacacttatattctttgttattatattggcaattagtgcgctattactctggtttcagacgtctgataatccagtctttaatgaattaacgagatatatgcgaattaaaaatacggttaacgattggaaatcattaacggatagcaaaacaaaattagaaagtgatagaggtagacttctagccgctggtaaggatgatatatttgaattcaaatgtgtggatttcggcgcctattttatagctatgcgattggataagaaaacatatctgccgcaagctattaggcgaggtactggagacgcgtggatggttaaaaaggcggcaaaggtcgatccatctgctcaacaattttgtcagtatttgataaaacacaagtctaataatgttattacttgtggtaatgagatgttaaatgaattaggttatagcggttattttatgtcaccgcattggtgttccgattttagtaatatggaatagtgttagataaatgcggtaacgaatgttcctgtaaggaaccataacagcttagatttaacgttaaagatgagcataaacataataaacaaaattacaatcaaacttataacattaatatcaaacaatccaaaaaatgaaatcagtggagtagtaaacgcgtacataactcctggataacgtttagcagctgccgttcctattctagaccaaaaattcggtttcatgttttcgaaacggtattctgcaacaagtcgaggatcgtgttctacatatttggcggcattatccagtatctgcctattgatcttcatttcgttttcgattctggctatttcaaaataaaatcccgatgatagacctccagactttataatttcatctacgatgttcagcgccgtagtaactctaataatataggctgataagctaacatcataccctcctgtatatgtgaatatggcatgatttttgtccattacaagctcggttttaactttattgcctgtaataatttctctcatctgtaggatatctatttttttgtcatgcattgccttcaagacgggacgaagaaacgtaatatcctcaataacgttatcgttttctacaataactacatattctacctttttattttctaactcggtaaaaaaattagaatcccatagggctaaatgtctagcgatatttcttttcgtttcctctgtacacatagtgttacaaaaccctgaaaagaagtgagtatacttgtcatcatttctaatgtttcctccagtccactgtataaacgcataatccttgtaatgatctggatcatccttgactaccacaacatttcttttttctggcataacttcgttgtcctttacatcatcgaacttctgatcattaatatgctcatgaacattaggaaatgtttctgatggaggtctatcaataactggcacaacaataacaggagttttcaccgccgccatttagttattgaaattaatcatatacaactctttaatacgagttatattttcgtctatccattgtttcacattgacatatttcgacaaaaagatataaaatgcgtattccaatgcttctctgtttaatgaattactaaaatatacaaacacgtcactgtctggcaataaatgatatcttagaatattgtaacaatttattttgtattgcacatgttcgtgatctatgagttcttcttcgaatggcataggatctccgaatctgaaaacgtataaataggagttagaataataatatttgagagtattggtaatatataaactctttagcggtataattagtttttttctctcaatttctatttttagatgtgatggaaaaatgactaattttgtagcattagtatcatgaactctaatcaaaatcttaatatcttcgtcacacgttagctctttgaagtttttaagagatgcatcagttggttctacagatggagtaggtgcaacaattttttgttctacacatgtatgtactggagccattgttttaactataatggtgcttgtatcgaaaaactttaatgcagatagcggaagctcttcgccgcgactttctacgtcgtaattgggttctaacgccgatctctgaatggatactagttttctaagttctaatgtgattctctgaaaatgtaaatccaattcctccggcattatagatgtgtatacatcggtaaataaaactatagtatccaacgatcccttctcgcaaattctagtcttaaccaaaaaatcgtatataaccacggagatggcgtatttaagagtggattcttctaccgttttgttcttggatgtcatataggaaactataaagtccgcactactgttaagaatgattactaacgcaactatatagtttaaattaagcattttggaaacataaaataactctgtagacgatacttgactttcgaataagtttgcagacaaacgaagaaagaacagacctctcttaatttcagaagaaaactttttttcgtattcctgacgtctagagtttatatcaataagaaagttaagaattagtcggttaatgttgtatttcattacccaagtttgagatttcataatattatcaaaagacatgataatattaaagataaagcgctgactatgaacgaaatagctatatggttcgctcaagaatatagtcttgttaaacgtggaaacgataactgtatttttaatcacgtcagcggcatctaaattaaatataggtatatttattccacacactctacaatatgccacaccatcttcataataaataaattcgttagcaaaattattaattttagtgaaatagttagcgtcaactttcatagcttccttcaatctaatttgatgctcacacggtgcgaattccactctaacatcccttttccatgcctcaggttcatcgatctctataatatctagttttttgcgtttcacaaacacaggctcgtctctcgcgatgagatctgtatagtaactatgtaaatgataactagatagaaagatgtagctatatagatgacgatcctttaagagaggtataataactttaccccaatcagatagactgttgttatggtcttcggaaaaagaatttttataaatttttccagtattttccaaatatacgtacttaacatctaaaaaatccttaatgataataggaatggataatccgtctattttataaagaaatacatatcgcacattatacttttttttggaaatgggaataccgatgtgtctacataaatatgcaaagtctaaatattttttagagaatcttagttggtccaaattcttttccaagtacggtaatagatttttcatattgaacggtatcttcttaatctctggttctagttccgcattaaatgatgaaactaagtcactatttttataactaacgattacatcacctctaacatcatcatttaccagaatactgatcttcttttgtcgtaaatacatgtctaatgtgttaaaaaaaagatcatacaagttatacgtcatttcatctgtggtattcttgtcattgaaggataaactcgtactaatctcttctttaacagcctgttcaaatttatatcctatatacgaaaaaatagcaaccagtgtttgatcatccgcgtcaatattctgttctatcgtagtgtataacaatcgtatatcttcttctgtgatagtcgatacgttataaaggttgataacgaaaatatttttatttcgtgaaataaagtcatcgtaggattttggacttatattcgcgtctagtagatatgcttttatttttggaatgatctcaattagaatagtctctttagagtccatttaaagttacaaacaactaggaaattggtttatgatgtataatttttttagtttttatagattctttattctatacttaaaaaatgaaaataaatacaaaggttcttgagggttgtgttaaattgaaagcgagaaataatcataaattatttcattatcgcgatatccgttaagtttgtatcgtaatggcgtggtcaattacgaataaagcggatactagtagcttcacaaagatggctgaaatcagagctcatctaaaaaatagcgctgaaaataaagataaaaacgaggatattttcccggaagatgtaataattccatctactaagcccaaaaccaaacgagccactactcctcgtaaaccagcggctactaaaagatcaaccaaaaaggaggaagtggaagaagaagtagttatagaggaatatcatcaaacaactgaaaaaaattctccatctcctggagtcagcgacattgtagaaagcgtggccgctgtagagctcgatgatagcgacggggatgatgaacctatggtacaagttgaagctggtaaagtaaatcatagtgctagaagcgatctctctgacctaaaggtggctaccgacaatatcgttaaagatcttaagaaaattattactagaatctctgcagtatcgacggttctagaggatgttcaagcagctggtatctctagacaatttacttctatgactaaagctattacaacactatctgatctagtcaccgagggaaaatctaaagttgttcgtaaaaaagttaaaacttgtaagaagtaaatgcgtgcacttttttataaagatggtaaactctttaccgataataattttttaaatcctgtatcagacgataatccagcgtatgaggttttgcaacatgttaaaattcctactcatttaacagatgtagtagtatatgaacaaacgtgggaggaggcgttaactagattaatttttgtgggaagtgattcaaaaggacgtagacaatacttttacggaaaaatgcatgtacagaatcgcaacgctaaaagagatcgtatttttgttagagtatataacgttatgaaacgaattaattgttttataaacaaaaatataaagaaatcgtccacagattccaattatcagttggcggtttttatgttaatggaaactatgttttttattagatttggtaaaatgaaatatcttaaggagaatgaaacagtagggttattaacactaaaaaataaacacatagaaataagtcccgatgaaatagttatcaagtttgtaggaaaggacaaagtttcacatgaatttgttgttcataagtctaatagactatataaaccgctattgaaactgacggatgattctagtcccgaagaatttctgttcaacaaactaagtgaacgaaaggtatacgaatgtatcaaacagtttggtattagaatcaaggatctccgaacgtatggagtcaattatacgtttttatataatttttggacaaatgtaaagtccatatctcctcttccgtcaccaaaaaagttaatagcattaactatcaaacaaactgctgaagtggtaggtcatactccatcaatttcaaaaagagcttatatggcaacgactattttagaaatggtaaaggataaaaattttttagatgtagtatctaaaactacgttcgatgaattcctatctatagtcgtagatcacgttaaatcatctacggatggatgatatagatctttacacaaataattacaagaccgataaatggaaatggataagcgtatgaaatctctcgcaatgacagctttcttcggagagctaagcacattagatattatggcattgataatgtctatatttaaacgccatccaaacaataccattttttcagtggataaggatggtcagtttatgattgatttcgaatacgataattataaggcttctcaatatttggatctgaccctcactccgatatctggagatgaatgcaagactcacgcatcgagtatagccgaacaattggcgtgtgcggatattattaaagaggatattagcgaatatatcaaaactactccccgtcttaaacgatttataaaaaaataccgcaatagatcagatactcgtatcagtcgagatacagaaaagcttaaaatagctctagctaaaggcatagattacgaatatataaaagacgcttgttaataagtaaatgaaaaaaaactagtcgtttataataaaacacgatatggatgccaacgtagtatcattttctactattgcgacgtatatagacgctttagcgaagaatgcttcggaattagaacagaggtctaccgcatacgaaataaataatgaattggaactagtatttattaagccgccattgattactttgacaaatgtagtgaatatctctacgattcaggaatcgtttattcgatttaccgttactaataaggaaggtgttaaaattagaactaagattccattatctaaggtacatggtctagatgtaaaaaatgtacagttagtagatgctatagataacatagtttgggaaaagaaatcattagtgacggaaaatcgtcttcacaaagaatgcttgttgagactatcgacagaggaacgtcatatatttttggattacaagaaatatggatcctctatccgactagaattagtcaatcttattcaagcaaaaacaaaaaactttacgatagactttaagctaaaatattttctaggatccggtgcccagtctaaaagttctttgttgcacgctattaatcatccaaagtcaaggcctaatacatctctggaaatagaattcacacctagagacaatgaaacagttccatatgatgaactaataaaggaattgacgactctctcgcgtcatatatttatggcttctccagagaatgtaattctttctccgcctattaacgcgcctataaaaacctttatgttgcctaaacaagatatagtaggtttggatctggaaaatctatatgccgtaactaagactgacggcattcctataactatcagagttacatcaaacgggttgtattgttattttacacatcttggttatattattagatatcctgttaagagaataatagattccgaagtagtagtctttggtgaggcagttaaggataagaactggaccgtatatctcattaagctaatagagcctgtgaatgcaatcaatgatagactagaagaaagtaagtatgttgaatctaaactagtggatatttgtgatcggatagtattcaagtcaaagaaatacgaaggtccgtttactacaactagtgaagtcgtcgatatgttatctacatatttaccaaagcaaccagaaggtgttattctgttctattcaaagggacctaaatctaacattgattttaaaattaaaaaggaaaatactatagaccaaactgcaaatgtagtatttaggtacatgtccagtgaaccaattatctttggagaatcgtctatctttgtagagtataagaaatttagcaacgataaaggctttcctaaagaatatggttctggtaagattgtgttatataacggcgttaattatctaaataatatctattgtttggaatatattaatacacataatgaagtgggtattaagtccgtggttgtacctattaagtttatagcagaattcttagttaatggagaaatacttaaacctagaattgataaaaccatgaaatatattaactcagaagattattatggaaatcaacataatatcatagtcgaacatttaagagatcaaagcatcaaaataggagatatctttaacgaggataaactatcggatgtgggacatcaatacgccaataatgataaatttagattaaatccagaagttagttattttacgaataaacgaactagaggaccgttgggaattttatcaaactacgtcaagactcttcttatttctatgtattgttccaaaacatttttagacgattccaacaaacgaaaggtattggcgattgattttggaaacggtgctgacctggaaaaatacttttatggagagattgcgttattggtagcgacggatccggatgctgatgctatagctagaggaaatgaaagatacaacaaattaaactctggaattaaaaccaagtactacaaatttgactacattcaggaaactattcgatccgatacatttgtctctagtgtcagagaagtattctattttggaaagtttaatatcatcgactggcagtttgctatccattattcttttcatccgagacattatgctaccgtcatgaataacttatccgaactaactgcttctggaggcaaggtattaatcactaccatggacggagacaaattatcaaaattaacagataaaaagacttttataattcataagaatttacctagtagcgaaaactatatgtctgtagaaaaaatagctgatgatagaatagtggtatataatccatcaacaatgtctactccaatgactgaatacattatcaaaaagaacgatatagtcagagtgtttaacgaatacggatttgttcttgtagataacgttgatttcgctacaattatagaacgaagtaaaaagtttattaatggcgcatctacaatggaagatagaccgtctacaaaaaactttttcgaactaaatagaggagccattaaatgtgaaggtttagatgtcgaagacttacttagttactatgttgtttatgtcttttctaagcggtaaataataatatggtatgggttctgatctcccagttctaaatgcattaaataattccaatagagcgatttttgttcctataggaccttccaactgtggatactctgtattgttaatagatatattaatacttttgtcgggtaacagaggttctacgtcttctaaaaataaaagttttataacatctggcctgttcataaataaaaacttggcgattctatatatactcttattatcaaatctagccattgtcttatagatgtgagctactgtaggtgtaccatttgattttctttctaatactatatatttctctcgaagaagttcttgcacatcatctgggaataaaatactactgttgagtaaatcagttattttttttatatcgatattgatggacatttttatagttaaggataataagtatcccaaagtcgataacgacgataacgaagtatttatacttttaggaaatcacaatgactttatcagattaaaattaacaaaattaaaggagcatgtatttttttctgaatatattgtgactccagatacatatggatctttatgcgtcgaattaaatgggtctagttttcagcacggcggtagatatatagaggtggaggaatttatagatgctggaagacaagttagatggtgttctacatccaatcatatatctaaagatatacccgaagatatgcacactgataaatttgtcatttatgatatttatacgtttgattcgttcaagaataaacgattggtattcgtacaggtacctccgtcgttaggagatgatagtcatttgactaatccgttattgtcaccgtattatcgtaattcagtagccagacaaatggtcaatgatatgatttttaatcaagattcatttttaaaatatttattagaacatctgattagaagccactatagagtttctaaacatataacaatagttagatacaaggataccgaagaattaaatctaacgagaatatgttataatagagataagtttaaggcgtttgtattcgcttggtttaacggcgtttcggaaaatgaaaaggtactagatacgtataaaaaggtatctaatttgatataatgaattcagtgactgtatcacacgcgccatatactattacttatcacgatgattgggaaccagtaatgagtcaattggtagagttttataacgaagtagccagttggctgctacgagacgagacgtcgcctattcctgataagttctttatacagttgaaacaaccgcttagaaataaacgagtatgtgtgtgtggtatagatccgtatccgaaagatggaactggtgtaccgttcgaatcaccaaattttacaaaaaaatcaattaaggagatagcttcatctatatctagattaaccggagtaattgattataaaggttataaccttaatataatagacggggttataccctggaattattacttaagttgtaaattaggagaaacaaaaagtcacgcgatttactgggataagatttccaagttactgctgcagcatataactaaacacgttagtgttctttattgtttgggtaaaacagatttctcgaatatacgggccaagttagaatccccggtaactaccatagtcggatatcatccagcggctagagaccgccaattcgagaaagatagatcatttgaaattatcaacgttttactggaattagacaacaaggcacctataaattgggctcaagggtttatttattaatgctttagtgaaattttaacttgtgttctaaatggatgcggctattagaggtaatgatgttatctttgttcttaagactataggtgtcccgtcagcgtgcagacaaaatgaagatccaagatttgtagaagcatttaaatgcgacgagttagaaagatatattgagaataatccagaatgtacactattcgaaagtcttagggatgaggaagcatactctatagtcagaattttcatggatgtagatttagacgcgtgtctagacgaaatagattatttaacggccattcaagattttattatcgaggtgtcaaactgtgtagctagattcgcgtttacagaatgcggcgccattcatgaaaatgtaataaaatccatgagatctaatttttcattgactaagtctacaaatagagataaaacaagttttcatattatctttttagatacgtataccactatggatacattgatagctatgaaacgaacactattagaattaagtagatcatctgaaaatccactaaccagatcgatagacactgccgtatataggagaaaaacaactcttcgggttgtaggtactaggaaaaatccaaattgcgacactattcatgtaatgcaaccaccgcatgataatatagaagattacctattcacttacgtggatatgaacaacaatagttattacttttctctacaacaacgattggaggatttagttcctgataagttatgggaaccagggtttatttcattcgaagacgctataaaaagagtttcaaaaatattcattaattctataataaactttaatgatctcgatgaaaataattttacaacggtaccactggtcatagattacgtaacaccttgtgcattatgtaaaaaacgatcgcataaacatccgcatcaactatcgttggaaaatggtgctattagaatttacaaaactggtaatccacatagttgtaaagttaaaattgttccgttggatggtaataaactgtttaatattgcacaaagaattttagacactaactctgttttattaaccgaacgaggagaccatatagtttggattaataattcatggaaatttaacagcgaagaacccttgataacaaaactaattttgtcaataagacatcaactacctaaggaatattcaagcgaattactctgtccaagaaaacgaaagactgtagaagctaacatacgagacatgttagtagattcagtggagaccgatacctatccggataaacttccgtttaaaaatggtgtattggacctggtagacggaatgttttactctggagatgatgctaaaaaatatacgtgtactgtatcaaccggatttaaatttgacgatacaaagttcgtcgaagacagtccagaaatggaagagttaatgaatatcattaacgatatccaaccattaacggatgaaaataagaaaaatagagagctatatgaaaaaacattatctagttgtttatgcggtgctaccaaaggatgtttaacattcttttttggagaaactgcaactggaaagtcgacaaccaaacgtttgttaaagtctgctatcggtgacctgtttgttgagacgggtcaaacaattttaacagatgtattggataaaggacctaatccatttatcgctaacatgcatttgaaaagatctgtattctgtagcgaactacctgattttgcctgtagtggatcaaagaaaattagatctgacaatattaaaaagttgacagaaccttgtgtcattggaagaccgtgtttctccaataaaattaataatagaaaccatgcgacaatcattatcgatactaattacaaacctgtttttgataggatagataacgcattaatgagaagaattgccgtcgtgcgattcagaacacacttttctcaaccttctggtagagaggctgctgaaaataatgacgcgtacgataaagtcaaactattagacgaggggttagatggtaaaatacaaaataatatatatagatttgcatttctatacttgttggtgaaatggtacaaaaaatatcatgttcctattatgaaactatatcctacacccgaagagattcctgactttgcattctatctcaaaataggtactctgttggtatctagctctgtaaagcatattccattaatgacggacctctccaaaaagggatatatattgtacgataatgtggtcactcttccgttgactactttccaacagaaaatatccaagtattttaattctagactatttggacacgatatagagagcttcatcaatagacataagaaatttgccaatgttagtgatgaatatctgcaatatatattcatagaggatatttcatctccgtaaatatatgctcatatatttatagaagatatcacatatctaaatgaataccggaatcatagatttatttgataatcatgttgatagtataccaactatattacctcatcagttagctactctagattatctagttagaactatcatagatgagaacagaagcgtgttattgttccatattatgggatcaggtaaaacaataatcgctttgttgttcgccttggtagcttccagatttaaaaaggtttacattctagtgccgaacatcaacatcttaaaaattttcaattataatatgggtgtagctatgaacttgtttaatgacgaattcatagctgagaatatctttattcattccacaacaagtttttattctcttaattataacgataacgtcattaattataacggattatctcgctacaataactctatttttatcgttgatgaggcacataatatctttgggaataatactggagaacttatgaccgtgataaaaaataaaaacaagattccttttttactattgtctggatctcccattactaacacacctaatactctgggtcatattatagatttaatgtccgaagagacgatagattttggtgaaattattagtcgtggtaagaaagtaattcagacacttcttaacgaacgcggtgtgaatgtacttaaggatttgcttaaaggaagaatatcatattacgaaatgcctgataaagatctaccaacgataagatatcacggacgtaagtttctagatactagagtagtatattgtcacatgtctaaacttcaagagagagattatatgattactagacgacagctatgttatcatgaaatgtttgataaaaatatgtataacgtgtcaatggcagtattgggacaacttaatctgatgaataatttagatactttatttcaggaacaggataaggaattgtacccaaatctgaaaataaataatggcgtgttatacggagaagaattggtaacgttaaacattagttccaaatttaaatactttattaatcggatacagacactcaacggaaaacattttatatacttttctaattctacatatggcggattggtaattaaatatatcatgctcagtaatggatattctgaatataatggttctcagggaactaatccacatatgataaacggcaaaccaaaaacatttgctatcgttactagtaaaatgaaatcgtctttagaggatctattagatgtgtataattctcctgaaaacgatgatggtagtcaattgatgtttttgttttcatcaaacattatgtccgaatcctatactctaaaagaggtaaggcatatttggtttatgactatcccagatactttttctcaatacaaccaaattcttggacgatctattagaaaattctcttacgccgatatttctgaaccagttaatgtatatcttttagccgccgtatattccgatttcaatgacgaagtgacgtcattaaacgattacacacaggatgaattaattaatgttttaccatttgacatcaaaaagctgttgtatctaaaatttaagacgaaagaaacgaatagaatatactctattcttcaagagatgtctgaaacgtattctcttccaccacatccatcaattgtaaaagttttattgggagaattggtcagacaatttttttataataattctcgtattaagtataacgataccaagttacttaaaatggttacatcagttataaaaaataaagaagacgctaggaattacatagatgatattgtaaacggtcacttctttgtatcgaataaagtatttgataaatctcttttatacaaatacgaaaacgatattattacagtaccgtttagactttcctacgaaccatttgtttggggagttaactttcgtaaagaatataacgtggtatcttctccataaaactgatgagatatataaagaaataaatgtcgagctttgttaccaatggatacctttccgttacattggaaccacacgagctgacgttagacataaaaactaatattaggaatgccgtatataagacgtatctccatagagaaattagtggtaaaatggccaagaaaatagaaattcgtgaagacgtggaattacctctcggcgaaatagttaataattctgtagttataaacgttccgtgtgtaataacctacgcgtattatcacgttggggatatagtcagaggaacattaaacatcgaagatgaatcaaatgtaactattcaatgtggagatttaatctgtaaactaagtagagattcgggtactgtatcatttagcgattcaaagtactgcttttttcgaaatggtaatgcgtatgacaatggcagcgaagtcactgccgttctaatggaggctcaacaaggtatcgaatctagttttgtttttctcgcgaatatcgtcgactcataaaaaagagaatagcggtaagtataaacacgaatactatggcaataattgcgaatgttttattctcttcgatatatttttgataatatgaaaaacatgtctctctcaaatcggacaaccatctcataaaatagttctcgcgcgctggagaggtagttgccgctcgtataatctctccagaataatatacttgcgtgtcgtcgttcaatttatacggatttctatagttctctgttatataatgcggtttgccctcatgattagacgacgacaatagtgttctaaatttagatagttgatcagaatgaatgtttattggcgttggaaaaattatccatacagcgtctgcagagtggttgatagttgttcctagatatgtaaaataatccaacttactaggcagcaaattgtctagataaaatactgaatcaaacggtgcagacgtattggcggatctaatggaatccaattgattaactatcttttgaaaatatacatttttatgatccaatacttgtaagaatatagaaataatgataagtccatcatcgtgtttttttgcctcttcataagaactatattttttcttattccaatgaacaagattaatctctccagagtatttgtacacatctatcaagtgattggatccataatcgtcttcctttccccaatatatatgtagtgatgataacacatattcattggggagaaaccctccacttatatatcctcctttaaaattaatccttactagttttccagtgttctggatagtggttggtttcgactcattataatgtatgtctaacggcttcaatcgcgcgttagaaattgcttttttagtttctatattaataggagatagttgttgcggcatagtaaaaatgaaatgataactgtttaaaaatagctcttagtatgggaattacaatggatgaggaagtgatatttgaaactcctagagaattaatatctattaaacgaataaaagatattccaagatcaaaagacacgcatgtgtttgctgcgtgtataacaagtgacggatatccgttaataggagctagaagaacttcattcgcgttccaggcgatattatctcaacaaaattcagattctatctttagagtatccactaaactattacggtttatgtactacaatgaactaagagaaatctttagacggttgagaaaaggttctatcaacaatatcgatcctcactttgaagagttaatattattgggtggtaaactagataaaaaggaatctattaaagattgtttaagaagagaattaaaagaggaaagtgatgaacgtataacagtaaaagaatttggaaatgtaattctaaaacttacaacacgggataaattatttaataaagtatatataagttattgcatggcgtgttttattaatcaatcgttggaggatttatcgcatactagtatttacaatgtagaaattagaaagattaaatcattaaatgattgtattaacgacgataaatacgaatatctgtcttatatttataatatgctagttaatagtaaatgaacttttacagatctagtataattagtcagattattaagtataatagacgactagctaagtctattatttgcgaggatgactctcaaattattacactcacggcattcgttaaccaatgcctatggtgtcataaacgagtatccgtgtccgctattttattaactactgataacaaaatattagtatgtaacagacgagatagttttctctattctgaaataattagaactagaaacatgtttagaaagaaacgattatttctgaattattccaattatttgaacaaacaggaaagaagtatactatcgtcatttttttctctagatccagctactactgataatgatagaatagacgctatttatccgggtggcatacccaaaaggggtgagaatgttccagagtgtttatccagggaaattaaagaagaagttaatatagacaattcttttgtattcatagacactcggttttttattcatggcatcatagaagataccattattaataaattttttgaggtaatcttctttgtcggaagaatatctctaacgagtgatcaaatcattgatacatttaaaagtaatcatgaaatcaaggatctaatatttttagatccgaattcaggtaatggactccaatacgaaattgcaaaatatgctctagatactgcaaaacttaaatgttacggccatagaggatgttattatgaatcattaaaaaaattaactgaggatgattgattaaaaaatataaattaatttaccatcgtgtatttttataacgggattgtccggcatatcatgtagatagttaccgtctacatcgtatactcgaccatctacgcctttaaatcctctatttattgacattaatctattagaattggaataccaaatattagtaccctcaattagtttattggtaatattttttttagacgatagatcgatggctcttgaaaccaaggttttccaaccggactcattgtcgatcggtgagaagtctttttcattagcatgaatccattctaatgatgtatgtttaaacactctaaacaattggacaaattcttttgatttgctttgaatgatttcaaataggtcttcgtctacagtaggcataccattagataatctagccattataaagtgcacgtttacatatctacgttctggaggagtaagaacgtgactattgagacgaatggctcttcctactatctgacgaagagacgcctcgttccatgtcatatctaaaatgaagatatcattaattgagaaaaaactaataccctcgcctccactagaagagaatacgcatgttttaatgcattctccgttagtgtttgattcttggttaaactcagccaccgccttgattctagtatcttttgttctagatgagaactctatattagagataccaaagactttgaaatatagtaataagatttctattcctgactgattaacaaatggttcaaagactagacatttaccatgggatgctaatattcccaaacatacatctataaatttgacgcttttctcttttaattcagtaaatagagagatatcagccgcactagcatcccctttcaatagttctccctttttaaaggtatctaatgcggatttagaaaactctctatctcttaatgaatttttaaaatcattatatagtgttgctatctcttgcgcgtattcgcccggatcacgattttgtctttcaggaaagctatcgaacgtaaacgtagtagccatacgtctcagaattctaaatgatgatatacctgtttttatttcagcgagtttagccttttgataaatttcttcttgctttttcgacatattaacgtatcgcattaatactgttttcttagcgaatgatgcagacccttctacgtcatcaaaaatagaaaactcgttattaactatatacgaacatagtcctcctagtttggagactaattctttttcatcgactagacgtttattctcaaatagcgattggtgttgtaaggatcctggtcgtagtaagttaaccaacatggtgaattcttgcacactattgacgataggtgtagccgataaacaaatcatcttatggttttttaacgcaatggtcttagataaaaaattatatactgaacgagtaggacggatcttaccatcttctttgattaatgatttagaaatgaagttatgacattcatcaataatgacgcatattctactcttggaattaatagttttgatattagtaaaaaatttatttctaaaattttgatcatcgtaattaataaaaatacaatccttcgttatctctggagcgtatctgagtatagtgttcatccaaggatcttctatcaaagcctttttcaccaataagataatagcccaattcgtataaatatccttaagatgtttgagaatatatacagtagtcattgttttaccgacacccgtttcatggaacaataaaagagaatgcatactgtctaatcctaagaaaactcttgctacaaaatgttgataatccttgaggcgtactacgtccgaccccatcatttcaacgggcatattagtagttctgcgtaaggcataatcgatataggccgcgtgtgatttactcatttatgagtgataagtaataactatgttttaaaaatcacagcagtagtttaactagtcttctctgatgtttgttttcgatactttttgaatcagaagtcatactagaataaagcaacgagtgaacgtaatagagagcttcgtatactctattcgaaaactctaagaacttattaatgaattccgtatccactggattgtttaaaatactaaattgaacactgttcacatccttccaagaagaagacttagtgacggacttaacatgagacataaataaatccaaattttttttacaaacatcactagccaccataatggcgctatctttcaaccagctatcgcttacgcattttagcagtctaacatttttaaagagactacaatatattctcatagtatcgattacacctctaccgaataaagttggaagtttaataatacaatatttttcgtttacaaaatcaaataatggtcgaaacacgtcgaaggttaacatcttataatcgctaatgtatagattgttttcagtgagatgattattagatttaatagcatctcgttcacgtttgaacagtttattgcgtgcgctgaggtcggcaactacggcgtccgctttagtactcctcccataatactttacgctattaatctttaaaatttcatagactttatctagatcgctttctggtaacatgatatcatgtgtaaaaagttttaacatgtcggtcggcattctatttagatcattaactctagaaatctgaagaaagtaattagctccgtattccagactaggtaatgggcttttacctagagacagattaagttctggcaatgtttcataaaatggaagaaggacatgcgttccctcccggatattttttacaatttcatccatttacaactctatagtttgttttcattattattagttattatctcccataatcttggtaatacttaccccttgatcgtaagataccttatacaggtcattacatacaactaccaattgtttttgtacataatagattggatggttgacatccatggtggaataaactactcgaacagatagtttatctttccccctagatacattagccgtaatagttgtcggcctaaagaatatctttggtgtaaagttaaaagttagggttcttgttccattattgctttttgtcagtagttcattataaattctcgagatgggtccgttctctgaatatagaacatcatttccaaatctaacttctagtctagaaataatatcggtcttattcttaaaatctattcccttgatgaagggatcgttaatgaacaaatccttggcctttgattcggctgatctattatctccgttatagacgttacgttgactagtccaaagacttacaggaatagatgtatcgatgatgttgatactatgtgatatgtgagcaaagattgttctcttagtggcatcactatatgttccagtaatggcggaaaactttttagaaatgttatatataaaagaattttttcgtgttccaaacattagcagattagtatgaagataaacactcatattatcaggaacattatcaatttttacatacacatcagcatcttgaatagaaacgataccatcttctggaacctctacgatctcggcagactccggataaccagtcggtgggccatcgctaacaataactagatcatccaacaatctactcacatatgcatctatataatctttttcatcttgtgagtaccctggatacgaaataaatttattatccgtatttccataataaggtttagtataaacagagagagatgttgccgcatgaacttcagttacagtcgccgttggttggtttatttgacctattactctcctaggtttctctataaacgatggtttaatttgtacattcttaaccatatatccaataaagctcaattcaggaacataaacaaattctttgttgaacgtttcaaagtcgaacgaagagtcacgaataacgatatcggatactggattgaaggttaccgttacggtaatttttgaatcggatagtttaagactgctgaatgtatcttccacatcaaacggagttttaatataaacgtatactgtagatggttctttaatagtgtcattaggagttaggccaatagaaatatcattaagttcactagaatatccagagtgtttcaaagcaattgtattattgatacaattattatataattcttcgccctcaatttcccaaataacaccgttacacgaagagatagatacgtgattaatacatttatatccaacatatggtacgtaactgaatcttcccatacctttaacttctggaagttccaaactcagaaccaaatgattaagcgcagtaatatactgatccctaatttcgaagctagcgatagcctgattgtctggaccatcgtttgtcataactccggatagagaaatatattgcggcatatacaaagttggaatttgactatcgactgcgaagacattagaccgtttaatagagtcatccccaccgatcaaagaattaatgatagtattattcattttctatttaaaatggaaaaagcttacaataaactccgtagagaaatatctataatttgtgagttttccttaaagtaacagcttccgtaaacgccgtctttatctcttagtaggtttattgtatttatgaccttttccttatcttcatagaatactaaaggcaacaaagaaatttttggttcttctctaagagctacgtgagacttaaccatagaagccaacgaatccctacatattttagaacagaaataccctacttcaccacccttgtatgtctcaatactaataggtctaaaaaccaaatcttgattacaaaaccaacacttatcaattacactatttgtcttaatagacacatctgccatagatttataatactttggtagtatacaagcgagtgcttcttctttagcgggcttaaagactgctttaggtgctgaaataaccacatctggaaggcttactcgcttagccatttaattacggaactatttttttatacttctaatgagcaagtagaaaacctctcatctacaaaaacgtactcgtgtccataatcctctaccatagttacacgttttttagatctcatatgtgctaaaaagttttcccatactaattggttactattatttttcgtataatttttaacagtttgaggttttagatttttagttacagaagtgatatcgaatattttatccaaaaagaatgaataattaattgtcttagaaggagtgttttcttggcaaaagaataccaagtgcttaaatatttctactacttcattaatcttttctgtactcagattcagtttctcatcttttacttgattgattatttcaaagactaacttataatcctttttatttattctctcgttagccttaagaaaactagatacaaaatttgcatctacatcatccgtggatatttgatttttttccatgatatccaagagttccgagataatttctccagaacattgatgagacaataatctccgcaatacatttctcaaatgaataagtttattagacacgtggaagtttgactttttttgtacctttgtacatttttgaaataccgactcgcaaaaaatacaatattcatatccttgttcagatactataccgttatgtctacaaccgctacataatcgtagattcatgttaacactctacgtatctcgtcgtccaatattttatataaaaacattttatttctagacgttgccagaaaatcctgtaatatttttagttttttgggctgtgaataaagtatcgccctaatattgttaccgtcttccgccaatatagtagttaaattatccgcacatgcagaagaacaccgcttaggcggattcagtacaatgttatatttttcgtaccaactcatttaaatatcataatctaaaatagttctgtaatatgtctagcgctaatatattgatcataatcctgtgcataaattaagatacaacaatgtctcgaaatcatcgacatggcttcttccatagttagaagatcgtcgtcaaagttagcaacgtgattcatcaacatttgctgttttgaggcagcaaatactgaaccgtcgccattcaaccattcataaaaaccatcgtctgaatccattgataatttcttgtactggtttttgagagctcgcatcaatctagcatttctagctcccggattgaaaacagaaagaggatcgtacatccagggtccattttctgtaaatagaatcgtataatgtcccttcaagaagatatcagacgatccacaatcaaagaattggtctccgagtttgtaacaaactgcggactttaacctatacatgataccgtttagcataatttctggtgatacgtcaatcggagtatcatctattagagatctaaagccggtgtaacattctccaccaaacatattcttattctgacgtcgttctacataaaacatcattgctccattaacgataacaggggaatgaacagcactacccatcacattagttcccaatggatcaatgtgtgtaactccagaacatcttccatagcctatgttaggaggagcgaacaccactcttccactattgccatcgaatgccatagaataaatatccttggaattgatagaaatcggactgtcggatgttgtgatcatcttcataggattaacaactatgtatggtgccgcctgaagtttcatatcgtaactgatgccgtttataggtctagccacagaaaccaacgtaggtctaaatccaactatagacaaaatagaagccaatatctgttcctcatctgtcataacttgagagcatccagtatgaataatcttcattagatggggatctaccgcatcatcatcgttacaataaaaaattcccattctaatgttcataattgcttttctaatcatggtatgcatgtttgctctctgaatctctgtggaaattagatctgatacacctgtaatcactatcggattatcctccgtaagacgattaaccaacaacatataattataagactttacttttctaaattcataaagttgctggattaggctataggtgtctccatgtacatacgcgttctcgagcgcaggaagtttaataccgaatagtgccatcagaataggatgaatatagtaattagtttctggttttctataaataaaagacaaatcttgtgaactagacatatcggtaaaatgcatggattggaatcgtgtagtcgacagaagaatatgatgattagatggagagtatattttatctaactctttgagttggtcaccgattctaggactagctcgagaatgaataagtactaaaggatgagtacatttcacagaaacactagcattgttcaatgtgctctttacatgggtaaggagttgaaatagctcgtttctatttgttctgacaatatttagtttattcataatgttaagcatatcctgaatagtaaagttagatgtgtcatacttgttagtagttagatatttagcaattgcattcccatcatttctcaatctcgtactccaatcatgcgtggatgctacttcgtcgatggaaaccatacaatcctttttgataggctgttgagattgatcatttcctgcacgtttaggtttggtacgttgatttctagcccctgcggatataaagtcatcgtctacaatttgggacaatgaattgcatacactacaagacaaagatttatcagaagtgtgaatatgatcttcatctaccaaagaaagagtttgattagtataactagattttagtcctgcgttagatgttaaaaaaacatcgctattgaccacggcttccattatttatattcgtagtttttactcgaaagcgtgattttaatatccaatcttattacttttggaatcgttcaaaacctttgactagttgtagaatttgatctattgccctacgcgtatactcccttgcatcatatacgttcgtcaccagatcgtttgtttcggcctgaagttggtgcatatctctttcaacattcgacatgagatccttaagggccatatcgtctagattttgttgagatgctgctcctggatttggattttgttgtgctgttgtacatactgtaccaccagtaggtgtaggagtacatacagtggccacaataggaggttgagaaagtgtaaccgttggagtagtacaagaaatacttccatccgattgttgtgtacatgtagttgttggtaacgtctgagaaggttgggtagatggcggcgtcgtcgttttttgatctttattaaatttagagataatatcctgaacagcattgctcggcgtcaacgctggaaggagtgaactcgccggcgcatcagtatcttcagacagccaatcaaaaagattagacatatcagatgatgtattagtttgttgtcgtggttttggtgtaggagcagtactactaggtagaagaataggagccgatgtagctgttggaaccggctgtggagttatatgaatagttggttgtagcggttggataggctgtctgctggcggccatcatattatctctagctagttgttctcgcaactgtctttgataatacgactcttgagactttagtcctatttcaatcgcttcatcctttttcgtatccggatccttttcttcagaataatagattgacgactttggtgtagaggattctgccagcctctgtgagaacttgttaaagaagtccatttaaggctttaaaattgaattgcgattataagattaaatggcagacacagacgatattatcgactatgaatccgatgatctcaccgaatacgaggatgatgaagaagaggaagaagatggagagtcactagaaactagtgatatagatcccaaatcttcttataagattgtagaatcagcatccactcatatagaagatgcgcattccaatcttaaacatatagggaatcatatatctgctcttaaacgacgctatactagacgtataagtctatttgaaatagcgggtataatagcagaaagctataacttgcttcaacgaggaagattacctctagtttcagaattttctgacgaaacgatgaagcaaaatatgctacatgtaattatacaagagatagaggagggttcttgtcctatagtcatcgaaaagaacggagaattgttgtcggtaaacgattttgacaaagatggtctaaaattccatctagactatattatcaaaatttggaaacttcaaaaacgatattagaatttatacgaatatcgttctctaaatgtcacaatcaagtctcgcatgttcagcaatttattgtcgtactttatatcgtgttcattaacgatatcttgcaaaatagtaatgattctatcttccttcgatagatattcttcagagattattgtcttatattctttcttgttatcagatatgaatttgataagactttgaacattattgatacccgtctgtttaattttttctacagatattttagttttggcagattctatcgtatctgtcaatagacatccaacatcgacattcgacgtcaattgtctataaatcaacgtataaattttagaaataacattagcgaattgttgtgcgttgatgtcgttattctgaaacagtatgattttaggtagcattttcttaacaaagagaacgtatttattgttactcagttgaacagatgatatatccagattactaacgcatctgattccgtataccaaactttcagaagaaatggtatacaattgtttgtattcattcaatgtctctttttcagaaattagtttagagtcgaatactgcaataattttcaagagatagttttcatcagataagattttatttagtgtagatatgataaaactattgttttgttggagaacttgatacgccgcgttctctgtagtcgacgctctcaaatgggaaacaatctccattatttttttggaatcggatactatatcttcggtatcttgacgcagtctagtatacatagagttaagagagattagagtttgtacattaagcaacatgtctctaaatgtggctacaaacttttcctttttcacatcatctagtttattatataccgatttcacaacggcaccagatttaaggaaccagaatgaaaaactctgataactacaatatttcatcatagttacgattttatcatcttctatagttggtgtaatagcgcatacctttttctccaagactggaaccaacgtcataaaaatgtttaaatcaaaatccatatcaacatctgatgcgctaagaccagtctcgcgttcaagattatctttactaatggtgacgaactcatcgtataaaactctaagtttgtccattatttatttacagatttagttgtttaatttatttgtgctcttccagagttgggatagtatttttctaacgtcggtattatattattaggatctacgttcatatgtatcataatattaatcatccacgttttgataaatctatctttagcttctgaaataacgtatttaaacaaaggagaaaaatatttagctacggcatcagacgcaataacattttttgtaaatgtaacgtatttagacgacagatcttcgttaaaaagttttccatctatgtagaatccatcggttgttaacaccattcccgcgtcagattgaataggagtttgaatagtttgttttggaaatagatccttcaataacttatagttgggtgggaaaaaatcgattttatcactagactctttcttttttactatcattacctcatgaactatttcttgaatgagtatatgtattttctttcctatatcggacgcgttcattggaaaatataccatgtcgttaactataagaatatttttatcctcgtttacaaactgaataatatcagatgtagttcgtaaacgaactatatcatcaccagcacaacatctaactatatgatatccactagtttcctttagccgtttattatcttgttccatattagcagtcattccatcatttaagaaggcgtcaaaaataatagggagaaatgacattttggattctgttacaactttaccaaaattaaggatatacggacttactatctttttctcaacgtcaatttgatgaacacacgatgaaaatgtgcttctatgagattgatcatgtagaaaacaacaagggatacaatatttccgcatatcatgaaatatattaagaaatcccaccttattatatttccccaaaggatccatgcacgtaaacattatgccgttatcattaataaagacttctttctcatcggatctgtaaaagttgttactgatttttttcattccaggatctagataattaataatgatgggttttctattcttattctttgtattttggcatatcctagaccagtaaacagtttccactttggtaaaatcagcagacttttgaacgctattaaacatggcattaatggcaataactaaaaatgtaaaatatttttctatgttaggaatatggtttttcactttaatagatatatggtttttggccaaaatgatagatatttttttatccgaggatagtaaaatattattagtcgccgtctctataaaaatgaagctagtctcgatatccaattttattctagaattgataggagtcgccaaatgtaccttatacgttatatctcccttgatgcgttccatttgtgtatctatatcggacacaagatctgtaaatagttttacgttattaatcatcacggtatcgccgtcgctagataacgctaatgtaccatccaagtcccaaatggagagatttaactgttcatcgtttagaataaaatgattaccggtcatattaataaagtgttcatcgtatctagataacaacgacttataattaatgtccaagtcttgaactcgctgaatgatcttttttaacccagttagttttagattggtacgaaatatattgttaaactttgattctacagtaatgtccaaatctagttgtggaaatacttccatcaacattgtttcaaacttgataatattattatctacatcttcgtacgatccaaattccggaatagatgtatcgcacgctctggccacccagataaccaaaaagtcacacgctccaggatatacattgtataaaaagctatcgttttttagtagggtttttttctgcgtgtatacgaagggattaaaaatagtattatcaacgtaactatattccaaattattcttatgagaatagataataatatcgtccttaatatctaacaaatttcctaaatatccctttaattgagtcattcgaagcgtcaatagaatatgtctcttaactatttccggctgttgtatatttaaatgacttcgtaaaaaataatatatgggcgacttctcatctatgtaatcatatggagtgagatatagggctcgttctacctcctgccccttacccacctgtaataccaattgcggacttactatatatcgcatatttatatcgtggggtaaagtgaaaatctactaccgatgatgtaagtcttacaatgttcgaaccagtaccagatcttaatttggaggcctccgtagaactaggggaggtaaatatagatcaaacaacacctatgataaaggagaatagcggttttatatcccgcagtagacgtctattcgcccatagatctaaggatgatgagagaaaactagcactacgattctttttacaaagactttattttttagatcatagagagattcattatttgttcagatgcgttgacgctgtaaaagacgtcactattaccaaaaaaaataacattatcgtggcgccttatatagcacttttaactatcgcatcaaaaggatgcaaacttacagaaacaatgattgaagcattctttccagaactatataatgaacatagtaagaaatttaaattcaactctcaagtatccatcatccaagaaaaactcggataccagtttggaaactatcacgtttatgattttgaaccgtattactctacagtagctctggctattcgagatgaacattcatctggcatttttaatatccgtcaagagagttatctggtaagttcattatctgaaataacatatagattttatctaattaatctaaaatctgatcttgttcaatggagtgctagtacgggcgctgtaattaatcaaatggtaaatactgtattgattacagtgtatgaaaagttacaactggtcatagaaaatgattcacaatttacatgttcattggctgtggaatcaaaacttccaataaaattacttaaagatagaaatgaattatttacaaaattcattaacgagttaaaaaagaccagttcattcaagataagcaaacgcgataaggatacgctactaaaatattttacttaggactggagttagaatttatagacgactcatttcgtttatcattgttactattattactattactatcattattagtgttggcattattagtattcttcttgtcatcttgttcagaaatatacagcaatgctatacctaatactaaatacattatcatgctcgcaatggctctaacaacaacgaaccaaaatgaatttggtcgtagcttttgttcacaaaaatacataaagaaatgtctacataaatctatggcgccattggctacttgaaatagcgccagtcctcctacagattttaatatagctgtataacatgacatttattcatcatcaaaagagacagagtcaccatctgtcatatttagattttttttcatgtgttcaaagtatcctctactcatttcattataatagtttatcatacttagaattttaggacggatcaatgagtaagacttgactagatcgtcagtagtaatttgtgcatcgtctattctgcatccgcttcgtcgaataatgtatagcatcgctttgagattctccatagctatcaagtctttatacaatgacatggaaatatctgtgaatactttatacttctccaacatcgatgccttaacatcatcgcctactttagcattgaaaatacgttctattgtgtagatggatgtagcaagatttttaaacaacaatgccatcttacacgatgattgcctcaagtctccaatcgtttgtttagaacgattagctacagagtccaatgcttggctgactagcatattattatctttagaaattgtattcttcaatgaggcgtttatcatatctgtgatttcgttagtcatattacagtctgactgggttgtaatgttatccaacatatcacctatggatacggtacacgtaccagcatttgtaataatcctatctaagatgttgtatggcattgcgcagaaaatatcttctcctgtaatatctccactctcgataaatctactcagattattcttaaatgccttattctctggagaaaagatatcagtgtccatcatttcattaatagtatacgcagaaaagataccacgagtatcaattctatccaagatacttatcggttccgagtcacagataatggtttcctctccttcgggagatcctgcatagaaatatctaggacaatagtttctatactgtctgtaactctgataatctctaaagtcactaactgataccatgaaattgagaagatcaaacgctgaagtaattaatttttctgcctcgtttttactacaactagttttcatcaatgtagtgacgatgtattgtttagttacttttggtctaatactgatgatagagatattattgcttcccataatggatcttctagtagtcaccttaaagcccattgatgcgaatagcagatagataaagtcttggtatgactcctttctaatatagtacggactacctttgtcacccaactttatacccacataagccataacaacctctttaatagccgtttcatgaggtttatcagccatgagcctgagtagttggaagaatctcatgaatcccgtctcagaaagtcctatatgcatgatagatttatctttcctgggaaactctcgtatagtcatagatgaaatactctttaaagtttctgaaataagattagtaacagtcttacctccgactactctaggtaacaaacaaactctaataggtgttttctctgcggagataatatcagaaaggatagagcaataagtagtattattgtgattataaagaccgaatacataacaggtagaatttataaacatcatgtcctgaaggtttttagacttgtattcctcgtaatccataccgtcccaaaacatggatttggtaactttgatagccgtagatctttgttccttcgccaacaggttaaagaaattaataaagaatttgttgtttctatttatgtccacaaattgcacgtttggaagcgccacggttacattcactgcagcattttgaggatcgcgagtatgaagtacgatgttattgtttactggtatatctggaaagaaatctaccagtctaggaataagagattgatatcgcatagaaatagtaaagtttataatctcatcatcgaagagcattttgttaccattgtaataaatatccactctgtcatatgtataaatgaagtactgttcaaacatgatgagatgtttatatgttggcatagtagtgagatcgacgtttggtaatggcaatgtattaagattaactccataatgtctagcagcatctgcgatgttataagcgtcgtcaaagcggggtcgatcttgtattgttatatattgtctaacacctataagattatcaaaatcttgtctgcttaatacaccgttaacaatttttgccttgaattcttttattggtgcattaataacatccttatagaggatgttaaacaaataagtgttatcaaagttaagatctggatatttcttttctgctagaacatccattgagtcggagccatctggtttaatataaccaccgataaatctagctctgtattctgtatccgtcaatctaatattaagaaggtgttgagtgaaaggtggaagatcgtaaaagctgtgagtattaatgataggattagtttccgaactaatgttaattggggtattaataatatctatatttccagcgttaagtgtaacattaaacagttttaattcacgtgacgtggtatcaattaaataattaatgcccaatttggatatagcagcctgaagctcatcttgtttagttacggatcctaatgagttattaagcaatatatcgaacggatgaacgaaggttgttttaagttggtcacatactttgtaatctagacatagatgcggaagaacggtagaaactatacgaaataaatattcagagtcctctaattgatcaagagtaactattgacttaataggcatcatttatttagtattaaatgacgaccgtaccagtgacggatatacaaaacgatttaattacagagttttcagaagataattatccatctaacaaaaattatgaaataactcttcgtcaaatgtctattctaactcacgttaacaacgtggtagatagagaacataatgccgccgtagtgtcatctccagaggaaatatcctcacaacttaatgaagatctatttccagatgatgattcaccggccactattatcgaacgagtacaacctcatactactattattgacgatactccacctcctacgtttcgtagagagttattaatatcggaacaacgtcaacaacgagaaaaaagatttaatattacagtatcgaaaaatgctgaagcaataatggaatctagatctatgataacttctatgccaacacaaacaccatccttgggagtagtttatgataaagataaaagaattcagatgttagaggatgaagtggttaatcttagaaatcaacgatctaatacaaaatcatctgataatttagataattttaccaaaatactatttggtaagactccgtacaaatcaacagaagttaataagcgtatagccatcgttaattatgcaaatttgaacgggtcccccttatcagtcgaggacttggatgtttgttcggaggatgaaatagatagaatctataaaacgattaaacaatatcacgaaagtagaaaacgaaaaattatcgtcactaacgtgattattattgtcataaacattatcgagcaggcattgctaaaactcggatttgaagaaatcaaaggactgagtaccgatatcacttcagaaattatcgatgtggagatcggagatgactgcgatgctgtagcatctaaactaggaatcggtaacagtccggttcttaatattgtattgtttatactcaagatattcgttaaacgaattaaaattatttaatttaatacattcccatatccagacaacaatcgtctggattaatctgttcctgtcgtctcataccggacgacatattaatctttttattagtgggcatctttttagatggtttctttttcccagcattaactgagtcgatacctagaagatcgtgattgatctctccgaccattccacgaacttctaattggccgtctctgacggtaccataaactattttaccagcattagtaacagcttggacaatctgaccatccatcgcattgtacgatgtagtagtaactgttgttctacgtctaggagcaccagaagtatttttggagcccttggatgttgatgtagaagaagacgaggattttgattttggtttacatgtaatacattttgaactctttgattttgtatcacatgcgccggcagtcacatctgtttgagaattaagattattgttgcctcctttgacggctgcatctccaccgatttgcgctagtagatttttaagctgtggtgtaatcttattaactgtttcgatataatcatcgtaactgcttctaacggctaaattttttttatccgccatttagaagctaaaaatatttttatttatgcagaagatttaactagattatacaatgaactaatatgatccttttccagattatttacaaacttggtattttttggttctggaggaggcgaatttaaattcggacttggattcggattttgtaagttcttgatcttattatacatcgagtataggatggcgacagtaactgctacacaaataccgatcaaaagaagaataccaatcatttattgacaataacttcactattgatcaagtatgcaatatatcatcttttcactaaataagtagtaataatgattcaacaatgtcgagatatatggacgataataatttagttcatggaaatatcgctatgattggtgtgaatgactccgctaactctgtggggtgcgcagtgctttccccacatagaataaattagcattccgactgtgataataataccaagtataaacgccataatactcaatactttccatgtacgagtgggactggtagacttactaaagtcaataaaggcgaagatacacgaaagaatcaaaagaatgattccagcgattagcacgccggaaaaataatttccaatcataagcatcatgtccatttaactaataaaaattttaaatcgccgaatgaacaaagtggaatataaaccatataaaaacaatagtttgtactgcaaaaataatatctatttttgttttcgaagatatggtaaaattaaatagtagtacacagcatgttataactaacagcagcaacggctcgtaattacttatcatttactagacgaaaaggtggtgggatattttcttgctcaaataatacgaatatatcacccatccattttatgcgatgtttatatactctaatctttaatagatctatagacgacgggtttaccaacaatatagattttatcgattcatctaatttaaacccttccttaaacgtgaatgatctattatctggcataacgatgaccctacctgatgaatcggacaatgtactgggccatgtagaataaattatcaacgaattatcgtctacgaacatttatatcatttgttttaattttaggacgcgaataaatggatataaaatagaaaataacagatattacaaccagtgttatggccgcgcccaaccaggtaggcagttttattttatcttttactacaggttctcctggatgtacgtcaccaacggcggacgtagttctagtacaattagacgtaagttccgcttgggaattttttaacgctaaagagttaacgttaatcgtgcacccaacgtatttacatctagttcgttgaacatcttgattataatataaccattttctatctctagattcgtcagtgcactcatgtaaccaacataccctaggtcctaaatatttatctccggaattagattttggataattcgcgcaccaacaatttctatttcctttatgatcgttacaaaagacgtataatgccgtatccccaaaagtaaaataatcaggacgaataattctaataaactcagaacaatatctcgcatccatatgtttggagcaaatatcggaataagtagacatagccggtttccgttttgcacgtaaccattctaaacaattggggtttccaggatcgtttctacaaaatccagtcatgaaatcgtcacaatgttctgtcttgtaattattattaaatatttttggacagtgtttggtatttgtcttagaacaacattttgccacgctatcactatcgcccaggagataatccttttttataaaatgacatcgttgcccggatgctatataatcagtagcgtgttttaaatccttaatatattcaggagttacctcgttctgataatagattaatgatccaggacgaaatttgaaagaactacatggttctccatgaattaatacatattgtttagcaaattcaggaactataaaactactacaatgatctatcgacataccatctatcaaacaaaacttgggtttaatttctcccggagatgtttcataatagtacgtataactttcttctgcaaacttaacagctctattatattcaggataattaaaacctaattccatatatttgtctcgtatatctgctattcctggtgctattttgattctattaagagtaacagctgcccccattcttaataatcgtcagtatttaaactgttaaatgttggtatatcaacatctaccttatttcccgcagtataaggtttgttgcaggtatactgttcaggaatggttacatttatacttcttctatagtcctgtctttcgatgttcatcacatatgcaaagaacagaataaacaaaataatgtaagaaataatattaaatatctgtgaattcgtaaatacattgattgccataataattacagcagctacaatacacacaatagacattcccacagtgttgccattacctccacgatacatttgagttactaagcaataggtaataactaagctagtaagaggcaatagaaaagatgagataaatatcatcaatatagagattagaggagggctatatagagccaagacgaacaaaatcaaaccgagtaacgttctaacatcattatttttgaagattcccaaataatcattcattcctccataatcgttttgcatcatacctccatctttaggcataaacgattgctgctgttcctctgtaaataaatctttatcaagcactccagcacccgcagagaagtcgtcaagcatattgtaatatcttaaataactcatttatatattaaaaaatgtcactattaaagatggagtataatctttatgccgaactaaaaaaaatgacttgtggtcaacccctaagtctttttaacgaagacggggatttcgtagaagttgaaccgggatcatcctttaagtttctgatacctaagggattttacgcctctccttccgtaaagacgagtctagtattcgagacattaacaacgaccgataataaaatcactagtatcaatccaacaaatgcgccaaagttatatcctcttcaacgcaaagtcgtatctgaagtagtttctaatatgaggaaaatgatcgaatcaaaacgtcctctatacatcactcttcacttggcgtgtggatttggtaagactattaccacgtgttatcttatggctacacacggtagaaaaaccgtcatttgcgtacccaataaaatgttaatacatcaatggaagacacaggtagaggcagtcggattggaacataagatatccatagatggagtaagtagtctattaaaggaactaaagactcaaagtccggatgtattaatagtagtcagtagacatctgacaaacgatgccttttgtaaatatatcaataagcattatgatttgttcatcttggatgaatcacatacgtataatctgatgaacaatacagcagttacaagatttttagcgtattatcctccgatgatgtgttattttttaactgctacacctagaccatctaaccgaatttattgtaacagtattattaatattgccaagttatccaatctaaaaaaaactatctatgcagtagatagtttttttgagccatattccacagataatattagacatatggtaaaacgactagatggaccatctaataaatatcatatatataccgagaagttattatctgtagacgagcctagaaatcaacttattcttgataccctggtagaagaattcaagtcaggaactattaatcgcattttagttattactaaactacgtgaacatatggtattattctacaaacgattattagattttttcggaccagaggttgtatttataggagacgcccaaaatagacgtactccagatatggtcaaatcaatcaaggaactaaatagatttatattcgtatccaccttattttattccggtactggtttagatattcctagtttggattcgttgttcatttgctcggcagtaatcaacaatatgcaaatagagcaattactagggagggtatgtcgagaaacagaactattagataggacggtatatgtatttcctaacacatccatcaaagaaataaagtacatgataggaaatttcatgcaacgaattattagtctgtctgtagataaactaggatttaaacaaaaaagttatcggaaacatcaagaatccgatcccacttctgcatgtacaacatcatccagagaagaacgtgtattaaatagaatatttaactcgcaaaatcgttaagaagtttaagcgacgatccgcatgctgcgcaggccagtgtattacccctcatagtattaatataatccaatgatacttttgtgatgtcggaaatcttaaccaatttagactgacaggcagaacacgtcatgcaatcatcatcgtcatcgataactgtagtcttgggcttctttttgcgactcttcattccggaacgcacattggtgctatccatttaggtagtaaaaaataagtcagaatatgccctataacacgatcgtgcaaaacctggtatatcgtctctatctttatcacaatatagtgtatcgacatttttattattattgacctcgtttatcttggaacatggaatgggaacatttttgttatcaacggccatctttgccttaattccagatgttgtaaaattataactaaacagtctatcatcgacacaaatgaaattcttgtttagacgtttgtagtttacgtatgcggctcgttcgcgtctcattttttcagatattgcaggtactataatattaaaaataagaatgaaataacataggattaaaaataaagttatcatgacttctagcgctgatttaactaacttaaaagaattacttagtctgtacaaaagtttgagattttcagattctgcggctatagaaaagtataattctttggtagaatggggaacatctacttactggaaaataggcgtgcaaaaggtagctaatgtcgagacgtcaatatctgattattatgatgaggtaaaaaataaaccgtttaatattgatccgggctattacattttcttaccggtatattttgggagcgtctttatttattcgaagggtaaaaatatggtagaacttggatctggaaactcttttcaaataccagatgatatgcgaagtgcgtgtaacaaagtattagacagcgataacggaatagactttctgagatttgttttgttaaacaatagatggataatggaagatgctatatcaaaatatcagtctccagttaatatatttaaactagctagtgagtacggattaaacatacccaaatatttagaaattgaaatagaggaagacacattatttgacgacgagttatactctattatagaacgctctttcgatgataaatttccaaaaatatccatatcgtatattaagttgggagaacttagacggcaagttgtagactttttcaaattctcattcatgtatattgagtccatcaaggtagatcgtataggagataatatttttattcctagcgttataacaaaatcaggaaaaaagatattagtaaaagatgtagaccatttaatacgatccaaggttagagaacatacatttgtaaaagtaaaaaagaaaaacacattttccattttatacgactatgatggaaacggaacagaaactagaggagaagtaataaaacgaattatagacactataggacgagactattatgttaacggaaagtatttctctaaggttggtagtgcaggcttaaagcaattgactaataaattagatattaatgagtgcgcaactgtcgatgagttagttgatgagattaataaatccggaactgtaaaacgaaaaataaaaaaccaatcagcatttgatttaagcagagaatgtttgggatatccagaagcggattttataacgttagttaataacatgcggttcaaaatagaaaattgtaaggttgtaaatttcaatattgaaaatactaattgtttaaataacccgagtattgaaactatatatggaaactttaaccagttcgtctcaatctttaatgtcgtcaccgatgtcaaaaaaagattattcgagtgaaataatatgcgcctttgatataggtgcaaaaaatcctgccagaactgttttagaagtcaaggataactccgttagggtattggatatatcaaaattagactggagttctgattgggaaaggcgcatagctaaagatttgtcacaatatgaatacactacagttcttctagaacgtcagcctagaaggtcgccgtatgttaaatttatctattttattaaaggctttttatatcatacatcggctgccaaagttatttgcgtctcgcctgtcatgtctggtaattcatatagagatcgaaaaaagagatcggtcgaagcatttcttgattggatggacacattcggattgcgagactccgttccggatagacgcaaattagacgatgtagcggatagtttcaatttggctatgagatacgtattagataaatggaatactaattatacaccttataataggtgtaaatctagaaattacataaaaaaaatgtaataacgttagtaacgccattatggataatctatttacctttctacatgaaatagaagatagatatgccagaactatttttaactttcatctaataagttgcgatgaaataggagatatatatggtcttatgaaagaacgcatttcctcagaggatatgtttgataatatagtgtataataaagatatacatcctgccattaagaaactagtgtattgcgacatccaacttactaaacacattattaatcagaatacgtatccggtatttaacgattcttcacaagtgaaatgttgtcattatttcgacataaactcagataatagcaatattagctctcgtacagtagagatatttgagagggaaaagtcatctcttgtatcatatattaaaactaccaataagaagagaaaggtcaattacggcgaaataaagaaaactgttcatggaggcactaatgcaaattacttttccggtaaaaagtctgacgagtatctgagtactacagttagatccaacattaatcaaccttggatcaaaaccatctctaagaggatgagagttgatatcattaatcactctatagtaacgcgtggaaaaagctctatattacaaactatagaaattatttttactaatagaacatgtgtgaaaatattcaaggattctactatgcacattattctatccaaggacaaggatgaaaaggggtgtatacacatgattgacaaattattctatgtctattataatttatttctgttgttcgaagatatcatccaaaacgagtactttaaagaagtagctaatgttgtaaaccacgtactcacggctacggcattagatgagaaattattcctaattaagaaaatggctgaacacgatgtttatggagttagcaatttcaaaatagggatgtttaacctgacatttattaagtcgttggatcataccgttttcccctctctgttagatgaggatagcaaaataaagttttttaaggggaaaaagctcaatattgtagcattacgatctctggaggattgtataaattacgtgactaaatccgagaatatgatagaaatgatgaaggaaagatcgactattttaaatagcatagatatagaaacggaatcggtagatcgtctaaaagaattgcttctaaaatgaaaaaaaacactaattcagaaatggatcaacgactagggtataagtttttggtgcctgatcctaaagccggagttttttatagaccgttacatttccaatatgtatcgtattctaattttatattgcatcgattgcatgaaatcttgaccgtcaagcggccactcttatcgtttaagaataatacagaacgaattatgatagaaattagcaatgttaaagtgactcctccagattactcacctataatcgcgagtattaaaggtaagagttatgacgcattagccacgttcactgtaaatatctttaaagaggtaatgaccaaagagggtatatccatcactaaaataagtagttatgagggaaaagattctcatttgataaaaattccgctactaataggatacgggaataaaaatccacttgatacagccaagtatcttgttcctaatgtcataggtggagtctttatcaataaacaatctgtcgaaaaagtaggaattaatctagtagaaaagattacaacatggccaaaatttagggttgttaagccaaactcattcactttctcgttttcctccgtatcccctcctaatgtattaccgacaagatatcgccattacaagatatctctggatatatcacaattggaagcgttgaatatatcatcgacaaagacatttataacggtcaatattgttttgctgtctcaatatttatctagagtgagtctagaattcattagacgtagtttatcatacgatatgcctccagaagttgtctatctagtaaacgcgataatagatagtgctaaacgaattactgaatctattactgactttaatattgatacatacattaatgacctggtggaagctgaacacattaaacaaaaatctcagttaacgatcaacgagttcaaatatgaaatgctgcataactttttacctcatatgaactatacacccgatcaactaaagggattttatatgatatctttactaagaaagtttctctactgtatcttccacacttctagatatccagatagagattcgatggtttgtcatcgcatcctaacgtacggcaaatattttgagacgttggcacatgatgaattagagaattacataggcaacatccgaaacgatatcatgaacaatcacaagaacagaggcacttacgcggtaaacattcatgtactaacaactcccggacttaatcacgcgttttctagcttattgagtggaaagttcaaaaagtcagacggtagttatcgaacacatcctcactattcatggatgcagaatatttctattcctaggagtgttggattttatccggatcaagtaaagatttcaaagatgttttctgtcagaaaataccatccaagtcaatatctttacttttgttcatcagacgttccggaaagaggtcctcaggtaggtttagtatctcaattgtctgtcttgagttccattacaaatatactaacgtctgagtatttggatttggaaaagaaaatttgtgagtatatcagatcatattataaagatgatataagttactttgaaacaggatttccaatcactatagaaaatgctctagtcgcatctcttaatccaaatatgatatgtgattttgtaactgactttagacgtagaaaacggatgggattcttcggtaacttggaggtaggtattactttagttagggatcacatgaatgaaattcgcattaatattggagcgggaagattagtcagaccattcttggttgtggataacggagagctcatgatggatgtgtgtccggagttagaaagcagattagacgacatgacattctctgacattcagaaagagtttccgcatgtcatcgaaatggtagatatagaacaatttacttttagtaacgtatgtgaatcggttcaaaaatttagaatgatgtcaaaggatgaaagaaagcaatacgatttatgtgactttcctgccgaatttagagatggatatgtagcatcttcattagtgggaatcaatcacaattctggacccagagctattcttggatgtgctcaagctaaacaagctatctcttgtctgagctcggatatacgaaataaaatagacaatggaattcatttgatgtatccagagaggccaatcgtgattagtaaggctttagaaacttcaaagattgcggctaattgcttcggccaacatgttactatagcattaatgtcgtacaaaggtatcaatcaagaggatggaattatcatcaaaaaacaatttattcagagaggcggtctcgatattgttacagccaagaaacatcaagtagaaattccattggaaaactttaataacaaagaaagagataggtctaacgcctattcaaaattagaaagtaatggattagttagactgaatgctttcttggaatccggagacgctatggcacgaaatatctcatcaagaactcttgaagatgattttgctagagataatcagattagcttcgatgtttccgagaaatataccgatatgtacaaatctcgcgttgaacgagtacaagtagaacttactgacaaagttaaggtacgagtattaaccatgaaagaaagaagacccattctaggagacaaatttaccactagaacgagtcaaaagggaacagtcgcgtatgtcgcggatgaaacggaacttccatacgacgaaaatggtatcacaccagatgtcattattaattctacatccatcttctctagaaaaactatatctatgttgatagaagttattttaacagccgcatattctgctaagccgtacaacaataagggagaaaaccgacctgtctgttttcctagtagtaacgaaacatccatcgatacatatatgcaattcgctaaacaatgttatgagcattcaaatccgaaattgtccgatgaagaattatcggataaaatcttttgtgaaaagattctctatgatcctgaaacggataagccttatgcatccaaagtattttttggaccaatttattacttgcgtctgaggcatttaactcaggacaaggcaaccgttagatgtagaggtaaaaagacgaagctcattagacaggcgaatgagggacgaaaacgtggaggaggtatcaagttcggagaaatggagagagactgtttaatagcgcatggtgcagccaatactattacagaagttttgaaagattcggaagaagattatcaagatgtgtatgtttgtgaaaattgtggagacatagcagcacaaatcaagggtattaatacatgtcttagatgttcaaaacttaatctctctcctctcttaacaaaaattgataccacgcacgtatctaaagtatttcttactcaaatgaacgccagaggcgtaaaagtcaaattagatttcgaacgaaggcctccttcgttttataaaccattagataaagttgatctcaagccgtcttttctggtgtaatattctagtttggtagtagatacatatcaatatcatcaaattcgagatccgaattataaaatgggcgtggattgttaactatagaatcggacgtctgatattcgaaaatctgtggagtttcaggttttggtggaggtgtaactgctacttgggatactgaagtctgatattcagaaagctgtggatgttctggttcggcatccaccgatggtgtcacatcactaatcggttcggtaacgtctgtggatggaggtgctacttctacagaacctgtagcctcagttgtcaacggagatacatttttaatgcgagaaaatgtataatttggtaatggtttcttatgtggatctgaagaagaggtaagatatctactagaaagataccgatcacgttctagttctcttttgtagaacttaactttttctttctccgcatctagttgatattccaacctcttcacgttactacgttcagattccaattcacgttcgcatgggttacctccgcagtttttacgagcgatttcacgttcagccttcatgcgtctctccctctctctatcgagtttatcagagcagtctttctgaaggcgatcgaactccataaatttctccaacgctttgattgtttccatagatttccgaagttcagcttttaggactgtgattctttttctttcgaattcacagctggatgtacaaccgtttccattaccgccatctctaagtttcttttctagatcggcaacatttcatccccatgccttttacattcctcgagtctactgtcgtcgaaatatcgttccagctccttttcgacatcaataactttagcacgttgtctctcaagctctcttttgtagttatctgattccctggcacgtttaagatcttcatgcaattgagtcagctcttaacttcctctcttgcttcttcgtcatagtacgcgcaatcactgtgagatccattgttaccacgtctacactcggcgagctcgcgtttaagagattcaatttcccgtttgtattggtccatgtttccattgctaccaccattagatttacaggctgctagttgtcgttcgagatcagaaatacgggttttcttggaattgatttcgtcgatgtacttggcatcgaaacacttattaagttctttttccaattctacgattttatttctttcgcgagtcaattccctcctgtagtaactatctgttttgtcagattcacgctctctacgtagactttcttgcaagttactaatttgttccctagcacgtccgagtttagttttatatgctgaatagagttctgattcatcctttgagcagatctctagcgatcgtttaagattcctaattctagtctttagcctatttacctcctcagaagatgttccgttaccgttgcgtttacactcgttaagctgtctatcaagatccatgattctatctctaagacgttgcatctctctttccatatcagcattgctttcattattacgtctgcagtcactcaactgtctttcaatatctgagattctatctctaagacgtcgcatctctctctgtttcggcattggtttcattattacgtttacagtcgttcaactgtctttcaagatctgatattctagattggagtctgctaatctctgtagcattttcacggcattcactcagttgtctttcaagatctgaaattttagattggagtctgctaatctctgtaagatttcctcctccgctctcgatgcagtcggtcaacttattctctagttctctaatacgcgaacgcagtgcatcaacttcttgcgtgtcttcctggttgcgtgtacattcatcgagatctctaacgcgtcgtcgttcttcctcaagttctctgcgtactacagaaagcgtgtccctatcttgttgatatttagcaatttctgattctagagtactgattttgcttacgtagttactaatagttgtcttggccttatcaagatcctccttgtatttgtcgcattccttgatatccctacgaagtctggacagttcccattcgacattacgacgtttatcgatttcagctcggagatcgtcatcgcgttgttttagccacatacgactgagttcaagttctcgttgacaagatccatctacttttccattcctaatagtatccagttccttttctagttctgaacgcatttctcgttccctatcaagcgattctctcaattctcggatagtcttcttatcaatttctaataaatctgaaccatcatctgtcccattttgaatatccctgtgttctttgatctcttttgtaagtcggtcgattctttcggttttataaacagaatccctttccaaagtcctaatcttactgagtttatcactaagttctgcattcaattcggtgagttttctcttggcttcttccaactctgttttaaactctccactatttccgcattcttcctcgcatttatctaaccattcaattagtttattaataactagttggtaatcagcgattcctatagccgttcttgtaattgtgggaacataattaggatcttctaatggattgtatggcttgatagcatcatctttatcattattagggggatggacaaccttaattggttggtcctcatctcctccagtagcgtgtggttcttcaataccagtgttagtaataggcttaggcaaatgcttgtcgtacgcgggcacttcctcatccatcaagtatttataatcgggttctacttcagaatattcttttctaagagacgcgacttcgggagttagtagaagaactctgtttctgtatctatcaacgctggaatcaatactcaagttaaggatagcgaatacctcatcgtcatcatccgtatcttctgaaacaccatcatatgacatttcatgaagtctaacgtattgataaatagaatcagatttagtattaaacagatccttaacctttttagtaaacgcatatgtatattttagatctccagatttcataatatgatcacatgccttaaatgtcagtgcttccatgatataatctggaacactaatgggtgacgaaaaagatacagcaccatatgctacgttgataaataaatctgaaccactaagtagataatgattaatgttaagaaagaggaaatattcagtgtataggtatgtcttggcgtcatatcttgtactaaacacgctaaacagtttgttaatgtgatcaatttccaatagattaattagagcagcgggaataccaacaaacatattaccacatccgtattttctatgaatatcacatatcatgttaaaaaatcttgatagaagagcgaatatctcgtctgacttaatgagtcgtagttcagcagcaacataagtcataactgtaaatagaacatactttcctgtagtgttgattctagactccacatcaacaccattattaaaaatagttttatatacatctttaatctgctctccgttaatcgtcgaacgttctagtatacggaaacactttgatttcttatctgtagttaatgacttagtgatatcacgaagaatattacgaattacatttcttgtttttcttgagagacctgattcagaactcaactcatcgttccatagtttttctacctcagtggcgaaatctttggagtgcttggtacatttttcaataaggttcgtgacctccatttattataaaaaatttattcaaaacttaactacaatcgggtaattataagatcgtagatctcccatgtggcggaatactaccatctatcgcatgtggatggacagtaggtaatggccatgggaacagtaatgtttgcatatttatctttcttgctagtattactgcatattgtcccaatgtttcgatgtgatgttctaacctatcaactgccgctgtatcacaacaatagtgtccgatgaaattaagattatgatccaatgtgtttaatatatgattatcaagtcttatacgatccgcgtcttttttgacaggatcaggttcttctacaggaagaagtttcggcctcttatgatattcatgtctgggaaacggtggtctagggtgaggctccggtatcggagtgggttttggattataatcatcatcgtctatgacatcatcttcgacttcgatatttattttgctatcttgatgatgtcctgtatcagttgcattttcagcactcgactgaatattagcgcattcattgtctattattaccatatttctaaacccaaaatgtatgtgttgaacatcagtactatcgttgatgagtcttatagcatgaattcgcttatcgttatcgggtttatcttctgtcaccttagcaattccttttttattaaactctacataatcatatccatttctattgtttgttctaatataaacgagtatagcatcattgctaaatttttcaatagtatcaaaaacagaatatcctaaaccatataatatatattcaggaacactcaaactaaatgtccaggattctcctaaatacgtaaactttaatagtgcgaaatcattcaaaaatctaccacttatagatagatagtacataaatgcgtatagtagtctacctatctctttattatgaaaaccggcattacgatcatatatgtcgtgatatacctgtgatccgtttacgttaaaccataaatacatgggtgatcctataaacatgaatttatttctaattctcagagctatagttaattgaccgtgtaatatttgcttacatgcatacttgatacgcttattaataagatttttatcattgctcgttatttcagaatcgtatatataaggagtaccatcgtgattcttaccagatattatacaaaatactatatataaaatatattgacccacgttagtaatcatataaatgtttaacgttttaaattttgtattcaatgatccattatcatacgctatcatggtcttgtaatattcattctttaaaatataatattgtgttagccattgcattggagctcctaatggagattttctattctcatccattttaggataggctttcataaagtccctaataacttcgtgaataatgtttctatgttttctactgatgcatgtatttgcttcgatttttttatcccatgtttcatctatcatagatttaaacgcagtaatgctcgcaacattaacatcttgaaccgttggtacaattccgttccataaatttataatgttcgccatttatataactcattttttgaatatacttttaattaacaaaagagttaagttactcatatggacgccgtccagtctgaacatcaatctttttagccagagatatcatagccgctcttagagtttcagcgtgattttccaacctaaatagaacttcatcgttgcgtttacaacacttttctatttgttcaaactttgttgttacattagtaatctttttttccaaattagttagccgttgtttgagagtttcctcattgtcgtcttcatcggctttaacaattgcttcgcgtttagcctctggctttttagcagcctttgtagaaaaaaattcagttgctggaattgcaagatcgtcatctccggggaaaagagttccgtccatttaaagtacagattttagaaactgacactctgcgttatttatatttggtacaacacatggattataaatattgatgttaataacatcagaaaatgtaaagtctatacattgttgcatcgtgttaaattttctaatggatctagtattattgggtccaacttctgcctgaaatccaaatatggaagcggatacaaaaccgtttcctggataaaccacacatctccacttttgctttacatcagaaattgtgtcgttgacatcttgaactctcctatctaatgccggtgttccacctatagattttgaatattcgaatgctgcatgagtagcattaaattccttaatattgccataattttcatatattgagtaaccctggataaaaagtaaacacaccgcagccgtcgctaccacaataaaaaaaattgatagagagttcatttataatctattagaagctgacaaaatttttttacacgcatcagacaatgctttaataaatagttcaacatctacttttgtcatatcgaaccgatggtatgattctaacctagaattacatccgaaaaagttgactatgttcatagtcattaagtcattaacaaacaacattccagactctggattataagacgatactgtttcgtcacaattacctaccttaatcatgtgattatgaatattggctattagagcaccttctaagaaatctataatatctttgaaacacgatttaaaatcaaaccacgaatatacttctacgaagaaagttagtttacccataggagaaataactataaatggagatctaaatacaaaatccggatctatgatagttttaacattattatattctctattaaatacctccacatctaaaaatgttaattttgaaactatgtcttcgtttattaccgtacctgaactaaacgctataagctctattgtttgagaactctttaaacgatattcttgaaatacatgtaacaaagtttcctttaactcggtcggtttatctaccatagttacagaatttgtatccttatctataatataataatcaaaatcgtataaagttatataattatcgcgttcagattgtgatcttttcaaatagactaaaaaccccatttctctagtaagtatcttatgtatatgtttgtaaaatatcttcatggtgggaatatgctctaccgcagttagccattcctcattgacagcggtagatgtattagacaaaactattccaatgtttaacaagggccattttacgagattattaaatccttgtttgataaatgtagccaatgagggttcgagttcaacgacgattgaattctcttcccgcggatgctgcatgatgaacgacgggatgttgttcgattgatttggaattctttttcgactttttgtttatattaaatattttaaaatttatagcggatagcaattcatgtaccacggataatgtagacgcgtattgcgcatcgatatctttattattagataaatttatcaataaatgtgagaagtttgcctcgttaaggtcttccatttaaatattatataaacatttgtgtttgtatcttattcgtcttttatggaatagttttttactagtaaagctgcaattacacactttgtccgtaaaacataaatataaacaccagcttttatcaatcgttccaaaaagtcgacggcggacatttttaacatggcatctattttaaatacacttaggtttttggaaaaaacatcattttataattgtaacgattcaataactaaagaaaagattaagattaaacataagggaatgtcatttgtattttataagccaaagcattctaccgttgttaaatacttgtctggaggaggtatatatcatgatgatttggttgtattggggaaggtaacaattaataatctaaagatgatgctattttacatggatttatcatatcatggagtgacaagtagtggagcaatttacaaattgggatcgtctatcgatagactttctctaaataggactattgttacaaaagttaataattatgatgatacattttttgacgacgatgattgatcgctattgcacaattttgtttttgtactttctaatatagtgtttaggttctttttcatatgagaatattgatttactaaaatatctatgtttaacttttgttctatgacgtccttatcggcggtatcggtacatatacgtaattcaccttcacaaaatacggagtcttcgataataatagccaatcgattattggatctagctgtctgtatcatattcaacatgtttaatatatcctttcgtttcccctttacaggcatcgatcgtagcatattttccgcgtctgatatggaaatgttaaaactacaaaaatgcgtaatgttagcccgtcctaatattggtacgtgtctataagtttggcatagtagaataatagacgtgtttaaatgccttccaaagtttaagaattctattagagtattgcattttgatagtttatcgcctacatcatcaaaaataagtaaaaagtgtgctgattttttatgattttgtgcgacagcaatacatttttctatgttacttttagttcgtatcagattatattctagagattcctgactactaacgaaattaatatgatttggccaaatgtatccatcataatctgggttataaacgggtgtaaacaagaatatatgtttatattttttaactagtgtagaaaacagagatagtaaatagatagtttttccagatccagatcctcctgttaaaaccattctaaacggcatttttaataaattttctcttgaaaattgtttttcttggaaacaattcataattatatttacagttactaaattaatttgataataaatcaaaatatggaaaactaaggttgttagtagggaggagaacaaagaaggcacatcgtgatataaataacatttattatcatgatgacaccagaaaacgacgaagagcagacatctgtgttctccgctactgtttacggagacaaaattcagggaaagaataaacgcaaacgcgtgattggtctatgtattagaatatctatggttatttcactactatctatgattaccatgtccgcgtttctcatagtgcgcctaaatcaatgcatgtctgctaacgaggctgctattactgacgccgctgttgccgttgctgctgcatcatctactcatagaaaggttgcgtctagcactacacaatatgatcacaaagaaagctgtaatggtttatattaccagggttcttgttatatattacattcagactaccagttattctcggatgctaaagcaaattgcactgcggaatcatcaacactacccaataaatccgatgtcttgactacctggctcattgattatgttgaggatacatggggatctgatggtaatccaattacaaaaactacatccgattatcaagattctgatgtatcacaagaagttagaaagtatttttgtgttaaaacaatgaactaatatttatttttgtacattaataaatgaaatcgcttaatagacaaactgtaagtaggtttaagaagttgtcggtgccggccgctataatgatgatactctcaaccattattagtggcataggaacatttctgcattacaaagaagaactgatgcctagtgcttgcgccaatggatggatacaatacgataaacattgttatttagatactaacattaaaatgtctacagataatgcggtttatcagtgtcgtaaattacgagctagattgcctagacctgatactagacatctgagagtattgtttagtattttttataaagattattgggtaagtttaaaaaagaccaatgataaatggttagatattaataatgataaagatatagatattagtaaattaacaaattttaaacaactaaacagtacgacggatgctgaagcgtgttatatatacaagtctggaaaactggttaaaacagtatgtaaaagtactcaatctgtactatgtgttaaaaaattctacaagtgacaacaaaaaatgaattaataataagtcgttaacgtacgccgccatggacgccgcgtttgttattactccaatgggtgtgttgactataacagatacattgtatgatgatctcgatatctcaatcatggactttataggaccatacattataggtaacataaaaactgtccaaatagatgtacgggatataaaatattccgacatgcaaaaatgctactttagctataagggtaaaatagttcctcaggattctaatgatttggctagattcaacatttatagcatttgtgccgcatacagatcaaaaaataccatcatcatagcatgcgactatgatatcatgttagatatagaagataaacatcagccattttatctattcccatctattgatgtttttaacgctacaatcatagaagcgtataacctgtatacagctggagattatcatctaatcatcaatccttcagataatctgaaaatgaaattgtcgtttaattcttcattctgcatatcagacggcaatggatggatcataattgatgggaaatgcaatagtaattttttatcataaaagttgtaaagtaaataataaaacaataaatattgaactagtagtacgtatattgagcaatcagaaatgatgctggtacctcttatcacggtgaccgtagttgcgggaacaatattagtatgttatatattatatatttgtaggaaaaagatacgtactgtctataatgacaataaaattatcatgacaaaattaaaaaagataaagagttctaattccagcaaatctagtaaatcaactgatagcgaatcagactgggaggatcactgtagtgctatggaacaaaacaatgacgtagataatatttctaggaatgagatattggacgatgatagcttcgctggtagtttaatatgggataacgaatccaatgttatggcgcctagcacagaacacatttacgatagtgttgctggaagcacgctgctaataaataatgatcgtaatgaacagactatttatcagaacactacagtagtaattaatgaaacggagactgttgaagtacttaatgaagataccaaacagaatcctaactattcatccaatcctttcgtaaattataataaaaccagtatttgtagcaagtcaaatccgtttattacagaacttaacaataaatttagtgagaataatccgtttagacgagcacatagcgatgattatcttaataagcaagaacaagatcatgaacacgatgatatagaatcatcggtcgtatcattggtgtgattagtttcctttttataaaattgaagtaatatttagtattattgctgccgtcacgttgtacaaatggagatattccctgtattcggcatttctaaaattagcaattttattgctaataatgactgtagatattatatagatacagaacatcaaaaaattatatctgatgagatcaatagacagatggatgaaacggtacttcttaccaacatcttaagcgtagaagttgtaaatgacaatgagatgtaccatcttattcctcatagattatcgacgattatactctgtattagttctgtcggaggatgtgttatctctatagataatgacatcaatggcaaaaatattctaacctttcccattgatcatgctgtaatcatatccccactgagtaaatgtgtcgtagttagcaagggtcctacaaccatattggttgttaaagcggatatacctagcaaacgattggtaacatcgtttacaaacgacatactatatgtaaacaatctgtcactgattaattatttgccgttgtctgtattcattattagacgagtcaccgactatttggatagacacatatgcgatcagatatttgctaataataagtggtattcccttataaccatcgacgataagcaatatcctattccatcaaactgtataggtatgtcctctgccaagtacataaattctagcatcgagcaagatactttaatccatgtttgtaacctcgagcatccgttcgactcagtatacaaaaaaatgcagtcgtacaattctctacctatcaaggaacaaatattgtacggtagaattgataatataaatatgagcattagtatttctgtggattaatagatttctagtatggggatcattaatcatctctaatctctaaatacctcataaaacgaaaaaaaagctattatcaaatactgtacggaatggattcattctcttctctttttatgaaactctgttgtatatctactgataaaactggaagcaaaaaatctgatagaaagaataagaataagatcaaggattatatggaacacgattattataaaataacaatagttcctggttcctcttccacgtctactagctcgtggtattatacacatgcctagtaatagtctctttgcgttgacggaaagcagactagaaataacaggctaaaatgttcagacaccataatagttcccaacccagataataacagagttccatcaacacattcctttaaactcaatcccaaacccaaaaccgttaaaatgtatccggccaattgatagtagataatgaggtgtacagcgcatgataatttacacagtaaccaaaatgaaaatactttagtaattataagaaatatagacggtaatgtcatcatcaacaatccgataatatgcctgagagtaaacattgacggataaaacaaaaatgctccgcataactctatcatggcaataacacaaccaaatacttgtaagattcctaaattagtagaaaatacaacgaatatcgatgtataagtgatctcgagaaataataagaataaagtaatgcccgtaaagataaacatcaacattgtttggtaatcattaaaccaattagtatgaagttgaactaatttcacagtagattttattccagtgttatcctcgcatgtataagtacctggtaagatatctttatattccataatcaatgagacatcactatctgataacgaatgaagtctagcactagtatgccatttacttaatattgtcgtcttggaagttttattataagttaaaatatcatggttatccaatttccatctaatatactttgtcggattatctatagtacacggaataatgatggtatcattacatgctgtatactctatggtctttgtagttgttataacaaccaacgtatagaggtatatcaacgatattctaactcttgacattttttatttatttaaaatgatacctttgttatttattttattctattttgctaacggtattgaatggcataagtttgaaacgagtgaagaaataatttctacttacttattagacgacgtattatacacgggtgttaatggggcggtatacacattttcaaataataaactaaacaaaactggtttaactaataataattatataacaacatctataaaagtagaggatgcggataaggatacattagtatgcggaaccaataacggaaatcccaaatgttggaaaatagacggttcagacgacccaaaacatagaggtagaggatacgctccttatcaaaatagcaaagtaacgataatcagtcacaacggatgtgtactatctgacataaacatatcaaaagaaggaattaaacgatggagaagatttgacggaccatgtggttatgatttattcacggcggataacgtaattccaaaagatggtttacgaggagcattcgtcgataaagacggtacttatgacaaagtttacattcttttcactgatactatcggctcaaagagaattgtcaaaattccgtatatagcacaaatgtgcctaaacgacgaaggtggtccatcatcattgtctagtcatagatggtcgacgtttctcaaagtcgaattagaatgtgatatcgacggaagaagttatagacaaattattcattctagaactataaaaacagataatgatacgatactatatgtattcttcgatagtccttattccaagtccgcattatgtacctattctatgaataccattaaacaatctttttctacgtcaaaattggaaggatatacaaagcaattgccgtctccagctcctggtatatgtttaccagctggaaaagttgttccacataccacgtttgaagtcatagaacaatataatgtactagatgatattataaagcctttatctaaccaacctatcttcgaaggaccgtctggtgttaaatggttcgatataaaggagaaggaaaatgaacatcgggaatatagaatatacttcataaaagaaaattctatatattcgttcgatacaaaatctaaacaaactcgtagctcgcaagtcgatgcgcgactattttcagtaatggtaactgcgaaaccgttatttatagcagatatagggataggagtaggaatgccacaaatgaaaaaaatacttaaaatgtaatcttaatcgagtacaccacacgacaatgaacaaacataagacagattatgctggttatgcttgctgcgtaatatgcggtctaattgtcggaattatttttacagcgacactattaaaagttgtagaacgtaaattagttcatacaccattaatagataaaacgataaaagatgcatatattagagaagattgtcctactgactggataagctataataataaatgtatccatttatctactgatcgaaaaacctgggaggaaggacgtaatgcatgcaaagctctaaattcaaattcggatctaattaagatagagactccaaacgagttaagttttttaagaagccttagacgaggctattgggtaggagaatccgaaatattaaaccagacaaccccatataattttatagctaagaatgccacgaagaatggaactaaaaaacggaaatatatttgtagcacaacgaatactcccaaactgcattcgtgttacactatataacaattacactacatttttatcataccactacttcggttagatgttttagaaaaaaataaatatcgccgtaccgttcttgtttttataaaaataacaattaacaattatcaaattttttctttaatattttacgtggttgaccattcttggtggtaaaataatctcttagtgttggaatggaatgctgtttaatgtttccacactcatcgtatattttgacgtatgtagtcacatcgtttacgcaatagtcagactgtagttctatcatgcttcctacatcagaaggaggaacagttttaaagtctcttggttttaatctattaccgttagttttcatgaaatcctttgttttatccacttcacattttaaataaatgtccactatacattcttttgttaattttactagatcgtcatgggtcatagaatttataggttccgtagtccatggatccaaactagcaaacttcgcgtatacggtatcgcgattagtgtatacaccaactgtatgaaaattaagaaaacagtttaataaatcaacagaaatatttaatcctccgtttgatacagatgcgccatatttatggatttcggattcacacgttgtttgtctgaggtgttcgtctagtgttgcttctacgtaaacttcgattcccatatattctttattgtcagaatcgcataccgatttatcatcatacactgtttgaaaactaaatggtatacacatcaaaataataaataataacgagtacattctgcaatattgttatcgtaattggaaaaatagtgttcgagtgagttggattatgtgagtattggattgtatattttattttatattttgtaataagaataaaatgctaatgtcaagtttattccaatagatgtcttattaaaaacatatataataaataacaatggctgaatggcataaaattatcgaggatatctcaaaaaataataagttcgaggatgccgccatcgttgattacaagactacaaagaatgttctagctgctattcctaacagaacatttgccaagattaatccgggtgaaattattcctctcatcactaatcgtaatattctaaaacctcttattggtcagaaatattgtattgtatatactaactctctaatggatgagaacacgtatgctatggagttgcttactgggtacgcccctgtatctccgatcgttatagcgagaactcataccgcacttatatttttgatgggtaagccaacaacatccagacgtgacgtgtatagaacgtgtagagatcacgctacccgtgtacgtgcaactggtaattaaaataaaaagtaatattcatatgtagtgtcaattttaaatgatgatgatgaaatggataatatccatattgacgatgtcaataatgccggtattggcatacagttcatcgatttttagatttcattcagaggatgtggaattatgttatgggcatttgtattttgataggatctataatgtagtaaatataaaatataatccgcatattccatatagatataattttattaatcgcacgttaaccgtagatgaactagacgataatgtcttttttacacatggttattttttaaaacacaaatatggttcacttaatcctagtttgattgtctcattatcaggaaacttaaaatataatgatatacaatgctcagtaaatgtatcgtgtctcattaaaaatttggcaacgagtacatctactatattaacatctaaacataagacttattctctacatcggtccacgtgtattactataataggatacgattctattatatggtataaagatataaatgacaagtataatgacatctatgattttactgcaatatgtatgctaatagcgtctacattgatagtgaccatatacgtgtttaaaaaaataaaaatgaactcttaattatgctatgctattagaaatggataaaatcaaaattacggttgattcaaaaattggtaatgttgttaccatatcgtataacttggaaaagataactattgatgtcacacctaaaaagaaaaaagaaaaggatgtattattagcgcaatcagttgctgtcgaagaggcaaaagatgtcaaggtagaagaaaaaaatattatcgatattgaagatgacgatgatatggatgtagaaagcgcgtaatacgatctataaaaataagtatataaatactttttatttactgtactcttactgtgtagtggtgataccctactcgattatttttttaaaaaaaaaatacttattctgattcttctagccatttccgtgttcgtttgaatgccacatcgacgtcaaagataggggagtagttgaaatctagttctgcattgttggtacgcacctcaaatgtagtgttggatatcttcaacgtatagttgttgagtagtgatggttttctaaatagaattctcttcatatcattcttgcacgcgtacatttttagcatccatcttggaatcctagatccttgttctattcccaatggtttcatcaatagaagattaaacatatcgtacgaacacgatggagagtaatcgtagcaaaagtaagcatttcctttaatcttagatcccggatactggatatattttgcagccaacacgtgcatccatgcagcatttcctacatatacccggctatgcaccgcgtcatcatcgactgtacgatacataatgttaccgtgttgcttacattgctcgtaaaagactttcatcaatttgtctccttctccgtaaattccagtgggtcttaggcaacaagtatacaattttgctccattcatgattacggaattattggctttcataaccagttgctcggccatacgtttactttttgcgtatacatgtcctggtgatatatcataaagggtatgctcatggccgatgaatggatcaccgtgtttattgggtcctattgcttccatgctactagtatagatcaaatacttgattcctaggtccacacaagctgccaaaatagtctgtgttccataatagtttactttcatgatttcattatcggtgtattttccaaatacatccactagagcagccgtatgaataatcagatttaccccatctagcgcttctctcaccttatcaaagtcgtttatatcacattgtatatagtttataaccttaactttcgaggttattggttgtggatcttctacaatatctatgactctgatttcttgaacatcatctgcactaattaacagttttactatatacctgcctagaaatccggcaccaccagtaaccgcgtacacggccattgctgccactcataatatcagactacttattctattttactaaataatggctgtttgtataatagaccacgataatatcagaggagttatttactttgaaccagtccatggaaaagataaagttttaggatcagttattggattaaaatccggaacgtatagtttgataattcatcgttacggagatattagtcaaggatgtgattccataggcagtccagaaatatttatcggtaacatctttgtaaacagatatggtgtagcatatgtttatttagatacagatgtaaatatatttacaattattggaaaggcgttatctatttcaaaaaatgatcagagattagcgtgtggagttattggtatttcttacataaatgaaaagataatacattttcttacaattaacgagaatggcgtttgatatatcagttaatgcgtctaaaacaataaatgcattagtttacttttctactcagcaaaataaattagtcatacgtaatgaagttaatgatacacactacactgtcgaatttgatagggacaaagtagttgacacgtttatttcatataatagacataatgacaccatagagataagaggggtgcttccagaggaaactaatattggttgcgcggttagtatgacttacttgtataataagtatagttttaaactgattttagcagaatatataagacacagaaatactatatccggcaatatttattcggcattgatgacactagatgatttggctattaaacagtatggagacattgatctattatttaatgagaaacttaaagtagactccgattcgggactatttgactttgtcaactttgtaaaggatatgatatgttgtgattctagaatagtagtagctctatctagtctagtatctaaacattgggaattgacaaataaaaaatataggtgtatggcattagccgaacatatatctgatagtattccaatatctgagctatctagactacgatacaatctatgtaagtatctacgcggacacactgagagcatagaggataaatttgattattttgaagacgatgattcgtctacatgttctgccgtaaccgacagggaaacggatgtataattttttttatagcgtgaaggatatgataaaaaatataattgttgtatttatcccattccaatcaccttatatgattctgtaacacaataaaggagtcttatagatgtatagaggtcagatactggtttgataaactgtttattccacataagtatgtttgactttatggttagacccgcatactttaacaaatcactgaaaattggagttaggtattgacctctcagaatcagttgccgttctggaacattaaatgtattttttatgatatactccaacgcatttatgtgggcatacaacaagtcattactaatggaatattccaagagttttagttgtctagtatttaacaagagaagagatttcaacagactgtttatgaactcgaatgccgcctcattgtcgcttatattgatgatgtcgaattctcccaatatcatcaccgatgagtagctcatcttgttatcgggatccaagttttctaaagatgtcattaaaccctcgatcatgaatggatttatcatcatcgtttttatgttggacatgagcttagtccgtttgtccacatctatagaagatgatttctgaattatttcatatatctctctctttaactccaggaacttgtcaggatggtctactttaatatgttctcgtctaagagatgaaaatctttggatggttgcacgcgacttttctctaaaggatgacgttgcccaagatcctctcttaaatgaatccatcttatccttggacaagatggacagtctattttccttagatggtttaatatttttgttacccatgatctataaaggtagacctaatcgtctcggatgaccatatatttattttcagttttattatacgcataaattgtaaaaaatatgttaggtttacgaaaatgtctcgtggggcattaatcgtttttgaaggattggacaaatctggaaaaacaacacaatgtatgaacatcatggaatcaataccttcaaacacaataaaataccttaactttcctcagagatccactgtcactggaaagatgatagatgactatctaactcgtaaaaaaacctataatgatcatatagttaatctattattttgtgcaaatagatgggagtttgcatcttttatacaagaacaactagaacagggaattactttaatagttgatagatacgcattttctggagtagcgtatgccgccgctaaaggcgcgtcaatgactctcagtaagagttatgaatctggattgcctaaacccgacttagttatattcttggaatctggtagcaaagaaattaatagaaacgtcggtgaggaaatttatgaagatgttacattccaacaaaaggtattacaagaatataaaaaaatgattgaagaaggagatattcattggcaaattatttcttctgaattcgaggaagatgtaaagaaggagttgattaagaatatagttatagaggctatacacacggttactggaccagtggggcaactgtggatgtaatagtgaaattacattttttataaatagatgttagtacagtgttataaatggatgaagcatattactctggcaacttggaatcagtactcggatacgtgtccgatatgcataccgaactcgcatcaatatctcaattagttattgccaagatagaaactatagataatgatatattaaacaaggacattgtaaattttatcatgtgtagatcaaacttggataatccatttatctctttcctagatactgtatatactattatagatcaagagaactatcagactgagttgattaattcattagacgacaatgaaattatcgattgtatagttaataagtttatgagcttttataaggataacctagaaaatatagtagatgctatcattactctaaaatatataatgaataatccagattttaaaactacgtatgccgaagtactcggttccagaatagccgatatagatattaaacaagtgatacgtaagaatatactacaattgtctaataatatccgcgaacgatatttgtgaaaatattaaaaaaaaatactttttttattaaatgacgtcttttcgtgaatttagaaaattatgctgtgctatatatcacgcatcaggatataaagaaaaatctaaattaattagagactttataacagatagggatgataaatatttgatcattaagctattgcttcccggattagacgatagaatttataacatgaacgataaacaaattataaaattatatagtataatatttaaacaatctcaggaagatatgctacaagatttaggatacggatatataggagacactattaggactttcttcaaagagaacacagaaatccgtccacgagataaaagcattttaactttagaagaagtggatagttttttaactacgttatcatccgtaactaaagaatcgcatcaaataaaattattgactgatgtagcatctgtttgtacatgtaatgatttaaaatgtgtagtcatgcttattgataaagatctaaaaattaaagcgggtcctcggtacgtacttaacgctattagtcctaatgcctatgatgtgtttagaaaatctaataacttgaaagagataatagaaaattcatctaaacaaaatctagactctatatctatttctgttatgactccaattaatcccatgttagcggaatcgtgtgattctgtcaataaggcgtttaaaaaatttccatcaggaatgtttgcggaagtcaaatacgatggtgaaagagtacaagttcataaaaataataacgagtttgccttctttagtagaaacatgaaaccagtactctctcataaagtggattatctcaaagaatacataccgaaagcatttaaaaaagctacgtctatcgtattggattctgaaattgttcttgtagacgaacataatgtaccgctcccgtttggaagtttaggtatacacaaaaagaaagaatataaaaactctaacatgtgtttgttcgtgtttgactgtttgtactttgatggattcgatatgacggacattccattgtacgaacgaagatcttttctcaaagatgttatggttgaaatacccaatagaatagtattctcagagttgacgaatattagtaacgagtctcagttaactgacgtattggatgatgcactaacgagaaaattagaaggattggtcttaaaagatattaatggagtatacgaaccgggaaagagaagatggttaaaaataaagcgagactatttgaacgagggttccatggcagattctgccgatttagtagtactaggtgcctactatggtaaaggagcaaagggtggtatcatggcagtctttctaatgggttgttacgacgatgaatccggtaaatggaagacggttaccaagtgttcaggacacgatgataatacgttaagggagttgcaagaccaattaaagatgattaaaattaacaaggatcccaaaaaaattccagagtggttagtagttaataaaatctatattcccgattttgtagtagaggatccgaaacaatctcagatatgggaaatttcaggagcagagtttacatcttccaagtcccataccgcaaatggaatatccattagatttcctagatttactaggataagagaggataaaacgtggaaagaatctactcatctaaacgatttagtaaacttgactaaatcttaatagttacatacaaactgaaaattaaaataacactatttagttggtggtcgccatggatggtgttattgtatactgtctaaacgcgctagtaaaacatggcgaggaaataaatcatataaaaaatgatttcatgattaaaccatgttgtgaaagagtttgtgaaaaagtcaagaacgttcacattggcggacaatctaaaaacaatacagtgattgcagatttgccatatatggataatgcggtatccgatgtatgcaattcactgtataaaaagaatgtatcaagaatatccagatttgctaatttgataaagatagatgacgatgacaagactcctactggtgtatataattattttaaacctaaagatgccattcctgttatcatatctataggaaaggataaagatgtctgtgaactattaatctcatcagacatatcgtgtgcatgcgtggagttaaattcatatcacgtagccattcttcccatggatgtttccttttttaccaaaggaaatgcatcattgattattctcctgtttgatttctctatcgatgcggcacctctcttaagaagtgtaaccgataataatgttattatatctagacaccagcgtctacatgacgagcttccgagttccaattggttcaagttttacataagtataaagtccgactattgttctatattatatatggttgttgatggatctgtgatgcatgcgatagctgataatagaactcacgcaattattagcaaaaatatattagacaatactacgattaacgatgagtgtagatgctgttattttgaaccacagattaggattcttgatagagatgagatgctcaatggatcatcgtgtgatatgaacagacattgtattatgatgaatttacctgatgtaggcgaatttggatctagtatgttggggaaatatgaacctgacatgattaagattgctctttcggtggctggtaatttaataagaaatcgagactacattcccgggagacgaggatatagctactacgtttacggtatagcctctagataatttttttaagcacgaaataaaaaacataattttaaaccaatctatttcatactattttgtgtgatcaccatggacataaagatagatattagtatttctggtgataaatttacggtgactactaggagggaaaatgaagaaagaaaaaaatatctacctctccaaaaagaaaaaactactgatgttatcaaacctgattatcttgagtacgatgacttgttagatagagatgagatgtttactattctagaggaatattttatgtacagaggtctattaggcctcagaataaaatatggacgactctttaacgaaattaaaaaattcgacaatgatgcggaagaacaattcggtactatagaagaactcaagcagaaacttagattaaattctgaagagggagcagataactttatagattatataaaggtacaaaaacaggatatcgtcaaacttactgtatacgattgcatatctatgataggattgtgtgcatgcgtggtagatgtttggagaaatgagaaactgttttctagatggaaatattgtttacgagcgattaaactgtttattgatgatcacatgcttgataagataaaatctatactgcagaatagactagtatatgtggaaatgtcatagaaagttaaaagttaatgagagcaaaaatatataaggttgtattccatatttgttatttttttctgtaatagttagaaaaatacattcgatggtctatctatcagattattatgtgttataaggtactttttctcataataaactagagtatgagtaagatagtgtttttcaaaacatataaatctaaaattgatggatgagatatacagctattaatttcgaaaatatattttaatctgataactttaaacatggatttttaatggtggtttaacgttttaaaaaaagattttgttattgtagtatatgataatattaaaagatggatataaagaatttgctgactgcatgtactattttttacattactacattggctacggcagatatacctacttcgtcactgccacacgctccggtaaacggggcatgtgacgagggagaatatcttgataagaggcataatcaatgttgtaatcagtgtccacctggagaatttgccaaggttagatgtaatggtaacgataacacaaaatgtgaacgctgcccacctcatacatataccgcaatccccaattactctaatggatgtcatcaatgtagaaaatgcccaacaggatcatttgataaggtaaagtgtaccggaacacagaacagtaaatgttcgtgtcttcctggttggtattgcgctactgattcttcacagactgaagattgtcgagattgtataccaaaaaggagatgtccatgcggatactttggtggaatagatgaacaaggaaatcctatttgtaaatcgtgttgtgttggtgaatattgcgactacctacgtaattatagacttgatccatttcctccatgcaaactatctaaatgtaattaattatgattttgatgataatgttaccatacattatatcgctacttggttagtgtattattcagtatgaagacctattaataattacttatcttttgacgatcttgttataattataatataaaaatacttatggcatagtaactcataattgctgacgcgataaattcgtaataatctgttttgttcaaatttttataaggaatctacaggcataaaaataaaaatataatttataatatactcttacagcgcgccatcatgaataacagcagtgaattgattgctgttattaatggatttagaaatagtggacgattttgtgatattaatatagttattaatgatgaaaggataaacgctcacagactcatcctatctggagcctccgaatatttttccattctgttttccaataattttatcgattctaatgaatacgaagttaatctaagtcatttagattatcaaagtgttaacgatttgatcgattacatttatgggatacctttgagcctaactaacgataacgtgaaatatattctttcaaccgctgattttttacaaattggatctgctattacggagtgtgaaaattacatacttaaaaatctttgttctagaaactgtatcgatttctacatatacgctgataaatataataacaagaaaatagaatcagcgtcgtttaacacaatattacaaaatattttgagactcatcaacgatgaaaactttaaatacttaacagaggaatcaatgataaaaattttaagcgatgatatgttaaatataaaaaatgaggatttcgccccactaattctcattaaatggttagagagtactcaacaaccatgcaccgtcgagttacttaaatgcctcagaatatcattgctttccccacaagttataaaatcactttatagtcatcgactggttagttcaatctacgaatgtataacattcttaaacaatatagcattcttggatgaatcatttcctagataccatagcatcgagttgatatctatcggtataagtaattcgcatgataagatttccataaactgctacaatcataaaaaaaatacatgggaaatgatatcttcacgtagatataggtgtagtttcgcagtggccgtcctggataatattatctatatgatgggtggatatgatcagtccccgtatagaagttcaaaggttatagcgtacaatacatgtacaaattcttggatatatgatataccagagctaaaatatcctcgttctaattgtgggggactggctgatgacgaatacatttattgtataggcggcatacgcgatcaggattcatcgttgacatctagtattgatagatggaagccatcaaaaccatattggcagaagtatgctaaaatgcgcgaaccaaaatgtgatatgggggttgcgatgttaaacggattaatatatgttataggtggaatcgttaaaggtgacacgtgtaccgacgcactagagagtttatcagaagatggatggatgaagcatcaacgtcttccaataaaaatgtccaatatgtcgacgattgttcatgatggcaagatttatatatctggaggttacaacaatagtagtgtagttaatgtaatatcgaatctagtccttagctataattcgatatatgatgaatggaccaaattatcatcattaaacattcctagaattaatcccgctctatggtcagcgcataataaattatatgtaggaggaggaatatctgatgatgttcgaactaatacatctgagacatacgacaaagaaaaagattgttggacattggataatggtcacgtgttaccacgcaattatataatgtataaatgcgaaccgattaaacataaatatccattggaaaaaacacagtacacgaatgattttctaaagtatttggaaagttttataggtagttgatagaacaaaatacataattttgtaaaaataaatcactttttatactaatatgacacgattaccaatacttttgttactaatatcattagtatacgctacaccttttcctcagacatctaaaaaaataggtgatgatgcaactctatcatgtaatcgaaataatacaaatgactacgttgttatgagtgcttggtataaggagcccaattccattattcttttagctgctaaaagcgacgtcttgtattttgataattataccaaggataaaatatcttacgactctccatacgatgatctagttacaactatcacaattaaatcattgactgctagagatgccggtacttatgtatgtgcattctttatgacatcaactacaaatgacactgataaagtagattatgaagaatactccacagagttgattgtaaatacagatagtgaatcgactatagacataatactatctggatctacacattcaccggaaactagttctaagaaacctgattatatagataattctaattgctcgtcggtattcgaaatcggtacccggggatcagcttgcatgcctgcagcaattcccgaggctgtagccgacgatggtgcgccaggagagttgttgattcattgtttgcctccctgctgcggtttttcaccgaagttcatgccagtccagcgtttttgcagcagaaaagccgccgacttcggtttgcggtcgcgagtgaagatccctttcttgttaccgccaacgcgcaatatgccttgcgaggtcgcaaaatcggcgaaattccatacctgttcaccgacgacggcgctgacgcgatcaaagacgcggtgatacatatccagccatgcacactgatactcttcactccacatgtcggtgtacattgagtgcagcccggctaacgtatccacgccgtattcggtgatgataatcggctgatgcagtttctcctgccaggccagaagttctttttccagtaccttctctgccgtttccaaatcgccgctttggacataccatccgtaataacggttcaggcacagcacatcaaagagatcgctgatggtatcggtgtgagcgtcgcagaacattacattgacgcaggtgatcggacgcgtcgggtcgagtttacgcgttgcttccgccagtggcgcgaaatattcccgtgcaccttgcggacgggtatccggttcgttggcaatactccacatcaccacgcttgggtggtttttgtcacgcgctatcagctctttaatcgcctgtaagtgcgcttgctgagtttccccgttgactgcctcttcgctgtacagttctttcggcttgttgcccgcttcgaaaccaatgcctaaagagaggttaaagccgacagcagcagtttcatcaatcaccacgatgccatgttcatctgcccagtcgagcatctcttcagcgtaagggtaatgcgaggtacggtaggagttggccccaatccagtccattaatgcgtggtcgtgcaccatcagcacgttatcgaatcctttgccacgcaagtccgcatcttcatgacgaccaaagccagtaaagtagaacggtttgtggttaatcaggaactgttcgcccttcactgccactgaccggatgccgacgcgaagcgggtagatatcacactctgtctggcttttggctgtgacgcacagttcatagagataaccttcacccggttgccagaggtgcggattcaccacttgcaaagtcccgctagtgccttgtccagttgcaaccacctgttgatccgcatcacgcagttcaacgctgacatcaccattggccaccacctgccagtcaacagacgcgtggttacagtcttgcgcgacatgcgtcaccacggtgatatcgtccacccaggtgttcggcgtggtgtagagcattacgctgcgatggattccggcatagttaaagaaatcatggaagtaagactgctttttcttgccgttttcgtcggtaatcaccattcccggcgggatagtctgccagttcagttcgttgttcacacaaacggtgatacgtacacttttcccggcaataacatacggcgtgacatcggcttcaaatggcgtatagccgccctgatgctccatcacttcctgattattgacccacactttgccgtaatgagtgaccgcatcgaaacgcagcacgatacgctggcctgcccaacctttcggtataaagacttcgcgctgataccagacgttgcccgcataattacgaatatctgcatcggcgaactgatcgttaaaactgcctggcacagcaattgcccggctttcttgtaacgcgctttcccaccaacgctgatcaattccacagttttcgcgatccagactgaatgcccacaggccgtcgagttttttgatttcacgggttggggtttctacaggacgtaacattctagtcgaggaattcatttatagcatagaaaaaaacaaaatgaaattctactatatttttacatacatatattctaaatatgaaagtggtgattgtgactagcgtagcatcgcttctagacatctatatactatatagtaataccaatactcaagactacgaaactgatacaatctcttatcatgtgggtaatgttctcgatgtcgatagccatatgcccggtagttgcgatatacataaactgatcactaattccaaacccacccgctttttatagtaagtttttcacccataaataataaatacaataattaatttctcgtaaaagtagaaaatatattctaatttattgcacggtaaggaagtagaatcataaagaacagtgacggatccccgatccccgacctgcaggcatgcaagctcgactccggaaccaattactgataatgtagaagatcatacagacaccgtcacatacactagtgatagcattaatacagtaagtgcatcatctggagaatccacaacagacgagactccggaaccaattactgataaagaagatcatacagttacagacactgtctcatacactacagtaagtacatcatctggaattgtcactactaaatcaaccaccgatgatgcggatctttatgatacgtacaatgataatgatacagtaccaccaactactgtaggcggtagtacaacctctattagcaattataaaaccaaggactttgtagaaatatttggtattaccgcattaattatattgtcggccgtggcaattttctgtattacatattatatatataataaacgttcacgtaaatacaaaacagagaacaaagtctagatttttgacttacataaatgtctgggatagtaaaatctatcatattgagcggaccatctggtttaggaaagacagccatagccaaaagactatgggaatatatttggatttgtggtgtcccataccactagatttcctcgtcctatggaacgagaaggtgttgattaccattacgttaacagagaggccatctggaagggaatagccgccggaaactttctagaacatactgagtttttaggaaatatttacggaacttctaaaacagctgtgaatacagcggctattaataatcgtatttgtgtgatggatctaaacatcgacggtgttagaagtcttaaaaatacgtacctaatgccttactcggtgtatataagacctacctctcttaaaatggttgagaccaagcttcgtcgtagaaacactgaagctaacgatgagattcatcgtcgtgtgatgttggcaaaaactgacatggatgaggcaggtgaagccggtctattcgacactattatcattgaagatgatgtgaatttagcatatagtaagttaattcagatactacaggaccgtattagaatgtattttaacactaattagagacttaagacttaaaacttgataattaataatataactcgtttttatatgtgtctatttcaacgtctaatgtattagttaaatattaaaacttaccacgtaaaacttaaaatttaaaatgatatttcattgacagatagatcacacattatgaactttcaaggacttgtgttaactgacaattgcaaaaatcaatgggtcgttggaccattaataggaaaaggtggattcggtagtatttatactactaatgacaataattatgtagtaaaaatagagcccaaagctaacggatcattatttaccgaacaggcattttatactagagtacttaaaccatccgttatcgaagaatggaaaaaatctcacaatataaagcacgtaggtcttatcacgtgcaaggcatttggtctatacaaatccattaatgtggaatatcgattcttggtaattaatagattaggtgcagatctagatgcggtgatcagagccaataataatagactaccaaaaaggtcggtgatgttgatcggaatcgaaatcttaaataccatacaatttatgcacgagcaaggatattctcacggagatattaaagcgagtaatatagtcttagatcaaatagataagaataaattatatctagtggattacggattggtttctaaattcatgtctaatggcgaacatgttccatttataagaaatccaaataaaatggataacggtactctagaatttacacctatagattcgcataaaggatacgttgtatctagacgtggagatctagaaacacttggatattgtatgattagatggttgggaggtatcttaccatggactaagatatctgaaacaaagaattgtgcattagtaagtgccacaaaacagaaatatgttaacaatactgcgactttgttaatgaccagtttgcaatatgcacctagagaattgctgcaatatattaccatggtaaactctttgacatattttgaggaacccaattacgacaagtttcggcacatattaatgcagggtgtatattattaagtgtggtgtttggtcgataaaaattaaaaaataacttaatttattattgatctcgtgtgtacaaccgaaatcatggcgatgttttacgcacacgctctcggtgggtacgacgagaatcttcatgcctttcctggaatatcatcgactgttgccaatgatgtcaggaaatattctgttgtgtcagtttataataacaagtatgacattgtaaaagacaaatatatgtggtgttacagtcaggtgaacaagagatatattggagcactgctgcctatgtttgagtgcaatgaatatctacaaattggaaatccgatccatgatcaagaaggaaatcaaatctctatcatcacatatcgccacaaaaactactatgctctaagcggaatcgggtacgagagtctagacttgtgtttggaaggagtagggattcatcatcacgtacttgaaacaggaaacgctgtatatggaaaagttcaacatgattattctactatcaaagagaaggccaaagaaatgagtgcacttagtccaggacctatcatcgattaccacgtctggataggagattgtatctgtcaagttactgctgtggacgtacatggaaaggaaattatgaaaatgagattcaaaaagggtgcggtgcttccgatcccaaatctggtaaaagttaaacttggggagaatgatacagaaaatctttcttctactatatcggcggcaccatcgaggtaaccacctctctggaagacagcgtgaatcatgtactcatgaaacgtttggaaactatacgccatatgtggtctgttgtatatgatcattttgatattgtgaatggtaaagaatgctgttatgtgcatacgcattcatctaatcaaaatcctataccgagtactgtaaaaacaaatttgtacatgaagactatgggatcatgcattcaaatggattccatggaagctctagagtatcttagcgaactgaaggaatcaggtggatggagtcccagaccagaaatgcaggaatttgaatatccagatggagtggaagacactgaatcaattgagagattggcagaggagttcttcaatagatcagaacttcaggctggtgaatcagtcaaatttggtaattctattaattgttaaacatacatctgtttcagctaagcaactaagaacacgtatacggcagcagcttccttctatactctcatcttttaccaacacaaagggtggatatttgttcattggagttgataataatacacacaaagtatttggattcacggtgggttacgactacctcagactgatagagaatgatatagaaaagcatatcaaaagacttcgtgttgtgcatttctgtgagaagaaagaggacatcaagtacgcgtgtcgattcatcaaggtatataaacctggggatgagactacctcgacatacgtgtgcgctatcaaagtggaaagatgctgttgtgctgtgtttgcagattggccagaatcatggtatatggatactaatggtatcaagaagtattctccagatgaatgggtgtcacatataaaattttaattaatgtaactatagagaacaaataataaggttgtaatatcatatagacaataactaacaattaattagtaactgttatctcttttttaactaaccaactaactatatacctattaatacatcgtaattatagttcttaacatctattaatcattaattcgcttctttaattttttataaactaacattgttaattgaaaagggataacatgttacagaatataaattatatatggatttttttaaaaaggaaatacttgactggagtatatatttatctcttcattatatagcacgcgtgttttccaatttttccacatcccatataatacaggattataatctcgttcgaacatacgagaaagtggataaaacaatagttgattttttatctaggttgccaaatttattccatattttagaatatggggaaaatattctacatatttattctatggatgatgctaatacgaatattataattttttttctagatagagtattaaatattaataagaacgggtcatttatacacaatctcgggttatcatcatccattaatataaaagaatatgtatatcaattagttaataatgatcatccagataataggataagactaatgcttgaaaatggacgtagaacaagacattttttgtcctatatatcagatacagttaatatctatatatgtattttaataaatcatggattttatatagatgccgaagacagttacggttgtacattattacatagatgtatatatcactataagaaatcagaatcagaatcatacaatgaattaattaagatattgttaaataatggatcagatgtagataaaaaagatacgtacggaaacacaccttttatcctattatgtaaacacgatatcaacaacgtggaattgtttgagatatgtttagagaatgctaatatagactctgtagactttaatagatatacacctcttcattatgtctcatgtcgtaataaatatgattttgtaaagttattaatttctaaaggagcaaatgttaatgcgcgtaataaattcggaactactccattttattgtggaattatacacggtatctcgcttataaaactatatttggaatcagacacagagttagaaatagataatgaacatatagttcgtcatttaataatttttgatgctgttgaatctttagattatctattatccagaggagttattgatattaactatcgtactatatacaacgaaacatctatttacgacgctgtcagttataatgcgtataatacgttggtctatctattaaacaaaaatggtgattttgagacgattactactagtggatgtacatgtatttcggaagcagtcgcaaacaacaacaaaataataatggaagtactattgtctaaacgaccatctttgaaaattatgatacagtctatgatagcaattactaaacataaacagcataatgcagatttattgaaaatgtgtataaaatatactgcgtgtatgaccgattatgatactcttatagatgtacagtcgctacagcaatataaatggtatattttaagatgtttcgatgaaatagatatcatgaagagatgttatataaaaaataaaactgtattccaattagttttttgtatcaaagacattaatactttaatgagatacggtaaacatccttctttcgtgaaatgcactagtctcgacgtatacggaagtcgtgtacgtaatatcatagcatctattagatatcgtcagagattaattagtctattatccaagaagctggatcctggagataaatggtcgtgttttcctaacgaaataaaatataaaatattggaaaactttaacgataacgaactatccacatatctaaaaatcttataaacattattaaaatataaaatctaagtaggataaaatcacactacatcattgtttccttttagtgctcgacagtgtatactatttttaacgctcataaataaaaatgaaaacgatttccgttgttacgttgttatgcgtactacctgctgttgtttattcaacatgtactgtacccactatgaataacgctaaattaacgtctaccgaaacatcgtttaatgataaccagaaagttacgtttacatgtgatcagggatatcattctttggatccaaatgctgtctgtgaaacagataaatggaaatacgaaaatccatgcaaaaaaatgtgcacagtttctgattatgtctctgaactatataataaaccgctatacgaagtgaattccaccatgacactaagttgcaacggcgaaacaaaatattttcgttgcgaagaaaaaaatggaaatacttcttggaatgatactgttacgtgtcctaatgcggaatgtcaacctcttcaattagaacacggatcgtgtcaaccagttaaagaaaaatactcatttggggaatatatgactatcaactgtgatgttggatatgaggttattggtgcttcgtacataagttgtacagctaattcttggaatgttattccatcatgtcaacaaaaatgtgatatgccgtctctatctaacggattaatttccggatctacattttctatcggtggcgttatacatcttagttgtaaaagtggttttacactaacggggtctccatcatccacatgtatcgacggtaaatggaatcccatactcccaatatgtgtacgaactaacgaaaaatttgatccagtggatgatggtcccgacgatgagacagatttgagcaaactctcgaaagacgttgtacaatatgaacaagaaatagaatcgttagaagcaacttatcatataatcatagtggcgttgacaattatgggcgtcatatttttaatctccgttatagtattagtttgttcctgtgacaaaaataatgaccaatataagttccataaattgctaccgtaaatataaatccgttaaaataattaataatttaataacaaacaagtatcaaaagattaaagacttatagctagaatcaattgagatgtcttcttcagtggatgttgatatctacgatgccgttagagcatttttactcaggcactattataacaagagatttattgtgtatggaagaagtaacgccatattacataatatatacaggctatttacaagatgcgccgttataccgttcgatgatatagtacgtactatgccaaatgaatcacgtgttaaacaatgggtgatggatacacttaatggtataatgatgaatgaacgcgatgtttctgtaagcgttggcaccggaatactattcatggaaatgtttttcgattacaataaaaatagtatcaacaatcaactaatgtatgatataattaatagcgtatctataattctagctaatgagagatatagaagcgcttttaacgacgatggtatatacatccgtagaaatatgattaacaagttgtacggatacgcatctctaactactattggcacgatcgctggaggtgtttgttattatctgttgatgcatctagttagtttgtataaataattatttcaatatactagttaaaattttaagattttaaatgtataaaaaactaataacgtttttatttgtaataggtgcattagcatcctattcgaataatgagtacactccgtttaataaactgagtgtaaaactctatatagatggagtagataatatagaaaattcatatactgatgataataatgaattggtgttaaattttaaagagtacacaatttctattattacagagtcatgcgacgtcggatttgattccatagatatagatgttataaacgactataaaattattgatatgtataccattgactcgtctactattcaacgcagaggtcacacgtgtagaatatctaccaaattatcatgccattatgataagtacccttatattcacaaatatgatggtgatgagcgacaatattctattactgcagagggaaaatgctataaaggaataaaatatgaaataagtatgatcaacgatgatactctattgagaaaacatactcttaaaattggatctacttatatatttgatcgtcatggacatagtaatacatattattcaaaatatgatttttaaaaatttaaaatatattatcacttcagtgacagtagtcaaataacaaacaacaccatgagatatattataattctcgcagttttgttcattaatagtatacatgctaaaataactagttataagtttgaatccgtcaattttgattccaaaattgaatggactggggatggtctatacaatatatcccttaaaaattatggcatcaagacgtggcaaacaatgtatacaaatgtaccagaaggaacatacgacatatccgcatttccaaagaatgatttcgtatctttctgggttaaatttgaacaaggcgattataaagtggaagagtattgtacgggactatgcgtcgaagtaaaaattggaccaccgactgtaacattgactgaatacgacgaccatatcaatttgtacatcgagcatccgtatgctactagaggtagcaaaaagattcctatttacaaacgcggtgacatgtgtgatatctacttgttgtatacggctaacttcacattcggagattctaaagaaccagtaccatatgatatcgatgactacgattgcacgtctacaggttgcagcatagactttgtcacaacagaaaaagtgtgcgtgacagcacagggagccacagaagggtttctcgaaaaaattactccatggagttcgaaagtatgtctgacacctaaaaagagtgtatatacatgcgcaattagatccaaagaagatgttcccaatttcaaggacaaaatggccagagttatcaagagaaaatttaatacacagtctcaatcttatttaactaaatttctcggtagcacatcaaatgatgttaccacttttcttagcatgcttaacttgactaaatattcataactaatttttattaatgatacaaaaacgaaataaaactgcatattatacactggttaacgcccttataggctctaaccattttcaagatgaggtccctgattatagtccttctgttcccctctatcatctactccatgtctattagacgatgtgagaagactgaagaggaaacatggggattgaaaatagggttgtgtataattgccaaagatttctatcccgaaagaactgattgcagtgttcatctcccaactgcaagtgaaggattgataactgaaggcaatggattcagggatatacgaaacaccgataaattataaaaaaagcaatgtgtccgctgtttccgttaataatactattttcgtaactggcggattattcataaataactctaatagcacgatcgtggttaacaatatggaaaaacttgacatttataaagacaaacaatggtcgattatagaaatgcctatggctagggtatatcacggcattgactcgacatttggaatgttatattttgccggaggtctatccgttaccgaacaatatggtaatttagagaaaaacaacgagatatcttgttacaatcctagaacgaataagtggtttgatatttcatatactatttataagatatccatatcatcattgtgtaaactaaataacgtcttctatgtatttagtaaggacattggatatgtggaaaagtatgatggtgcatggaagttagtacatgatcgtctccccgctataaaggcattatcaacttctccttattgattgaaaatgaaaatataaatagtttttatgtatagcagtattaccctatagttttattgcttactactaacatggatacagatgttacaaatgtagaagatatcataaatgaaatagatagagagaaagaagaaatactaaaaaatgtagaaattgaaaataataaaaacattaacaagaatcatcccaatgaatatattagagaagcactcgttattaataccagtagtaatagtgattccattgataaagaagttatagaatgtatcagtcacgatgtaggaatatagatcatatctactaatttttataatcgatacaaaacataaaaaacaactcgttattacatagcaggcatggaatccttcaagtattgttttgataacgatggcaagaaatggattatcggaaatactttatattctggtaattcaatactctataaggtcagaaaaaatttcactagttcgttctacaattacgtaatgaagatagatcacaaatcacacaagccattgttgtctgaaatacgattctatatatctgtattggatcctttgactatcgacaactggacacgggaacgtggtataaagtatttggctattccagatctgtatggaattggagaaaccgatgattatatgttcttcgttataaagaattcgggaagagtattcgccccaaaggatactgaatcagtcttcgaagcatgcgtcactatgataaacacgttagagtttatacactctcgaggatttacccatggaaaaatagaaccgaggaatatactgattagaaataaacgtctttcactaattgactattctagaactaacaaactatacaagagtggaaactcacatatagattacaacgaggacatgataacttcaggaaatatcaattatatgtgtgtagacaatcatcttggagcaacagtttcaagacgaggagatttagaaatgttgggatattgcatgatagaatggttcggtggcaaacttccatggaaaaacgaaagtagtataaaagtaataaaacaaaaaaaagaatataaaaaatttatagctactttctttgaggactgttttcctgaaggaaatgaacctctggaattagttagatatatagaattagtatacacgttagattattctcaaactcctaattatgacagactacgtaaactgtttatacaagattgaaattatattcttttttttatagagtgtggtagtgttacggatatctaatattaatattagactatctctatcgcgctacacgaccaatatcgattactatggatatcttctatgaaaggagagaatgtatttatttctccagcgtcaatctcgtcagtattgacaatactgtattatggagctaatggatccactgctgaacagctatcaaaatatgtagaaacggaggagaacacggataaggttagcgctcagaatatctcattcaaatccatgaataaagtatatgggcgatattctgccgtgtttaaagattcctttttgagaaaaattggcgataagtttcaaactgttgacttcactgattgtcgcactatagatgcaatcaacaagtgtgtagatatctttactgaggggaaaatcaatccactattggatgaaccattgtctcctagcaattagtgccgtatactttaaagcaaaatggttgacgccattcgaaaaggaatttaccagtgattatcccttttacgtatctccgacggaaatggtagacgtaagtatgatgtctatgtacggcaaggcatttaatcacgcatctgtaaaagaatcattcggcaacttttcaatcatagaactgccatatgttggagatactagtatgatggtcattcttccagacaagattgatggattagaatccatagaacaaaatctaacagatacaaattttaagaaatggtgtgactttatggatgctatgtttatagatgttcacattcccaagtttaaggtaacaggctcgtataatctggtggatactctagtaaagtcaggactgacagaggtgttcggttcaactggagattatagcaatatgtgtaatttagatgtgagtgtcgacgctatgatccacaaaacgtatatagatgtcaatgaagagtatacagaagcagctgcagcaacttctgtactagtggcagactgtgcatcaacaattacaaatgagttctgtgcagatcatccgttcatctatgtgattaggcatgttgatggaaaaattcttttcgttggtagatattgctctccgacaactaattgttaaccattttttttaaaaaaaatagaaaaaacatgtggtattagtgcaggtcgttgttcttccaattgcaattggtaagatgacggccaactttagtacccacgtcttttcaccacagcactgtggatgtgacagactgaccagtattgatgacgtcaaacaatgtttgactgaatatatttattggtcgtcctatgcataccgcaacaggcaatgcgctggacaattgtattccacactcctctcttttagagatgatgcggaattagtgttcatcgacattcgcgagctggtaaaaaatatgccgtgggatgatgtcaaagattgtacagaaatcatccgttgttatataccggatgagcaaaaaaccatcagagagatttcggccatcatcggactttgtgcatatgctgctacttactggggaggtgaagaccatcccactagtaacagtctgaacgcattgtttgtgatgcttgagatgctaaattacgtggattataacatcatattccggcgtatgaattgatgagttgtacatcttgacattttctttcttctcttctccctttcttctcttctcccttcctccctcttctccctttcccagaaacaaacttttttacccactataaaataaaatgagtatactacctattatatttcttcctatatttttttattcttcattcgttcagacttttaacgcgtctgaatgtatcgacaaagggcaatattttgcatcattcatggagttagaaaacgagccagtaatcttaccatgtcctcaaataaatacgctatcatccggatataatatattagatattttatgggaaaaacgaggagcggataatgatagaattataccgatagataatggtagcaatatgctaattctgaacccgacacaatcagactctggtatttatatatgcattaccacgaacgaaacctactgtgacatgatgtcgttaaatttgacaatcgtgtctgtctcagaatcaaatatagatcttatctcgtatccacaaatagtaaatgagagatctactggcgaaatggtatgtcccaatattaatgcatttattgctagtaacgtaaacgcagatattatatggagcggacatcgacgccttagaaataagagacttaaacaacggacacctggaattattaccatagaagatgttagaaaaaatgatgctggttattatacatgtgttttagaatatatatacggtggcaaaacatataacgtaaccagaattgtaaaattagaggtacgggatagaataataccttctactatgcaattaccagatggcattgtaacttcaataggtagtaatttgactattgcatgcagagtatcgttgagacctcccacaacggacaccgacgtcttttggataagtaatggtatgtattacgaagaagatgatggggacggaaacggtagaataagtgtagcaaataaaatctatatgaccgataagagacgtgttattacatcccggttaaacattaatcctgtcaaggaagaagatgctacaacgtttacgtgtatggcgtttactattcctagcatcagcaaaacagttactgttagtataacgtgaatgtatgttgttacatttccatgtcaattgagtttataagaatttttatacattatcttccaacaaacaattgacgaacgtattgctatgattaactcccacgatactatgcatattattaatcattaacttgcagactatacctagtgctattttgacatactcgtgttcttgtgtaattgcggtatctatattattaaagtacgtaaatctagctatagttttattatttaattttagataatataccgtctccttatttttaaaaattgccacatcctttattaaatcatgaatgggaatttctatgtcatcgttagtatattgtgaacaacaagagcagatatctataggaaagggtggaatgcgatacattgatctatgtagttttaaaacacacgcgaactttgaagaatttatataaatcattccatcgatacatccttctatgttgacatgtatatatccaggaattcttttattaatgtcaggaaatgtataaactaaaacattgcccgaaagcggtgcctctatctgcgttatatccgttcttaacttacaaaatgtaaccaatacctttgcatgacttgttttgttcggcaacgttagtttaaacttgacgaatggattaattacaatagcatgatccgcgcatctattaagtttttttactttaacgcccttgtatgtttttacagagactttatctaaatttctagtgcttgtatgtgttataaatataacgggatatagaaccgaatcacctaccttagatacccaattacattttatcagatccagataataaacaaattttgtcgccctaactaattctatattgttatatattttacaattggttatgatatcatgtaataacttggagtctaacgcgcatcgtcgtacgtttatacaattgtgatttagtgtagtatatctacacatgtatttttccgcactatagtattctggactagtgataaaactatcgttatatctgtcttcaatgaactcatcgagatattgctctctgtcatattcatacacctgcataaactttctagacatcttacaatccgtgttattttaggatcatatttacatatttacgggtatatcaaagatgttagattagttaatgggaatcgtctataataatgaatattaaacaattatatgaggacttttaccacaaagcatcataaaaatgagtcgtcgtctgatttatgttttaaatatcaaccgcaaatcaactcataaaatacaagagaatgaaatatatacatattttagtcattgcaatatagaccatacttctacagaacttgattttgtagttaaaaactatgatctaaacagacgacaacctgtaactgggtatactgcactacactgctatttgtataataattactttacaaacgatgtactgaagatattattaaatcatgacgtaaatgtaacgatgaaaaccagtagcggacgtatgcctgtttatatattgcttactagatgttgtaatatttcacatgatgtagtgatagatatgatagacaaagataaaaaccacttattacatagagactattccaacctattactagagtatataaaatctcgttacatgttattgaaggaagaggatatcgatgagaacatagtatccactttattagataagggaatcgatcctaactttaaacaagacggatatacagcgttacattattattatttgtgtctcgcacacgtttataaactaggtgagtgtagaaaaccgataacgataaaaaaggccaagcgaattatttctttgtttatacaacatggagctaatctaaacgcgttagataattgtggtaatacaccattccatttgtatcttagtattgaaatgtgtaataatattcatatgactaaaatgctgttgacttttaatccgaatttcaaaatatgtaataatcatggattaacgcctatactatgttatataacttccgactacatacaacacgatattcttgttatgttaatacatcactatgaaacaaatgttggagaaatgccgatagatgagcgtcgtatgatcgtattcgagtttatcaaaacatattctacacgtccggcagattcgataacttatttgatgaataggtttaaaaatataaatatttatacccgctatgaaggaaagacattattacacgtagcatgtgaatataataatacacaagtaatagattatcttatacgtatcaacggagatataaatgcgttaaccgacaataacaaacacgctacacaactcattatagataacaaagaaaattccccatataccattaattgtttactgtatatacttagatatattgtagataagaatgtgataagatcgttggtggatcaacttccatctctacctatcttcgatataaaatcatttgagaaattcatatcctactgtatacttttagatgacacattttacgataggcacgttaagaatcgcgattctaaaacgtatcgatacgcattttcaaaatacatgtcgtttgataaatacgatggtataataactaaatgtcacgacgaaacaatgttactcaaactgtccactgttctagacactacactatatgcagttttaagatgtcataattcgagaaagttaagaagatacctcaacgagttaaaaaaatataataacgataagtcctttaaaatatattctaatattatgaatgagagataccttaatgtatattataaagatatgtacgtgtcaaaggtatatgataaactatttcctgttttcacagataaaaattgtctactaacattactaccttcagaaattatatacgaaatattatacatgctgacaattaacgatctttataatatatcgtatccacctaccaaagtatagttgtatttttctcatgcgatgtgtgtaaaaaaactgatattatataaatattttagtgccgtataataaagatgacgatgaaaatgatggtacatatatatttcgtatcattattgttattgctattccacagttacgccatagacatcgaaaatgaaatcacagaattcttcaataaaatgagagatactctaccagctaaagactctaaatggttgaatccagcatgtatgttcggaggcacaatgaatgatatagccgctctaggagagccattcagcgcaaagtgtcctcctattgaagacagtcttttatcgcacagatataaagactatgtggttaaatgggagaggctagaaaagaatagacggcgacaggtttctaataaacgtgttaaacatggtgatttatggatagccaactatacatctaaattcagtaaccgtaggtatttgtgcaccgtaactacaaagaatggtgactgtgttcagggtatagttagatctcatattaaaaaacctccttcatgcattccaaaaacatatgaactaggtactcatgataagtatggcatagacttatactgtggaattctttacgcaaaacattataataatataacttggtataaagataataaggaaattaatatcgacgacattaagtattcacaaacgggaaaggaattaattattcataatccagagttagaagatagcggaagatacgactgttacgttcattacgacgacgttagaatcaagaatgatatcgtagtatcaagatgtaaaatacttacggttataccgtcacaagaccacaggtttaaactaatactagatccgaaaatcaacgtaacgataggagaacctgccaatataacatgcactgctgtgtcaacgtcattattgatcgacgatgtactgattgaatgggaaaatccatccggatggcttataggattcgattttgatgtatactctgttttaactagtagaggcggtatcaccgaggcgaccttgtactttgaaaatgttactgaagaatatataggtaatacatataaatgtcgtggacacaactattattttgaaaaaacccttacaactacagtagtattggagtaaatatacaatgcatttttatatacattactgaattattattactgaattattattactgaattattattaattatatcgtatttgtgctatagaatggatgaagatacgcgactatctaggtatttgtatctcaccgatagagaacatataaatgtagactctattaaacagttgtgtaaaatatcagatcctaatgcatgttatagatgtggatgtacggctttacatgagtacttttataattatagatcagtcaacggaaaatacaagtatagatacaacggttactatcaatattattcatctagcgattatgaaaattataatgaatattattatgatagaactggtatgaacagtgagagtgataatatatcaatcaaaacagaatatgaattctatgatgaaacacaagatcaaagtacacaactagtaggttacgacattaaactcaaaaccaatgaggatgattttatggctatgatagatcagtgggtgtccatgattatatagatgaatcaattaataaagtagtatatggaagagagtctcacgtaagatggcgggatatatggcaagaacataatgatggcgtatacagtataggaaaggagtgcatagataatatatacgaagacaaccataccgtagacgaattctacaagatagacagcgtatcagatgtagatgacgcggaacacatatctccgataactaaaaaaccatagaatcagttgatgataatacctacatttctaatcttccgtataccatcaaatacaaaatattcgagcaacaataagtattttttatacctttaaaactgataaataaattttttctagtgatattttggcaagatgagaatcctatttctcatcgctttcatgtatgggtgtgttcactcatatgttaacgcggttgaaaccaaatgtccaaatctagacattgtaacatcttctggagaatttcattgttcaggatgtgtggaacatatgcctgagtttagctatatgtattggttggcaaaggatatgaaatcggacgaggataccaagtttatagaacatctgggtgatggcatcaaagaagatgaaaccgttcgtaccacagatagtggaatcgtcactctacgtaaagtccttcatgtgactgatactaataaatttgataattataggttcacttgtgtcctcgctacgctagatggcatttataaaaagaatgtttgctgaagtagttgtgtgctactatttttatttatgatataatctaatggaattaatttgaattgatatttatccaatactaaagattatattagaatcaaattaatcttttatacgagaaaaaataacgacatacgtcgtcaacaaattaaactttttatttattagttaactagcttatagaacttgctcattgttatgtttctaaaacgggtacggcatataggacaattatccgacgcaccggtttctcttcgtgttctatgccatatattgatgcatgttatgcaaaatatatgagtacacgaatccaataaaccaaagtatctatcgttttgagtaaacaacttcatagcaaattccacattctttttctttacttactctatacacgtcctcgtatttatttagtattttgatgatatccaactcagaaatggttgttgtattattgggtgtatttggagtataggtattattagctatgtaccaatttaccaaccctcttaatattgattgataatcacatcggttatccaattaataactaaattgtagtgtatatatagaccatatatgtttctatttttttgacagttacgtatagtttcagtaagttttgattgttgtattcctgtatctctagataagttagtcatatagtcccttccggcgatacgttttttccaagcccgaaattgattagccaaatgtgtatttatttttgtgatattgatataatatttcggataatgcatactgttagtcttatatcatttggttcatctatgtattgtaatattgttacatgatctatagatgatgtattgattttggcaggatcgaattccatatccgcgactaaacagtgaaaaaaatgtaaatactttttaaattttaaattagtaaaacttttttttattttttatgattccaaaaatactgaatacaaagtcctaaattataaatatggagatcatactaccacaacttattattatgtatacaaggccggtgtaatagatagatatatataattctattacaccggcagacaattaccgaccggtatttgtcgttaccaacataccgtataatatgtaatatacaattccataacccattgacagttgttatacatcaaaattgcaattcttttgattacgatgttataagaatgtagttaattgatgtatgatgttaatgtgtcctctttcctcttataacatcgtaatcaaaaacttttttataatatatacctaataatgtgtcttaatagttctcgtgattcgtcaaacaatcattcttataaaatataataaagcaacgtaaaaacacataaaaataagcgtaactaataagacaatggatatttacgacgataaaggtctacagactattaaactgtttaataatgaatttgattgtataaggaatgacatcagagaattatttaaacatgtaactgattccgatagtatacaacttccgatggaagacaattctgatattatagaaaatatcagaaaaatactatatagacgattaaaaaatgtagaatgtgttgacatcgataacacaataacttttatgaaatacgatccaaatgatgataataagcgtacgtgttctaattgggtacccttaactaataactatatggaatattgtctagtaatatatttggaaacaccgatatgtggaggcaaaataaaattataccaccctacaggaaatataaagtcggataaggatattatgtttgcaaagactctagactttaaatcaacgaaagtgttaactggacgtaaaacaattgccgttctagacatatccgtttcatataatagatcaatgactactattcactacaacgacgacgttgatatagatatacatactgataaaaatggaaaagagttatgttattgttatataacaatagatgatcattacttggttgatgtggaaactataggagttatagtcaatagatctggaaaatgtctgttagtaaataaccatctaggtataggtatcgttaaagataaacgtataagcgatagttttggagatgtatgtatggatacaatatttgacttttctgaagcacgagagttattttcattaactaatgatgataacaggaatatagcatgggacactgataaactagacgatgatacagatatatggactcccgtcacagaagatgattacaaatttctttctagactagtattgtatgcaaaatctcaatcggatactgtatttgactattatgttcttactggtgatacggaaccacccactgtattcattttcaaggtaactagattttactttaatatgccgaaataaaaaatttttgtataatatctagaggtagaggtattgtttagataaatacaaataacatagatacatcgcatacttagcatttttataaatatacataagacatacactttatacatttttgtaaaaatactcataaaaaaatttataaaaattatggcacaaccatatcttgtataggtagtttagttcgtcgagtgaacctataaacagataatagacaacacataataatgcctactaatacaagcataataccgggagatgggatatatgacgttgtagtgtttgggttttctgaacgttgatagtctactaatactacatgctgacatctaatgcctgtataaccatgagagcatctacaatacataccgtcaatatctctagcgtggatacagtcaccgtgtaaacaatatccatctccctctggaccgcataatctgatagctggaatatctgttgtagcgtttgtaatttctggcaatgtcgtttcgatagcgttaccactatcggcgaatgatctgattatcatagcagcgaacaacaacatcagataatttatcaacatttttgatggattctgtgtttatgctgtttctcagtgtgtgtttatgacaagattgggaattttatattattaattcagtaatataaactaataatatattgttaattgtgtaaataatataaaaataacaatacaatattgaatgtgttgctgttaaaaatgtatgtgttaatataatagaataaaataaatgagtatgatcattttagataacgattgattttatcattaccgcttcattcttatattctttgcttacggaacctatatttagaaacatctactaacaattttttatgcttgcattattaatggtatgtaatatgattgattgtgtacgcaataccaatttgttaagtatgaatacggggtacaaacataaattgaaatttaacattatttatttatgatatatatcgttatcgttaggtctataccatggatatctttaaagaactaatcttaaaacaccctgatgaaaatgttttgatttctccagtttccattttatctactttatctattctaaatcatggagcagctggttctacagctgaacaactatcaaaatatatagagaatatgaatgagaatacacccgatgacaataatgatgacatggaggtagatattccgtattgtgcgacactagctaccgcaaataaaatatacggtagcgatagtatcgagttccacgcctccttcctacaaaaaataaaagacgattttcaaactgtaaactttaataatgctaaccaaacaaaggaactaatcaacgaatgggttaagacaatgacaaatggtaaaattaattccttattgactagtccgctatccattaatactcgtatgacagttgttagcgccgtccattttaaagcaatgtggaaatatccattttctaaacatcttacatatacagacaagttttatatttctaagaatatagttaccagcgttgatatgatggtgggtaccgagaataacttgcaatatgtacatattaatgaattattcggaggattctctattatcgatattccatacgagggaaactctagtatggtaattatactaccggacgacatagaaggtatatataacatagaaaaaaatataacagatgaaaaatttaaaaaatggtgtggtatgttatctactaaaagtatagacttgtatatgccaaagtttaaagtggaaatgacagaaccgtataatctggtaccgattttagaaaatttaggacttactaatatattcggatattatgcagattttagcaagatgtgtaatgaaactatcactgtagaaaaatttctacatacgacgtttatagatgttaatgaggagtatacagaagcatcggccgttacaggagtatttacgattaacttttcgatggtatatcgtacgaaggtctacataaaccatccattcatgtacatgattaaagacaccacaggacgtatactttttatagggaaatactgctatccgcaataaatataaacaaatagacttttataaagagtcttcaacgataagtatatcgacatactacttatgctgcgaaagattctgaacgagaacgactatctcaccctcttggatcatatccgcactgctaaatactaaatctccactacactttttatcatcttatgaggaatgattgccttcgtgaaataggaataattagcaccagaatagctatggattattgtggtagagagtgcactattctatgtcgtctactggatgaagatgtgacgtacaaaaaaataaaactagaaattgaaacgtgtcacaacttatcaaaacatatagatagacgaggaaacaatgcgctacattgttacgtctccaataaatgcgatacagacattaagattgttctctcgcggagtcgagagactttgtagaaacaacgaaggattaactccgctaggagtatacagtaagcatagatacgtaaaatctcagattgtgcatctactgatatccagctattcaaattcctctaacgaactcaagtcgaatataaatgatttcgatctgtattcggataatatcgacttacgtctgctaaaatacctaattgtggataaacggatacgtccgtccaagaatacgaattatgcaatcaatggtctcggattggtggatatatacgtaacgacgcctaatccgagaccagaagtattgctatggcttcttaaatcagaatgttacagcaccggttacgtatttcgtacctgtatgtacgacagtgatatgtgtaagaactctcttcattactatatatcgtctcatagagaatctcaatctctatccaaggatgtaattaaatgtttgatcgataacaatgtttccatccatggcagagacgaaggaggatctttacccatccaatactactggtctttctcaaccatagatatagagattgttaaattattattaataaaggatgtggacacgtgtagagtatacgacgtcagccctatattagaggcgtattatctaaacaagcgatttagagtaaccccatataatgtagacatggaaatcgttaatcttcttattgagagacgtcatactcttgtcgacgtaatgcgtagtattacttcgtacgattccagagaatataaccactacatcatcgataacattctaaagagatttagacaacaggatgaatccatcgtacaagccatactgataaactacttacattacggcgatatggtcgttcgatgcatgttagataacggacaacaactatcctctacacgactactttgttaataataatctcgtcgatgtaaacgtcgtaaggtttatcgtggaaaatatggacacgcggctgtaaatcacgtatcgaacaatggccgtctatgtatgtacggtctgatattatcgagatttaataattgcgggtatcactgttatgaaaccatactgatagatgtatttgatatactaagcaagtacatggatgatatagatatgatcgataactctactatattacgcggtcgatgtcaataatatacaatttgcaaagcggttattggaatatggagcgagtatcacgctcgataatcaatacggccatccagaaaagcagttacagaagagaaaacaaaacgaaatcgttgttctacaagatgtctctccctacgacgattactacgtaaaaaagatactagcctactgcctattaagggacgagtcattcgcggaactacatagtaaattctgtttaaacgaggactataaaagtgtatttatgaaaaatatatcattcgataagatagattccatcatcgtgacataagtcgcctcaaagagattcgaatctccgacaccgacctgtatacggtatcacagctatcttaaagccatacattcagacagtcacatttcatttcccatgtacgacgatctcatagaacagtgccatctatcgatggagcgtaaaagtaaactcgtcgacaaagcactcaataaattagagtctaccatcggtcaatctagactatcgtatttgcctccggaaattatgcgcaatatcatctaaacagtatgttgtacggaaagaaccattacaaatattatccatgatagaaagaaaatatctatatgattggagaagtaggaaacaggaacaagacaacgattactacattattaaatcatgaagtccgtattatactcgtatatattgtttctctcatgtataataataaacggaagagatatagcaccgcatgcaccatccgatggaaagtgtaaagacaacgaatacaaacgccataatttgtgtccgggaacatacgcttccagattatgcgatagcaagactaacacacgatgtacgccgtgtggttcgggtaccttcacatctcgcaataatcatttacccgcttgtctaagttgtaacggaagacgcgatcgtgtaacacgactcacaatagaatctgtgaatgctctcccggatattattgtcttctcaaaggatcatccggatgcaaggcatgtgtttcccaaacaaaatgtggaataggatacggagtatccggagacgtcatctgttctccgtgtggtctcggaacatattctcacaccgtctcttccgcagataaatgcgaacccgtacccagaaatacgtttaactatatcgatgtggaaattaacctgtatccagttaacgacacgtcgtgtactcggacgaccactaccggtctcagcgaatccatctcaacgtcggaactaactattactatgaatcataaagactgtaatcccgtatttcgtgatggatacttctccgttcttaataaggtagcgacttcaggtttctttacaggagaaaggtgtgcactctgaatttcgagattaaatgcaataacaaagattcttcctccaaacagttaacgaaagcaaagaatgatactatcatgccgcattcggagacagtaactctagtgggcgacatctatatactatatagtaataccaatactcaagactacgaaactgatacaatctcttatcatgtgggtaatgttctcgatgtcgatagccatatgcccggtagttgcgatatacataaactgatcactaattccaaacccacccactttttatagtaagtttttcacccataaataataaatacaataattaatttctcgtaaaagtagaaaatatattctaatttattgcacggtaaggaagtagaatcataaagaacagtactcaatcaatagcaattatgaaacaatatatcgtcctggcatgcatgtgcctggcggcagctgctatgcctgccagtcttcagcaatcatcctcatcctcctcctcgtgtacggaagaagaaaacaaacatcatatgggaatcgatgttattatcaaagtcacaaagcaagaccaaacaccgaccaatgataagatttgccaatccgtaacggaaattacagagtccgagtcagatccagatcccgaggtggaatcagaagatgattccacatcagtcgaggatgtagatcctcctaccacttattactccatcatcggtggaggtctgagaatgaactttggattcaccaaatgtcctcagattaaatccatctcagaatccgctgatggaaacacagtgaatgctagattgtccagcgtgtccccaggacaaggtaaggactctcccgcgatcactcatgaagaagctcttgctatgatcaaagactgtgaagtgtctatcgacatcagatgtagcgaagaagagaaagacagcgacatcaagacccatccagtactcgggtctaacatctctcataagaaagtgagttacgaagatatcatcggttcaacgatcgtcgatacaaaatgcgtcaagaatctagagtttagcgttcgtatcggagacatgtgcaaggaatcatctgaacttgaggtcaaggatggattcaagtatgtcgacggatcggcatctgaaggtgcaaccgatgatacttcactcatcgattcaacaaaactcaaagcgtgtgtctgaatcgataactctattcatctgaaattggatgagtagggttaatcgaacgattcaggcacaccacgaattaaaaaagtgtaccggacactatattccggtttgcaaaacaaaaatgttcttaactacattcacaaaaagttacctctcgcgacttcttctttttctgtctcaatagtgtgatacgattatgacactattcctattcctattcctatttcctttcagagtatcacaaaaatattaaacctctttctgatggtctcataaaaaaagttttacaaaaatatttttattctctttctctctttgatggtctcataaaaaaagttttacaaaaatatttttattctctttctctctttgatggtctcataaaaaaagttttacaaaaatatttttattctctttctctctttgatggtctcataaaaaaagttttacaaaaatatttttattctctttctctctttgatggtctcataaaaaaagttttacaaaaatatttttattctctttctctctttgatggtctcataaaaaaagttttacaaaaatatttttattctctttctctctttgatggtctcataaaaaaagttttacaaaaatatttttattctctttctctctttgatggtctcataaaaaaagttttacaaaaatatttttattctctttctctctttgatggtctcataaaaaaagttttacaaaaatatttttattctctttctctctttgatggtctcataaaaaaagttttacaaaaatatttttattctctttctctctttgatggtctcataaaaaaagttttacaaaaatatttttattctctttctctctttgatggtctcataaaaaaagttttacaaaaatatttttattctctttctctctttgatggtctcataaaaaagttttacaaaaatatttttattctctttctctctttgatggtctcataaaaaagttttacaaaaatatttttattctctttctctctttgatggtctcataaaaaaagttttacaaaaatatttttattctctttctctctttgatggtctcataa

SEQ ID NO: 66 - DNA, 195777 bp, Artificial Sequence
  GLV-1h312 (SL-tetO-CBG99-mRFP)
ttatgagaccatcaaagagagaaagagaataaaaatatttttgtaaaactttttttatgagaccatcaaagagagaaagagaataaaaatatttttgtaaaacttttttatgagaccatcaaagagagaaagagaataaaaatatttttgtaaaacttttttatgagaccatcaaagagagaaagagaataaaaatatttttgtaaaactttttttatgagaccatcaaagagagaaagagaataaaaatatttttgtaaaactttttttatgagaccatcaaagagagaaagagaataaaaatatttttgtaaaactttttttatgagaccatcaaagagagaaagagaataaaaatatttttgtaaaactttttttatgagaccatcaaagagagaaagagaataaaaatatttttgtaaaactttttttatgagaccatcaaagagagaaagagaataaaaatatttttgtaaaactttttttatgagaccatcaaagagagaaagagaataaaaatatttttgtaaaactttttttatgagaccatcaaagagagaaagagaataaaaatatttttgtaaaactttttttatgagaccatcaaagagagaaagagaataaaaatatttttgtaaaactttttttatgagaccatcaaagagagaaagagaataaaaatatttttgtaaaactttttttatgagaccatcaaagagagaaagagaataaaaatatttttgtaaaactttttttatgagaccatcaaagagagaaagagaataaaaatatttttgtaaaactttttttatgagaccatcagaaagaggtttaatatttttgtgatactctgaaaggaaataggaataggaataggaatagtgtcataatcgtatcacactattgagacagaaaaagaagaagtcgcgagaggtaactttttgtgaatgtagttaagaacatttttgttttgcaaaccggaatatagtgtccggtacacttttttaattcgtggtgtgcctgaatcgttcgattaaccctactcatccaatttcagatgaatagagttatcgattcagacacacgctttgagttttgttgaatcgatgagtgaagtatcatcggttgcaccttcagatgccgatccgtcgacatacttgaatccatccttgacctcaagttcagatgattccttgcacatgtctccgatacgaacgctaaactctagattcttgacgcattttgtatcgacgatcgttgaaccgatgatatcttcgtaactcactttcttatgagagatgttagacccgagtactggatgggtcttgatgtcgctgtctttctcttcttcgctacatctgatgtcgatagacacttcacagtctttgatcatagcaagagcttcttcatgagtgatcgcgggagagtccttaccttgtcctggggacacgctggacaatctagcattcactgtgtttccatcagcggattctgagatggatttaatctgaggacatttggtgaatccaaagttcattctcagacctccaccgatgatggagtaataagtggtaggaggatctacatcctcgactgatgtggaatcatcttctgattccacctcgggatctggatctgactcggactctgtaatttccgttacggattggcaaatcttatcattggtcggtgtttggtcttgctttgtgactttgataataacatcgattcccatatgatgtttgttttcttcttccgtacacgaggaggaggatgaggatgattgctgaagactggcaggcatagcagctgccgccaggcacatgcatgccaggacgatatattgtttcataattgctattgattgagtactgttctttatgattctacttccttaccgtgcaataaattagaatatattttctacttttacgagaaattaattattgtatttattatttatgggtgaaaaacttactataaaaagtgggtgggtttggaattagtgatcagtttatgtatatcgcaactaccgggcatatggctatcgacatcgagaacattacccacatgataagagattgtatcagtttcgtagtcttgagtattggtattactatatagtatatagatgtcgcccactagagttactgtctccgaatgcggcatgatagtatcattctttgctttcgttaactgtttggaggaagaatctttgttattgcatttaatctcgaaattcagagtgcacacctttctcctgtaaagaaacctgaagtcgctaccttattaagaacggagaagtatccatcacgaaatacgggattacagtctttatgattcatagtaatagttagttccgacgttgagatggattcgctgagaccggtagtggtcgtccgagtacacgacgtgtcgttaactggatacaggttaatttccacatcgatatagttaaacgtatttctgggtacgggttcgcatttatctgcggaagagacggtgtgagaatatgttccgagaccacacggagaacagatgacgtctccggatactccgtatcctattccacattttgtttgggaaacacatgccttgcatccggatgatcctttgagaagacaataatatccgggagagcattcacagattctattgtgagtcgtgttacacgatcgcgtcttccgttacaacttagacaagcgggtaaatgattattgcgagatgtgaaggtacccgaaccacacggcgtacatcgtgtgttagtcttgctatcgcataatctggaagcgtatgttcccggacacaaattatggcgtttgtattcgttgtctttacactttccatcggatggtgcatgcggtgctatatctcttccgtttattattatacatgagagaaacaatatatacgagtataatacggacttcatgatttaataatgtagtaatcgttgtcttgttcctgtttcctacttctccaatcatatagatattttctttctatcatggataatatttgtaatggttctttccgtacaacatactgtttagatgatattgcgcataatttccggaggcaaatacgatagtctagattgaccgatggtagactctaatttattgagtgctttgtcgacgagtttacttttacgctccatcgatagatggcactgttctatgagatcgtcgtacatgggaaatgaaatgtgactgtctgaatgtatggctttaagatagctgtgataccgtatacaggtcggtgtcggagattcgaatctctttgaggcgacttatgtcacgatgatggaatctatcttatcgaatgatatatttttcataaatacacttttatagtcctcgtttaaacagaatttactatgtagttccgcgaatgactcgtcccttaataggcagtaggctagtatcttttttacgtagtaatcgtcgtagggagagacatcttgtagaacaacgatttcgttttgttttctcttctgtaactgcttttctggatggccgtattgattatcgagcgtgatactcgctccatattccaataaccgctttgcaaattgtatattattgacatcgaccgcgtaatatagtagagttatcgatcatatctatatcatccatgtacttgcttagtatatcaaatacatctatcagtatggtttcataacagtgatacccgcaattattaaatctcgataatatcagaccgtacatacatagacggccattgttcgatacgtgatttacagccgcgtgtccatattttccacgataaaccttacgacgtttacatcgacgagattattattaacaaagtagtcgtgtagaggatagttgttgtccgttatctaacatgcatcgaacgaccatatcgccgtaatgtaagtagtttatcagtatggcttgtacgatggattcatcctgttgtctaaatctctttagaatgttatcgatgatgtagtggttatattctctggaatcgtacgaagtaatactacgcattacgtcgacaagagtatgacgtctctcaataagaagattaacgatttccatgtctacattatatggggttactctaaatcgcttgtttagataatacgcctctaatatagggctgacgtcgtatactctacacgtgtccacatcctttattaataataatttaacaatctctatatctatggttgagaaagaccagtagtattggatgggtaaagatcctccttcgtctctgccatggatggaaacattgttatcgatcaaacatttaattacatccttggatagagattgagattctctatgagacgatatatagtaatgaagagagttcttacacatatcactgtcgtacatacaggtacgaaatacgtaaccggtgctgtaacattctgatttaagaagccatagcaatacttctggtctcggattaggcgtcgttacgtatatatccaccaatccgagaccattgattgcataattcgtattcttggacggacgtatccgtttatccacaattaggtattttagcagacgtaagtcgatattatccgaatacagatcgaaatcatttatattcgacttgagttcgttagaggaatttgaatagctggatatcagtagatgcacaatctgagattttacgtatctatgcttactgtatactcctagcggagttaatccttcgttgtttctacaaagtctctcgactccgcgagagaacaatcttaatgtctgtatcgcatttattggagacgtaacaatgtagcgcattgtttcctcgtctatctatatgttttgataagttgtgacacgtttcaatttctagttttatttttttgtacgtcacatcttcatccagtagacgacatagaatagtgcactctctaccacaataatccatagctattctggtgctaattattcctatttcacgaaggcaatcattcctcataagatgataaaaagtgtagtggagatttagtatttagcagtgcggatatgatccaagagggtgagatagtcgttctcgttcagaatctttcgcagcataagtagtatgtcgatatacttatcgttgaagactctttataaaagtctatttgtttatatttattgcggatagcagtatttccctataaaaagtatacgtcctgtggtgtctttaatcatgtacatgaatggatggtttatgtagaccttcgtacgatataccatcgaaaagttaatcgtaaatactcctgtaacggccgatgcttctgtatactcctcattaacatctataaacgtcgtatgtagaaatttttctacagtgatagtttcattacacatcttgctaaaatctgcataatatccgaatatattagtaagtcctaaattttctaaaatcggtaccagattatacggttctgtcatttccactttaaactttggcatatacaagtctatacttttagtagataacataccacaccattttttaaatttttcatctgttatatttttttctatgttatatataccttctatgtcgtccggtagtataattaccatactagagtttccctcgtatggaatatcgataatagagaatcctccgaataattcattaatatgtacatattgcaagttattctcggtacccaccatcatatcaacgctggtaactatattcttagaaatataaaacttgtctgtatatgtaagatgtttagaaaatggatatttccacattgctttaaaatggacggcgctaacaactgtcatacgagtattaatggatagcggactagtcaataaggaattaattttaccatttgtcattgtcttaacccattcgttgattagttcctttgtttggttagcattattaaagtttacagtttgaaaatcgtcttttattttttgtaggaaggaggcgtggaactcgatactatcgctaccgtatattttatttgcggtagctagtgtcgcacaatacggaatatctacctccatgtcatcattattgtcatcgggtgtattctcattcatattctctatatattttgatagttgttcagctgtagaaccagctgctccatgatttagaatagataaagtagataaaatggaaactggagaaatcaaaacattttcatcagggtgttttaagattagttctttaaagatatccatggtatagacctaacgataacgatatatatcataaataaataatgttaaatttcaatttatgtttgtaccccgtattcatacttaacaaattggtattgcgtacacaatcaatcatattacataccattaataatgcaagcataaaaaattgttagtagatgtttctaaatataggttccgtaagcaaagaatataagaatgaagcggtaatgataaaatcaatcgttatctaaaatgatcatactcatttattttattctattatattaacacatacatttttaacagcaacacattcaatattgtattgttatttttatattatttacacaattaacaatatattattagtttatattactgaattaataatataaaattcccaatcttgtcataaacacacactgagaaacagcataaacacagaatccatcaaaaatgttgataaattatctgatgttgttgttcgctgctatgataatcagatcattcgccgatagtggtaacgctatcgaaacgacattgccagaaattacaaacgctacaacagatattccagctatcagattatgcggtccagagggagatggatattgtttacacggtgactgtatccacgctagagatattgacggtatgtattgtagatgctctcatggttatacaggcattagatgtcagcatgtagtattagtagactatcaacgttcagaaaacccaaacactacaacgtcatatatcccatctcccggtattatgcttgtattagtaggcattattatgtgttgtctattatctgtttataggttcactcgacgaactaaactacctatacaagatatggttgtgccataatttttataaatttttttatgagtatttttacaaaaatgtataaagtgtatgtcttatgtatatttataaaaatgctaagtatgcgatgtatctatgttatttgtatttatctaaacaatacctctacctctagatattatacaaaaattttttatttcggcatattaaagtaaaatctagttaccttgaaaatgaatacagtgggtggttccgtatcaccagtaagaacataatagtcaaatacagtatccgattgagattttgcatacaatactagtctagaaagaaatttgtaatcatcttctgtgacgggagtccatatatctgtatcatcgtctagtttatcagtgtcccatgctatattcctgttatcatcattagttaatgaaaataactctcgtgcttcagaaaagtcaaatattgtatccatacatacatctccaaaactatcgcttatacgtttatctttaacgatacctatacctagatggttatttactaacagacattttccagatctattgactataactcctatagtttccacatcaaccaagtaatgatcatctattgttatataacaataacataactcttttccatttttatcagtatgtatatctatatcaacgtcgtcgttgtagtgaatagtagtcattgatctattatatgaaacggatatgtctagaacggcaattgttttacgtccagttaacactttcgttgatttaaagtctagagtctttgcaaacataatatccttatccgactttatatttcctgtagggtggtataattttattttgcctccacatatcggtgtttccaaatatattactagacaatattccatatagttattagttaagggtacccaattagaacacgtacgcttattatcatcatttggatcgtatttcataaaagttattgtgttatcgatgtcaacacattctacattttttaatcgtctatatagtatttttctgatattttctataatatcagaattgtcttccatcggaagttgtatactatcggaatcagttacatgtttaaataattctctgatgtcattccttatacaatcaaattcattattaaacagtttaatagtctgtagacctttatcgtcgtaaatatccattgtcttattagttacgcttatttttatgtgtttttacgttgctttattatattttataagaatgattgtttgacgaatcacgagaactattaagacacattattaggtatatattataaaaaagtttttgattacgatgttataagaggaaagaggacacattaacatcatacatcaattaactacattcttataacatcgtaatcaaaagaattgcaattttgatgtataacaactgtcaatgggttatggaattgtatattacatattatacggtatgttggtaacgacaaataccggtcggtaattgtctgccggtgtaatagaattatatatatctatctattacaccggccttgtatacataataataagttgtggtagtatgatctccatatttataatttaggactttgtattcagtatttttggaatcataaaaaataaaaaaaagttttactaatttaaaatttaaaaagtatttacatttttttcactgtttagtcgcggatatggaattcgatcctgccaaaatcaatacatcatctatagatcatgtaacaatattacaatacatagatgaaccaaatgatataagactaacagtatgcattatccgaaatattatatcaatatcacaaaaataaatacacatttggctaatcaatttcgggcttggaaaaaacgtatcgccggaagggactatatgactaacttatctagagatacaggaatacaacaatcaaaacttactgaaactatacgtaactgtcaaaaaaatagaaacatatatggtctatatatacactacaatttagttattaattggataaccgatgtgattatcaatcaatattaagagggttggtaaattggtacatagctaataatacctatactccaaatacacccaataatacaacaaccatttctgagttggatatcatcaaaatactaaataaatacgaggacgtgtatagagtaagtaaagaaaaagaatgtggaatttgctatgaagttgtttactcaaaacgatagatactttggtttattggattcgtgtactcatatattttgcataacatgcatcaatatatggcatagaacacgaagagaaaccggtgcgtcggataattgtcctatatgccgtacccgttttagaaacataacaatgagcaagttctataagctagttaactaataaataaaaagtttaatttgttgacgacgtatgtcgttattttttctcgtataaaagattaatttgattctaatataatctttagtattggataaatatcaattcaaattaattccattagattatatcataaataaaaatagtagcacacaactacttcagcaaacattctttttataaatgccatctagcgtagcgaggacacaagtgaacctataattatcaaatttattagtatcagtcacatgaaggactttacgtagagtgacgattccactatctgtggtacgaacggtttcatcttctttgatgccatcacccagatgttctataaacttggtatcctcgtccgatttcatatcctttgccaaccaatacatatagctaaactcaggcatatgttccacacatcctgaacaatgaaattctccagaagatgttacaatgtctagatttggacatttggtttcaaccgcgttaacatatgagtgaacacacccatacatgaaagcgatgagaaataggattctcatcttgccaaaatatcactagaaaaaatttatttatcagttttaaaggtataaaaaatacttattgttgctcgaatattttgtatttgatggtatacggaagattagaaatgtaggtattatcatcaactgattctatggttttatgtattctatcatgtttcactattgcgttggaaataatatcatatgcttccacatatattttattttgttttaactcataatactcacgtaattctggattattggcatatctatgaataattttagctccatgatcagtaaatattaatgagaacatagtattaccacctaccattatttttttcatctcattcaattcttaattgcaaagatctatataatcattatagcgttgacttatggactctggaatcttagacgatgtacagtcatctataatcatggcatatttaatacattgttttatagcatagtcgttatctacgatgttagatatttctctcaatgaatcaatcacacaatctaatgtaggtttatgacataatagcattttcagcagttcaatgtttttagattcgttgatggcaatggctatacatgtatatccgttatttgatctaatgttgacatctgaaccggattctagcagtaaagatactagagattgtttattatatctaacagccttgtgaagaagtgtttctcctcgtttgtcaatcatgttaatgtctttaagataaggtaggcaaatgtttatagtactaagaattgggcaagcataagacatgtcacaaagacccttttttgtatgtataagtgtaaaaattataacatccatagttggatttacataggtgtccaatcgggatctctccatcatcgagataattgatggcatctcccttccttttttagtagatatttcatcgtgtaagaatcaatattaatatttctaaagtatccgtgtatagcctctttatttaccacagctccatattccactagagggatatcgccgaatgtcatatactcaattagtatatgttggaggacatccgagttcattgttttcaatatcaaagagatggtttccttatcatttctccatagtggtacaatactacacattattccgtgcggctttccattttccaaaaacaatttgaccaaatctaaatctacatctttattgtatctataatcactatttagataatcagccataattcctcgagtgcaacatgttagatcgtctatatatgaataagcagtgttatctattcctttcattaacaatttaacgatgtctatatctatatgagatgacttaatataatattgaagagctgtacaatagtttttatctataaaagacggcttgattccgtgattaattagacatttaacaacttccggacgcacatatgctctcgtatccgactctgaatacagatgagagatgatatacagatgcaatacggtaccgcaatttcgtagttgataatcatcatacgcgtatcagtactcgtcctcataaagaacactgcagccattttctatgaacaaatcaataattttagaaacaggatcattgtcattacataattttctataactgaacgatggttttcacatttaacactcaagtcaaatccatgttctaccaacacctttatcaagtcaacgtctacatttttggatttcatatagctgaatatattaaagttatttatgttgctaaatccagtggcttctagtagagccatcgctatatccttattaactttaacatgtctactatttgtgtattcttctaatggggtaagctgtctccaatttttgcgtaatggattagtgccactgtctagtagtagtttgacgacctcgacattattacaatgctcattaaaaaggtatgcgtgtaaagcattattcttgaattggttcctggtatcattaggatctctgtctttcaacatctgtttaagttcatcaagagccacctcctcattttccaaatagtcaaacattttgactgaatgagctactgtgaactctatacacccacacaactaatgtcattaaatatcatgtcaaaaacttgtacaattattaataaaaataatttagtgtttaaattttaccagttccagattttacacctccgttaatacctccattaaccccactggacgatcctcctccccacattccaccgccaccagatgtataagttttagatcctttattactaccatcatgtccatggataaagacactccacatgccgccactaccccctttagaagacatattaataagacttaaggacaagtttaacaataaaattaatcacgagtaccctactaccaacctacactattatatgattatagtttctatttttacagtaccttgactaaagtttctagtcacaagagcaatactaccaacctacactattatatgattatagtttctatttttataggaacgcgtacgagaaaatcaaatgtctaatttctaacggtagtgttgataaacgattgttatccgcggatacctcctctatcatgtcgtctattttcttactttgttctattaacttattagcattatatattatttgattataaaacttatattgcttattagcccaatctgtaaatatcggattattaacatatcgtttctttgtaggtttatttaacatgtacatcactgtaagcatgtccttaccatttattttaatttgacgcatatccgcaatttctttttcgcagtcggttataaattctatatatgatggatacatgctacatgtgtacttataatcgactaatatgaagtacttgatacatattttcagtaacgatttattattaccacctatgaataagtacctgtgatcgtctaggtaatcaactgttttcttaatacattcgatggttggtaatttactcagaataatttccaatatcttaatatataattctgctatttctgggatatatttatctgccagtataacacaaatagtaatacatgtaaacccatattttgttattatattaatgtctgcgccattatctattaaccattctactaggctgacactatgcgactcaatacaatgataaagtatactacatccatgtttatctattttgtttatatcatcaatatacggcttacaaagttttagtatcgataacacatccaactcacgcatagagaaggtagggaataatggcataatatttattaggttatcatcattgtcattatctacaactaagtttccattttttaaaatatactcgacaactttaggatctctattgccaaatttttgaaaatatttatttatatgcttaaatctatataatgtagctccttcatcaatcatacatttaataacattgatgtatactgtatgataagatacatattctaacaatagatcttgtatagaatctgtatatcttttaagaattgtggatattaggatattattacataaactattacacaattctaaaatataaaacgtatcacggtcgaataatagttgatcaactatataattatcgattttgtgatttttcttcctaaactgtttacgtaaatagttagatagaatattcattagttcatgaccactatagttactatcgaataacgcgtcaaatatttcccgtttaatatcgcatttgtcaagataataatagagtgtggtatgttcacgataagtataataacgcatctctttttcgtgtgaaattaaatagtttattacgtccaaagatgtagcataaccatcttgtgacctagtaataatataataatagagaactgttttacccattctatcatcataatcagtggtgtagtcgtaatcgtaatcgtctaattcatcatcccaattataatattcaccagcacgtctaatctgttctattttgatcttgtatccatactgtatgttgctacatgtaggtattcctttatccaataatagtttaaacacatctacattgggatttgatgttgtagcgtatttttctacaatattaataccatttttgatactatttatttctatacctttcgaaattagtaatttcaataagtctatattgatgttatcagaacatagatattcgaatatatcaaaatcattgatatttttatagtcgactgacgacaataacaaaatcacaacatcgtttttgatattattatttttcttggtaacgtatgcctttaatggagtttcaccatcatactcatataatggatttgcaccactttctatcaatgattgtgcactgctggcatcgatgttaaatgttttacaactatcatagagtatcttatcgttaaccatgattggttgttgatgctatcgcattttttggtttctttcatttcagttatgtatggatttagcacgtttgggaagcatgagctcatatgatttcagtactgtagtgtcagtactattagtttcaataagatcaatctctagatctatagaatcaaaacacgataggtcagaagataatgaatatctgtaggcttcttgttgtactgtaacttctggttttgttagatggttgcatcgtgctttaacgtcaatggtacaaattttatcctcgctttgtgtatcatattcgtccctactataaaattgtatattcagattatcatgcgatgtgtatacgctaacggtatcaataaacggagcacaccatttagtcataaccgtaatccaaaaatttttaaagtatatcttaacgaaagaagttgtgtcattgtctacggtgtatggtactagatcctcataagtgtatatatctagagtaatgtttaatttattaaatggttgataatatggatcctcgtgacaatttccgaagatggaaataagacataaacacgcaataaatctaattgcggacatggttactccttaaaaaaatacgaataatcaccttggctatttagtaagtgtcatttaacactatactcatattaatccatggactcataatctctatacgggattaacggatgttctatatacggggatgagtagttctcttctttaactttatactttttactaatcatatttagactgatgtatgggtaatagtgtttgaagagctcgttctcatcatcagaataaatcaatatctctgtttttttgttatacagatgtattacagcctcatatattacgtaatagaacgtgtcatctaccttattaactttcaccgcatagttgtttgcaaatacggttaatcctttgacctcgtcgatttccgaccaatctgggcgtataatgaatctaaactttaattgcttgtaatcattcgaaataatttttagtttgcatccgtagttatcccctttatgtaactgtaaatttctcaacgcgatatctccattaataatgatgtcgaattcgtgctgtatacccatactgaatggatgaacgaataccgacggcgttaatagtaatttactttttcatctttacatattgggtactagttttactatcataagtttataaattccacaagctactatggaataagccaaccatcttagtataccacacatgtcttaaagtttattaattaattacatgttgttttatatatatcgctacgaatttaaagagaaattagtttaggaagaaaaattatctatctacatcatcacgtctctgtattctacgatagagtgctactttaagatgcgacagatccgtgtcatcaaatatatactccattaaaatgattattccggcagcgaacttgatattggatatatcacaacctttgttaatatctacgacaatagacagcagtcccatggttccataaacagtgagtttatctttctttgaagagatattttgtagagatcttataaaactgtcgaatgacatcgcatttatatctttagctaaatcgtatatgttaccatcgtaatatctaaccgcgtctatcttaaacgtttccatcgctttaaagacgtttccgatagatggtctcatttcatcagtcatactgagccaacaaatataatcgtgtataacatctttgatagaatcagactctaaagaaaacgaatcggctttattatacgcattcatgataaacttaatgaaaaatgtttttcgttgtttaagttggatgaatagtatgtcttaataattgttattatttcattaattaatatttagtaacgagtacactctataaaaacgagaatgacataactaatcataactagttatcaaagtgtctaggacgcgtaattttcatatggtatagatcctgtaagcattgtctgtattctggagctattttctctatcgcattagtgagttcagaatatgttataaatttaaatcgaataacgaacataactttagtaaagtcgtctatattaactcttttattttctagccatcgtaataccatgtttaagatagtatattctctagttactacgatctcatcgttgtctagaatatcacatactgaatctacatccaattttagaaattggtctgtgttacatatctcttctatattattgttgatgtattgtcgtagaaaactattacgtagaccattttctttataaaacgaatatatagtactccaattatctttaccgatatatttgcacacataatccattctctcaatcactacatctttaagattttcgttgttaagatatttggctaaactatataattctattagatcatcaacagaatcagtatatatttttctagatccaaagacgaactctttggcgtcctctataatattcccagaaaagatattttcgtgttttagtttatcgagatctgatctgttcatatacgccatgattgtacggtacgttatgataaccgcataaaataaaaatccattttcatttttaaccaatactattcataattgagattgatgtaatactttgttactttgaacgtaaagacagtacacggatccgtatctccaacaagcacgtagtaatcaaatttggtgttgttaaacttcgcaatattcatcaatttagatagaaacttatactcatcatctgttttaggaatccatgtattattaccactttccaacttatcattatcccaggctatgtttcgtccatcatcgttgcgcagagtgaataattcttttgtattcggtagttcaaatatatgatccatgcatagatcggcaaagctattgtagatgtgatttttcctaaatctaatataaaactcgtttactagcaaacactttcctgatttatcgaccaagacacatatggtttctaaatctatcaagtggtggggatccatagttatgacgcagtaacatatattattacattcttgactgtcgctaatatctaaatatttattgttatcgtattggattctgcatatagatggcttgtatgtcaaagatatagaacacataaccaatttatagtcgcgctttacattctcgaatctaaagttaagagatttagaaaacattatatcctcggatgatgttatcactgtttctggagtaggatatattaaagtctttacagatttcgtccgattcaaataaatcactaaataatatcccacattatcatctgttagagtagtatcattaaatctattatattttatgaaagatatatcactgctcacctctatatttcgtacatttttaaactgtttgtataatatctctctgatacaatcagatatatctattgtgtcggtagacgataccgttacatttgaattaatggtgttccattttacaacttttaacaagttgaccaattcatttctaatagtatcaaactctccatgattaaatattttaatagtatccattttatatcactacggacacaaagtagctgacataaaccattgtataatttttatgttttatgtttattagcgtacacattttggaagttccggcttccatgtatttcctggagagcaagtagatgatgaggaaccagatagtttatatccgtacttgcacttaaagtctacattgtcgttgtatgagtatgatcttttaaacccgctagacaagtatccgtttgatattgtaggatgtggacatttaacaatctgacacgtgggtggatcggaccattctcctcctgaacacaggacactagagttaccaatcaacgaatatccactattgcaactataagttacaacgctcccatcggtataaaaatcctcgtatccgttatgtcttccgttggatatagatggaggggattggcatttaacagattcacaaataggtgcctcgggattccataccatagatccagtagatcctaattcacaatacgatttagattcaccgatcaactgatatccgctattacaagagtacgttatactagagccaaagtctactccaccaatatcaagttggccattatcgatatctcgaggcgatgggcatctccgtttaatacattgattaaagagtgtccatccagtacctgtacatttagcatatataggtcccattttttgctttctgtatccaggtagacatagatattctatagtgtctcctatgttgtaattagcattagcatcagtctccacactattcttaaatttcatattaatgggtcgtgacggaatagtacagcatgatagaacgcatcctattcccaacaatgtcaggaacgtcacgctctccaccttcatatttatttatccgtaaaaatgttatcctggacatcgtacaaataataaaaagcccatatatgttcgctattgtagaaattgtttttcacagttgctcaaaaacgatggcagtgacttatgagttacgttacactttggagtctcatctttagtaaacatatcataatattcgatattacgagttgacatatcgaacaaattccaagtatttgattttggataatattcgtattttgcatctgctataattaagatataatcaccgcaagaacacacgaacatctttcctacatggttaaagtacatgtacaattctatccatttgtcttccttaactatatatttgtatagataattacgagtctcgtgagtaattccagtaattacatagatgtcgccgtcgtactctacagcataaactatactatgatgtctaggcatgggagacttttttatccaacgatttttagtgaaacattccacatcgtttaatactacatatttctcatacgtggtataaactccacccattacatatatatcatcgtttacgaataccgacgcgcctgaatatctaggagtaattaagtttggaagtcttatccatttcgaagtgccgtgtttcaaatattctgccacacccgttgaaatagaaaattctaatcctcctattacatataactttccatcgttaacacaagtactaacttctgattttaacgacgacatattagtaaccgttttccattttttcgttttaagatctacccgcgatacggaataaacatgtctattgttaatcatgccgccaataatgtatagacaattatgtaaaacatttgcattatagaattgtctatctgtattaccgactatcgtccaatattctgttctaggagagtaatgggttattgtggatatataatcagagtttttaatgactactatattatgttttataccatttcgtgtcactggctttgtagatttggatatagttaatcccaacaatgatatagcattgcgcatagtattagtcataaacttgggatgtaaaatgttgatgatatctacatcgtttggatttttatgtatccactttaataatatcatagctgtaacatcctcatgatttacgttaacgtcttcgtgggataagatagttgtcagttcatcctttgataattttccaaattctggatcggatgtcaccgcagtaatattgttgattatttctgacatcgacgcattatatagttttttaattccatatcttttagaaaagttaaacatccttatacaatttgtgaaattaatattatgaatcatagtttttacacatagatctactacaggcggaacatcaattattatggcagcaactagtatcatttctacattgtttatggtgatgtttatcttcttccagcgcatatagtctaatagcgattcaaacgcgtgatagtttataccattcaatataatcgcttcatcctttagatggtgatcctgaatgcgtttaaaaaaattatacggagacgccgtaataatttccttattcacttgtataatttccccattgatagaaaatattacgctttccattcttaaagtactataagtaattatagtataatgtaaacgtttatatattcaatatttttataaaaatcattttgacattaattcctttttaaatttccgtctatcatctatagaaacgtattctatgaatttataaaatgcttttacgtgtcctatcgtaggcgatagaaccgctaaaaagcctatcgaatttctacaaaagaatctgttatatggtatagggagagtataaaacattaaatgtccgtacttattaaagtattcagtagccaatcctaactctttcgaatacttattaatggctcttgttctgtacgaatctatttttttgaacaacggacctagtggtatatcttgttctatgtatctaaaataatgtctgactagatccgttagtttaatatccgcagtcatcttgtctagaatggcaaatctaactgcgggtttaggctttagtttagtttctatatctacatctatgtctttatctaacaccaaaaatataatagctaatattttattacaatcatccggatattcttctacgatctcactaactaatgtttctttggttatactagtatagtcactatcggacaaataaagaaaatcagatgatcgatgaataatacatttaaattcatcatctgtaagatttttgagatgtctcattagaatattattagggttagtactcattatcattcggcagctattacttattttattatttttcaccatatagatcaatcattagatcatcaaaatatgtttcaatcatcctaaagagtatggtgaatgactcttcccatctaatttctgaacgttcaccaatgtctctagccactttggcactaatagcgatcattcgcttagcgtcttctatattattaactggttgatttaatctatctagcaatggaccgtcggacagcgtcattctcatgttcttaatcaatgtacatacatcgccgtcatctaccaattcatccaacaacataagctttttaaaatcatcattataataggtttgatcgttgtcatttctccaaagaatatatctaataagtagagtcctcatgcttagttaacaactattttttatgttaaatcaattagtacaccgctatgtttaatacttattcatattttagtttttaggattgagaatcaatacaaaaattaatgcatcattaattttagaaatacttagtttccacgtagtcaatgaaacatttgaactcatcgtacaggacgttctcgtacaggacgtaactataaaccggtttatatttgttcaagatagatacaaatccgataactttttttacgaattctacgggatccactttaaaagtgtcataccgggttctttttatttttttaaacagatcaatggtgtgatgttgattaggtcttttacgaatttgatatagaatagcgtttacatattctccataatggtcaatcgccatttgttcgtatgtcataaattctttaattatatgacactgtgtattatttagttcatccttgttcattgttaggaatctatccaaaatggcaattatactagaactataggtgcgttgtatacacatattgatgtgtctgtttatacaatccatgatatttggatccatgctactaccttcgggtaaaattgtagcatcatataccatttctagtactttaggttcattattatccattgcagaggacgtcatgatcgaatcataaaaaaatatattatttttatgttattttgttaaaaataatcatcgaatacttcgtaagatactccttcatgaacataatcagttacaaaacgtttatatgaagtaaagtatctacgatttttacaaaagtccggatgcataagtacaaagtacgcgataaacggaataataatagatttatctagtctatctttttctatagctttcatagttagatacatggtctcagaagtaggattatgtaacatcagcttcgataaaatgactgggttatttagtcttacacattcgctcatacatgtatgaccgttaactacagagtctacactaaaatgattgaacaatagatagtctaccattgtttcgtattcagatagtacagcgtagtacatggcatcttcacaaattatatcattgtctaatagatatttgacgcatcttatggatcccacttcaacagccatcttaaaatcatattgctttcctttatcattaataatttctagaacatcatctctatcataaaagatacaaatattaactgtttgatccgtaataacattgctagtcaatagcaatttgttaataagatgcgctgggctcaatgtcttaataagaagtgtaagaggactatctccgaatttgttttgtttattaacatccgttgatggaagtaaaagatctataatgtctacattcttgactgttttagagcatacaatatggagaggtgtatttccatcatgatctggttttgagggactaattcctagtttcatcatccatgagattgtagaagcttttggattgtctgacataagatgtctatgaatatgatttttgccaaatttatccactatcctggcttcgaatccgatggacattatttttttaaacactctttctgaaggatctgtacacgccaacaacggaccacatccttcttcatcaaccgagttgttaatcttggctccatactgtaccaataaatttattctctctatgacttcatcatctgttcccgagagataatatagaggtgttttatgctgtttatcacacgcgtttggatctgcgccgtgcgtcagcagcatcgcgactattctattattattaattttagaagctatatgcaatggataatttccatcatcatccgtctcatttggagagtatcctctatgaagaagttcttcgacaaatcgttcatctagtcctttaattccacaatacgcatgtagaatgtgataattatttccagaaggttcgatagcttgtagcatattcctaaatacatctaaatttttactattatatttggcataaagagatagataatactcggccgacataatgttgtccattgtagtataaaaattaatatttctatttctatttctgtatatttgcaacaatttactctctataacaaatatcataacttagtttttttatgtcaagaaggcactggtttagttcatctataaatgtcacgccataactaccacgcatgccatactcagaattatgataaagatatttatccttggggtgtaggtaatggggattaatctttgttggatcagtctctaagttaacacatgtcacacatgatccatttatagttatatcacacgatgatgatttatgaattgattccggaagatcgctatcgtattttgtggttccacaattcatttccatacatgttattgtcacactaatattatgatgaactttatctagccgctgagtggtaaacaacagaacagatagtttattatctttaccaacaccctcagccgctgccacaaatctctgatccgtatccatgatggtcatgtttatttctagtccgtatccagtcaacactatgttagcatttctgtcgatatagctttcactcatatgacactcaccaataatagtagaattaatgtcgtaatttacaccaatagtgagttcggcggcaaagtaccaataccggtaatcttgtcgaggaggacatatagtattcttgtattctaccgaatacccgagagatgcgatacaaaagagcaagactaatttgtaaaccatcttactcaaaatatgtaacaatagtacgatgcaatgagtaagacaataggaaatctatcttatatacacataattattctatcaattttaccaattagttagtgtaatgttaacaaaaatgtgggagaatctaattagtttttctttacacaattgacgtacatgagtctgagttccttgtttttgctaattatttcatccaatttattattcttgacgatatcgagatcttttgtataggagtcaaacttgtattcaacatgcttttctataatcattttagctatttcggcatcatccaatagtacattttccagattagcagaatagatattaatgtcgtatttgaacagagcctgtaacatctcaatgtctttattatctatagccaatttaatgtccggaatgaagagaagggaattattggtgtttgtcgacgtcatatagtcgagcaagagaatcatcatatccacgtgtccattttttatagtgatgtgaatacaactaaggagaatagccagatcaaaagtagatggtatctctgaaagaaagtaggaaacaatacttacatcattaagcatgacggcatgataaaatgaagttttccatccagttttcccatagaacatcagtctccaatttttcttaacaaacagttttaccgtttgcatgttaccactatcaaccgcataatacaatgcggtgtttcccttgtcatcaaattgtgaatcatccagtccactgaatagcaaaatctttactattttggtatcttccaatgtggctgcctgatgtaatggaaattcattctctagaagatttttcaatgctccagcgttcaacaacgtacatactagacgcacgttattatcagctattgcataatacaaggcactatgtccatggacatccgccttaaatgtatctttactagagagaaagcttttcagctgcttagacttccaagtattaattcgtgacagatccatgtctgaaacgagacgctaattagtgtatattttttcattttttataattttgtcatattgcaccagaattaataatatctttaatagatctgattagtagatacatggctatcgcaaaacaacatatacacatttaataaaaataatatttattaagaaaattcagatttcacgtacccatcaatataaataaaataatgattccttacaccgtacccatattaaggagattccaccttacccataaacaatataaatccagtaatatcatgtctgatgatgaacacaaatggtgtattaaattccagtttttcaggagatgatctcgccgtagctaccataatagtagatgcctctgctacagttccttgttcgtcgacatctatctttgcattctgaaacattttataaatatataatgggtccctagtcatatgtttaaacgacgcattatctggattaaacatactaggagccatcatttcggctatcgacttaatatccctcttattttcgatagaaaatttagggagtttaagattgtacactttattccctaattgagacgaccaatagtctaattttgcagccgtgatagaatctgtgaaatgggtcatattatcacctattgccaggtacatactaatattagcatccttatacggaaggcgtaccatgtcatattctttgtcatcgattgtgattgtatttccttgcaatttagtaactacgttcatcatgggaaccgttttcgtaccgtacttattagtaaaactagcattgcgtgttttagtgatatcaaacggatattgccatatacctttaaaatatatagtattaatgattgcccatagagtattattgtcgagcatattagaatctactacattagacataccggatctacgttctactatagaattaattttattaaccgcatctcgtctaaagtttaatctatataggccgaatctatgatattgttgataatacgacggtttaatgcacacagtattatctacgaaactttgataagttagatcagtgtacgtatatttagatgttttcagcttagctaatcctgatattaattctgtaaatgctggacccagatctctttttctcaaatccatagtcttcaataattctattctagtattacctgatgcaggcaatagcgacataaacatagaaaacgaataaccaaacggtgagaagacaatattatcatcttgaatatttttatacgctactataccggcattggtaaatccttgtagacgataggcggacgctgaacacgctaacgatagtatcaataacgcaatcatgattttatggtattaataattaaccttatttttatgttcggtataaaaaaattattgatgtctacacatccttttgtaattgacatctatatatccttttgtataatcaactctaatcactttaacttttacagttttccctaccagtttatccctatattcaacatatctatccatatgcatcttaacactctctgccaagatagcttcagagtgaggatagtcaaaaagataaatatatagagcataatcattctcgtatactctgccctttattacatcacccgcattgggcaacgaataacaaaatgcaagcatcttgttaacgggctcgtaaattgggataaaaattatgtttttattgtcttatatctattttattcaagagaatattcaggaatttctttttccggttgtatctcgtcgcagtatatatcatttgtacattgtttcatattttttaatagtttacaccttttagtaggactagtatcgtacaattcatagctgtattttgaattccaatcacgcataaaaatatcttccaattgttgacgaagacctaatccatcatccggtgtaatattaatagatgctccacatgtatccgtaaagtaatttcctgtccaatttgaggtacctatataggccgttttatcggttaccatatatttggcatggtttaccctagaatacggaatgggaggatcagcatctggtacaataaatagctttacttctatatttatgtttttagattttagcatagcgatagatcttaaaaagtttctcatgataaacgaagatcgttgccagcaactaatcaatagcttaacggatacttgtctgtctatagcggatcttcttaattcatcttctatataaggccaaaacaaaattttacccgccttcgaataaataatagggataaagttcataacagatacataaacgaatttactcgcatttctaatacatgacaataaagcggttaaatcattggttctttccatagtacatagttgttgcggtgcagaagcaataaatacagagtgtggaacgccgcttacgttaatactaagaggatgatctgtattataatacgacggataaaagtttttccaattatatggtagattgttaactccaagataccagtatacctcaaaaatttgagtgagatccgctgccaagttcctattattgaagatcgcaatacccaattccttgacctgagttagtgatctccaatccatgttagcgcttcctaaataaatatgtgtattatcagatatccaaaattttgtatgaagaactcctcctaggatatttgtaatatctatgtatcgtacttcaactccggccatttgtagtctttcaacatcctttaatggtttgttagatttattaacggctactctaactcgtactcctcttttgggtaattgtacaatctcgtttaatattatcgtgccgaaattcgtacccacttcatccgataaactccaataaaaagatgatatatctagtgtttttgtggtattggatagaatttccctccacatgttaaatgtagacaaatatactttatcaaattgcatacctataggaatagtttctgtaatcactgcgattgtattatccggattcattttatttgttaaaagaataatcctatatcacttcactctattaaaaatccaagtttctatttctttcatgactgattttttaacttcatccgtttccttatgaagatgatgtttggcaccttcataaatttttatttctctattacaatttgcatgttgcatgaaataatatgcacctaaaacatcgctaatcttattgtttgttccctggagtatgagagtcggggggtgttaatcttggaaattatttttctaaccttgttggtagccttcaagacctgactagcaaatccagccttaattttttcatgattgactaatgggtcgtattggtatttataaactttatccatatctctagatactgattctggacatagctttccgactggcgcatttggtgtgatggttcccataagtttggcagctagcagattcagtcttgaaacagcatctgcattaactagaggagacattagaatcattgctgtaaacaagtttggattatcgtaagaggctagctcccatggaatgacccaataagtagatttaatagttaccacgtgctgtaccaaagtcatcaatcatcattttttcaccattacttcttccatgtccaatatgatcatgtgagaatactaaaattcctaacgatgatatgttttcagctagttcgtcataacgtccagaatgtttaccagctccatgacttatgaatactaatgccttaggatatgtaataggtttccaatatttacaatatatgtaatcattgtccagattgaacatacagtttgcactcatgattcacgttatataactatcaatattaacagttcgtttgatgatcatattatttttatgttttattgataattgtaaaaacatacaattaaatcaatatagaggaaggagacggctactgtcttttgtaagatagtcatggcgactaaattagattatgaggatgctgttttttactttgtggatgatgataaaatatgtagtcgcgactccatcatcgatctaatagatgaatatattacgtggagaaatcatgttatagtgtttaacaaagatattaccagttgtggaagactgtacaaggaattgatgaagttcgatgatgtcgctatacggtactatggtattgataaaattaatgagattgtcgaagctatgagcgaaggagaccactacatcaattttacaaaagtccatgatcaggaaagtttattcgctaccataggaatatgtgctaaaatcactgaacattggggatacaaaaagatttcagaatctagattccaatcattgggaaacattacagatttgatgaccgacgataatataaacatcttgatactttttctagaaaaaaaattgaattgatgatataggggtcttcataacgcataattattacgttagcattctatatccgtgttaaaaaaaattatcctatcatgtatttgagagttttatatgtagcaaacatgatagctgtgatgccaataagctttagatattcacgcgtgctagtgttagggatggtattatctggtggtgaaatgtccgttatataatctacaaaacaatcatcgcatatagtatgcgatagtagagtaaacatttttatagtttttactggattcatacatcgtctacccaattcggttataaatgaaattgtcgccaatcttacacccaaccccttgttatccattagcatagtattaacttcgttatttatgtcataaactgtaaatgattttgtagatgccatatcatacatgatattcatgtccctattataatcattactaactttatcacaatatatgttgataatatctatatatgatctagtctttgtgggcaactgtctatacaagtcgtctaaacgttgtttactcatatagtatcgaacagccatcattacatggtcccgttccgttgatagataatcgagtatgttagtggacttgtcaaatctatataccatattttctggaagtggatatacatagtcgtgatcaacattattgctagcctcatcttctatatcctgtactataccattatctatatcatctacataatctatgatattattacacataaacatcgacaacatactattgtttattatctaagtcctgttgatccaaacccttgatctcctctatttgtactatctagagattgtacttcttccagttctggataatatatacgttgatagattagctgagctattctatctccagtatttacattaaacgtacattttccattattaataagaatgactcctatgtttcccctataatcttcgtctattacaccacctcctatatcaatgccttttagtgacagaccagacctaggagctattctaccatagcagaacttaggcatggacatactaatatctgtcttaattaactgtctttctcctggagggatagtataatcgtaagcgctatacaaatcatatccggcagcacccggcgattgcctagtaggagatttagctctgttagtttccttaacaaatctaactggtgagttaatattcatgttgaacataaaactaatattttatttcaaaattatttaccatcccatatattccatgaataagtgtgatgattgtacacttctatagtatctatatacgatccacgataaaatcctcctatcaatagcagtttattatccactatgatcaattctggattatccctcggataaataggatcatctatcagagtccatgtattgctggattcacaataaaattccgcatttctaccaaccaagaataaccttctaccgaacactaacgcgcatgatttataatgaggataataagtggatggtccaaactgccactgatcatgattgggtagcaaatattctgtagttgtatcagtttcagaatgtcctcccattacgtatataacattgtttatggatgccactgctggattacatctaggtttcagaagactcggcatattaacccaagcagcatccccgtggaaccaacgctcaacagatgtgggatttggtagacctcctactacgtataatttattgttagcgggtatcccgctagcatacagtctggggctattcatcggaggaattggaatccaattgtttgatatataatttacagctatagcattgttatgtatttcattgttcatccatccaccgatgagatatactacttctccaacatgagtacttgtacacatatggaatatatctataatttgatccatgttcataggatactctatgaatggatacttgtatgatttgcgtggttgtttatcacaatgaaatattttggtacagtctagtatccattttacattatttatacctctgggagaaagataatttgacctgattacatttttgataaggagtagcagatttcctaatttatttcttcgcctcatataccacttaatgacaaaatcaactacataatcctcatctggaacatttagttcatcgctttctagaataagtttcatagatagataatcaaaattgtctatgatgtcatcttccagttccaaaaagtgtttggcaataaagtttttagtatgacataagagattggatagtccgtattctatacccatcatgtaacactcgacacaatattcctttctaaaatctcgtaagataaagtttatacaagtgtagatgataaattctacagaggttaatatagaagcacgtaataaattgacgacgttatgactatctatatatacctttccagtatatgagtaaataactatagaagttaaactgtgaatgtcaaggtctagacaaacccttgtaactggatctttatttttcgtgtatttttgacgtaaatgtgtgcgaaagtaaggagataactttttcaatatcgtagaattgactattatattgcctcctatggcatcaataattgttttgaatttcttagtcatagacaatgctaatatattcttacagtacacagtattgacaaatatcggcatttatgtttctttaaaagtcaacatctagagaaaaatgattatctttttgagacataactcccattttttggtattcacccacacgtttttcgaaaaaattagtttttccttccaatgatatattttccatgaaatcaaacggattggtaacattataaatttttttaaatcccaattcagaaatcaatctatccgcgacgaattctatatatgttttcatcatttcacaattcattcctataagtttaactggaagagccgcagtaagaaattcttgttcaatggatactgcatctgttataatagatctaacggtttcttcactcggtggatgcaataaatgtttaaacatcaaacatgcgaaatcgcagtgcagaccctcgtctctactaattagttcgttggaaaacgtgagtccgggcattaggccacgctttttaagccaaaatatggaagcgaatgatccagaaaagaaaattccttctactgcagcaaaggcaataagtctctctccataaccggcgctgtcatgtatccacttttgagcccaatcggccttcttttttacacaaggcatcgtttctatggcattaaagagatagtttttttcattactatctttaacataagtatcgatcaaaagactatacatttccgaatgaatgttttcaatggccatctgaaatccgtagaaacatctagcctcggtaatctgtacttctgtacaaaatcgttccgccaaattttcattcactattccgtcactggctgcaaaaaacgccaatacatgttttataaaatatttttcgtctggtgttagtttattccaatcattgatatctttagatatatctacttcttccactgtccaaaatgatgcctctgcctttttatacatgttccagatgtcatgatattggattgggaaaataacaaatctatttggatttggtgcaaggatgggttccataactaaattaacaataacaataaattttttttcagttatctatatgcctgtacttggattttttgtacatcgatatcgccgcaatcactacaataattacaagtattattgatagcattgttattagtactatcataattaaattatctacattcatgggtgctgaataatcgttattatcatcattatcattttgtaattgtgacatcatactagataaatcgtttgcgagattgttgtgggaagcgggcatggaggatgcattatcattattatttaacgccttccatttggattcacaaatgttacgcacattcaacattttatggaaactataattttgtgaaaacaaataacaagaaaactcgtcatcgttcaaatttttaacgatagtaaaccgattaaacgtcgagctaatttctaacgctagcgactctgttggatatgggtttccagatatatatcttttcagttcccctacgtatctataatcatctgtaggaaatggaagatatttccatttatctactgttcctaatatcatatgtggtggtgtagtagaaccattaagcgcgaaagatgttatttcgcatcgtattttaacttcgcaataatttctggttagataacgcactctaccagtcaagtcaatgatattagcctttacagatatattcatagtagtcgtaacgatgactccatcttttagatgcgatactcctttgtatgtaccagaatcttcgtacctcaaactcgatatatttaaacaagttaatgagatattaacgcgttttatgaatgatgatatataaccagaagttttatcctcggtggctagcgctataaccttatcattataataccaactagtgtgattaatatgtgacacgtcagtgtgggtacaaatatgtacattatcgtctacgtcgtattcgatacatccgcatacagccaacaaatataaaatgacaaatactctaacgccgttcgtacccatcttgatgcggtttaataaatgttttgatttcaatttattgtaaaaaaagattcggttttatactgttcgatattctcattgcttatattttcatctatcatctccacacagtcaaatccgtggttagcatgcacctcatcaaccggtaaaagactatcggactcttctatcattataactctagaatatttaatttggtcattattaatcaagtcaattatcttatttttaacaaacgtgagtattttactcattttttataaaaacttttagaaatatacagactctatcgtgtgtctatatcttctttttatatccaatgtatttatgtctgatttttcttcatttatcatatataatggtccaaattctacacgtgcttcggattcatccagatcattaaggttcttataattgtaacatccttctcttccctcttctacatcttccttcttattcttattcttagcgtcacagaatctaccacagcaggatcccatgacgagcgtcatattaaactaatccattttcaattataatatatgattagtaatgaccattaaaataaaaaatattcttcataaccggcaagaaagtgaaaagttcacattgaaactatgtcagtagtatacatcatgaaatgatgatatatatatactctattttggtggaggattatatgatataattcgtggataatcatttttaagacacatttctttattcgtaaatcttttcacgttaaatgagtgtccatattttgcaatttcttcatatgatggcggtgtacgtggacgaggctgctcctgttcttgttgtggtcgccgactgtcgtgtctgcgtttagatccctccattatcgcgattgcgtagatggagtactattttataccttgtaattaaatttttttattaattaaacgtataaaaacgttccgtatctgtatttaagagccagatttcgtctaatagaacaaatagctacagtaaaaataactagaataattgctacacccactagaaaccacggatcgtaatacggcaatcggttttcgataataggtggaacgtatattttatttaaggacttaacaattgtctgtaaaccacaatttgcttccgcggatcctgtattaactatctgtaaaagcatatgttgaccgggcggagccgaacattctccgatatctaatttctgtatatctataatattattaacctccgcatacgcattacagttcttttctagcttggataccgcactaggtacatcgtctagatctattcctatttcctcagcgatagctcttctatccttttccggaagcaatgaaatcacttcaataaatgattcaaccatgagtgtgaaactaagtcgagaattactcatgcatttgttagttattcggagcgcgcaatttttaaactgtcctataacctctcctatatgaatagcacaagtgacattagtagggatagaatgttgagctaatttttgtaaataactatctataaaaagattatacaaagttttaaactctttagtttccgccatttatccagtctgagaaaatgtctctcataataaatttttccaagaaactaattgggtgaagaatggaaacctttaatctatatttatcacagtctgttttggtacacatgatgaattcttccaatgccgtactaaattcgatatctttttcgatttctggatatgtttttaataaagtatgaacaaagaaatggaaatcgtaataccagttatgtttaactttgaaattgttttttattttcttgttaatgattccagccacttgggaaaagtcaaagtcgtttaatgccgatttaatacgttcattaaaaacaaactttttatcctttagatgaattattattggttcattggaatcaaaaagtaagatattatcgggtttaagatctgcgtgtaaaaagttgtcgcaacagggtagttcgtagattttaatgtataacagagccatctgtaaaaagataaactttatgtattgtaccaaagatttaaatcctaatttgatagctaactcggtatctactttatctgccgaatacagtgctaggggaaaaattataatgtttcctctttcatattcgtagttagttctcttttcatgttcgaaaaagtgaaacatgcggttaaaatagtttataacattaatattactgttaataactgccggataaaagtgggatagtaatttcacgaatttgatactgtcctttctctcgttaaacgcctttaaaaaaactttagaagaatatctcaatgagagttcctgaccatccatagtttgtatcaataatagcaacatatgaagaacacgtttatacagagtatgtaaaaatgttaatttatagtttaatcccatggcccacgcacacacgattaattttttttcatctccctttagattgttgtatagaaatttgggtactgtgaactccgccgtagtttccatgggactatataattttgtggcctcgaatacaaattttactacatagttatctatcttaaagactataccatatcctcctgtagatatgtgataaaaatcgtcgtttataggataaaatcgtttatccttttgttggaaaaaggatgaattaatgtaatcattctcttctatctttagtagtgtttccttattaaaattcttaaaataatttaacaatctaactgacggagcccaattttggtgtaaatctaattgggacattatattgttaaaatacaaacagtctcctaatataacagtatctgataatctatggggagacatccattgatattcaggggatgaatcattggcaacacccatttattgtacaaaaagccccaatttacaaacgaaagtccaggtttgatagagacaaacaattaactattttgtctctgtttttaacacctccacagtttttaatttctttagtaatgaaattattcacaatatcagtatcttctttatctaccagagattttactaacttgataaccttggctgtctcattcaatagggtagtaatatttgtatgtgtgatattgatatctttttgaattgtttcttttagaagtgattctttgatggtgccagcatacgaattacaataatgcagaaactcggttaacatgcaggaattatagtaagccaattccaattgttgcctgtgttgtattagagtgtcaatatgagcaatggtgtccttgcgtttctctgatagaatgcgagcagcgattttggcgttatcatttgacgatatttctggaatgacgaatcctgtttctactaactttttggtaggacaaagtgaaacaatcaagaagatagcttctcctcctatttgtggaagaaattgaactcctctagatgatctactgacgatagtatctccttgacagatattggaccgaattacagaagtacctggaatgtaaagccctgaaaccccctcattttttaagcagattgttgccgtaaatcctgcactatgcccaagatagagagctcctttggtgaatccatctctatgtttcagtttaaccaagaaacagtcagctggtctaaaatttccatctctatctaatacagcatctaacttgatgtcaggaactatgaccggtttaatgttatatgtaacattgagtaaatccttaagttcataatcatcactgtcatcagttatgtacgatccaaacaatgtttctaccggcatagtggatacgaagatgctatccatcagaatgtttccctgattagtattttctatatagctattcttctttaaacgattttccaaatcagtaactatgttcatttttttaggagtaggacgcctagccagtatggaagaggattttctagatcctctcttcaacatctttgatctcgatggaatgcaaaaccccatagtgaaacaaccaacgataaaaataatattgtttttcactttttataattttaccatctgactcatggattcattaatatctttataagagctactaacgtataattctttataactgaactgagatatatacaccggatctatggtttccataattgagtaaatgaatgctcggcaataactaatggcaaatgtatagaacaacgaaattatactagagttgttaaagttaatattttctatgagctgttccaataaattatttgttgtgactgcgttcaagtcataaatcatcttgatactatccagtaaaccgtttttaagttctggaatattatcatcccattgtaaagcccctaattcgactatcgaatatcctgctctgatagcagtttcaatatcgacggacgtcaatactgtaataaaggtggtagtattgtcatcatcgtgataaactacgggaatatggtcgttagtaggtacggtaactttacacaacgcgatatataactttccttttgtaccatttttaacgtagttgggacgtcctgcagggtattgttttgaagaaatgatatcgagaacagatttgatacgatatttgttggattcctgattattcactataatataatctagacagatagatgattcgataaatagagaaggtatatcgttggtaggataatacatccccattccagtattctcggatactctattgatgacactagttaagaacatgtcttctattctagaaaacgaaaacatcctacatggactcattaaaacttctaacgctcctgattgtgtctcgaatgcctcgtacaaggatttcaaggatgccatagattctttgaccaacgatttagaattgcgtttagcatctgatttttttattaaatcgaatggtcggctctctggtttgctaccccaatgataacaatagtcttgtaaagataaaccgcaagaaaatttatacgcatccatccaaataaccctagcaccatcggatgatattaatgtattattatagattttccatccacaattattgggccagtatactgttagcaacggtatatcgaatagattactcatgtaacctactagaatgatagttcgtgtactagtcataatatctttaatccaatctaaaaaatttaaaattagattttttacactgttaaagttaacaaaagtattacccgggtacgtggatatcatatatggcattggtccattatcagtaatagctccataaactgatacggcgatggtttttatatgtgtttgatctaacgaggaagaaattcgcgcccacaattcatctctagatatgtatttaatatcaaacggtaacacatcaatttcgggacgcgtatatgtttctaaatttttaatccaaatataatgatgacctatatgccctattatcatactgtcaactatagtacacctagggaacttacgatacatctgtttcctataatcgttaaattttacaaatctataacatgctaaaccttttgacgacagccattcattaatttctgatatggaatctgtattctcgataccgtatcgttctaaagccagtgctatatctccctgttcgtgggaacgctttcgtataatatcgatcaacggataatctgaagtttttggagaataatatgactcatgatctatttcgtccataaacaatctagacataggaattggaggcgatgatcttaattttgtgcaatgagtcgtcaatcctataacttctaatcttgtaatattcatcatcgacataatactatctatgttatcatcgtatattagtataccatgaccttcttcatttcgtgccaaaatgatatacagtcttaaatagttacgcaatatctcaatagtttcataattgttagctgttttcatcaaggtttgtatcctgtttaacatgatggcgttctataacgtctctattttctatttttaattttttaaatttttaacgatttactgtggctagatacccaatctctctcaaatatttttttagcctcgcttacaagctgtttatctatactattaaaactgacgaatccgtgattttggtaatgggttccgtcgaaatttgccgaagtgatatgaacatattcgtcgtcgactatcaacaattttgtattattctgaatagtgaaaaccttcacagatagatcattttgaacacacaacgcatctagacttttggcggttgccatagaatatacgtcgttcttatcccaattaccaactagaagtctgatcttaactcctctattaatggctgcttctataatggagttgtaaatgtcgggccaatagtagctattaccgtcgacacgtgtagtgggaactatggccaaatgttcaatatctatactagtcttagctgacctgagtttatcaataactacatcggtatctagatctctagaatatcccaataggtgttccggagaatcagtaaagaacactccacctataggattcttaatatgatacgcagtgctaactggcaaacaacaagccgcagagcataaattcaaccatgaattttttgcgctattaaaggctttaaaagtatcaaatcttctacgaagatctgtggccagcgggggataatcagaatatacacctaacgttttaatcgtatgtatagatcctccagtaaatgacgcgtttcctacataacatctttcatcatctgacacccaaaaacaaccgagtagtagtcccacattattttttttatctatattaacggttataaaatttatatccgggcagtgactttgtagctctcccagatttcttttccctcgttcatctagcaaaactattattttaatccctttttcagatgcctcttttagtttatcaaaaataagcgctcccctagtcgtactcagaggattacaacaaaaagatgctatgtatatatatttcttagctagagtgataatttcgttaaaacattcaaatgttgttaaatgatcggatctaaaatccatattttctggtagtgtttctaccagcctacattttgctcccgcaggtaccgatgcaaatggccacatttagttaacataaaaacttatacatcctgttctatcaacgattctagaatatcatcggctatatcgctaaaattttcatcaaagtcgacatcacaacctaactcagtcaatatattaagaagttccatgatgtcatcttcgtctatttctatatccgtatccattgtagattgttgaccgattatcgagtttaaatcattactaatactcaatccttcagaatacaatctgtgtttcattgtaaatttataggcggtgtatttaagttggtagattttcaattatgtattaatatagcaacagtagttcttgctcctccttgattctagcatcctcttcattattttcttctacgtacataaacatgtccaatacgttagacaacacaccgacgatggcggccgcaggatcctcaagagccagactcacatttcagctgcttttccaggccacagatgatcagttccaggccaaaaaggaatgcaggctcagccccttggtggtcaaacaactcaatagcttgccgcagcagtggtggcatggagtcagtggtgggggtctccctctcctccttggcaacttggtgctcctggtcctccagcacacagcccaaggtgaagtggcccacagcagagagggcatacaaggcattttccagggagaagccttgttggcacaggaatgccagctggttctccagggtctcatactgcttctctgtaggcctggtgcccaagtgaactttggcaccatcccggtgggagagcaaggcacatctgaagctcttggcattgttcctcaggaagtcctgccaggactccccttccagagggcagaagtgggtgtggtgcctgtccaacatctcaatggccagggcatcaagcagagccctcttgttcttcacatgccagtacagggtaggctgctccacacccagcttctgggccagcttcctggtggtcaagccctcaatgccaacttcattcaggagctccaaggcagagttgatgactttgctcttgtccagtctggacatctcgagttatgatctacttccttaccgtgcaataaattagaatatattttctacttttacgagaaattaattattgtatttattatttatgggtgaaaaacttactataaaaagcgggtgggtttggaattagtgaaagcttacagacacgaatatgactaaaccgatgaccatttaaaaacccctctctagctttcacttaaactgtatcgatcattcttttagcacatgtataatataaaaacattattctatttcgaatttaggcttccaaaaatttttcatccgtaaaccgataataatatatatagacttgttaatagtcggaataaatagattaatgcttaaactatcatcatctccacgattagagatacaatatttacattctttttgctgtttcgaaactttatcaatacacgttaatacaaacccaggaaggagatattgaaactgaggctgttgaaaatgaaacggtgaatacaataattcagataatgtaaaatcatgattccgtattctgatgatattagaactgctaatggatgtcgatggtatgtatctaggagtatctattttaacaaagcatcgatttgctaatatacaattatccttttgattaattgttattttattcatattcttaaaaggtttcatatttatcaattcttctacattaaaaatttccatttttaatttatgtagccccgcaatactcctcattacgtttcattttttgtctataatatccattttgttcatctcggtacatagattatccaattgagaagcgcatttagtagttttgtacattttaagtttattgacgaatcgtcgaaaactagttatagttaacattttattatttgataccctgatattaatacccctgccgttactattatttataactgatgtaatccacgtaacattggaattaactatcgatagtaatgcatcgacgcttccaaaattgtctattataaactcaccgataatttttttattgcatgttttcatattcattaggattatcaaatctttaatcttattacgattgtatgcgttgatattacaagacgtcattctaaaagacggaggatctccatcaaatgccagacaatcacgtacaaagtacatggaaataggttttgttctattgcgcatcatagatttatatagaacacccgtagaaatactaatttgttttactctataaaatactaatgcatctatttcatcgttttgtataacgtctttccaagtgtcaaattccaaatttttttcattgatagtaccaaattcttctatctctttaactacttgcatagataggtaattacagtgatgcctacatgccgttttttgaaactgaatagatgcgtctagaagcgatgctacgctagtcacaatcaccactttcatatttagaatatatatatgtaaaaatatagtagaatttcattttgtttttttctatgctataaatgaattctcattttgcatctgctcatactccgttttatattaataccaaagaaggaagatatctggttctaaaagccgttaaagtatgcgatgttagaactgtagaatgcgaaggaagtaaagcttcctgcgtactcaaagtagataaaccctcatcgcccgcgtgtgagagaagaccttcgtccccgtccagatgcgagagaatgaataaccctggaaaacaagttccgtttatgaggacggacatgctacaaaatatgttcgcggctaatcgcgataatgtagcttctagacttttgtcctaaaatactattatatccttttcgatattaataaatccgtgtcgtccaggttttttatctctttcagtatgtgaatagataggtattttatctctattcatcatcgaatttaagagatccgataaacattgtttgtattctccagatgtcagcatctgatacaacaatatatgtgcacataaacctctggcacttatttcatgtaccttccccttatcactaaggagaatagtatttgagaaatatgtatacatgatattatcatgaattagatatacagaatttgtaacactctcgaaatcacacgatgtgtcggcgttaagatctaatatatcactcgataacacattttcatctagatacactagacattttttaaagctaaaatagtctttagtagtaacagtaactatgcgattattttcatcgatgatacatttcatcggcatattattacgcttaccatcaaagactataccatgtgtatatctaacgtattctagcatggttgccatacgcgcattaaacttttcaggatctttggatagatcttccaatctatctatttgagaaaacatttttatcatgttcaatagttgaaacgtcggatccactatatagatattatctataaagattttaggaactacgttcatggtatcctggcgaatattaaaactatcaatgatatgattatcgttttcatcttttatcaccatatagtttctaagatatgggattttacttaatataatattatttcccgtgataaattttattagaaaggccaaatctataagaaaagtcctagaattagtctgaagaatatctatatcgccgtatagtatatttggattaattagatatagagaatatgatccgtaacatatacaacttttattatggcgtctaagatattcttccatcaacttattaacatttttgactagggaagatacattatgacgtcccattacttttgccttgtctattactgcgacgttcatagaatttagcatatctcttgccaattcttccattgatgttacattataagaaattttagatgaaattacatttggagctttaatagtaagaactcctaatatgtccgtgtatgtggtcactaatacagattgtagttctataatcgtaaataatttacctatattatatgtttgagtctgtttagaaaagtagctaagtatacgatcttttatttctgatgcagatgtattaacatcggaaaaaaatctttttttattcttttttactaaagatacaaatatgtctttgttaaaaacagttattttctgaatatttctagcttgtaattttaacatatgatattcgttcacactaggtactctgcctaaataggtttctataatctttaatgtaatattaggaaaagtattctgatcaggattcctattcattttgaggatttaaaactctgattattgtctaatatggtctctacgcaaactttttcacagagcgatagagtttttgataactcgtttttcttaagaaatataaaactactgtctccagagctcgctctatcttttattttatctaattcgatacaaactcctgatactggttcagaaagtaattcattaattttcagtcctttatagaagatatttaatatagataatacaaaatcttcagtttttgatatcgatctgattgatcctagaactagatatattaataacgtgctcattaggcagtttatggcagcttgataattagatatagtatattccagttcatatttattagataccgcattgcccagattttgatattctatgaattcctctgaaaataaatccaaaataactagacattctattttttgtggattagtgtactctcttccctctatcatgttcactactggtgtccacgatgataaatatctagagggaatataatatagtccataggatgccaatctagcaatgtcgaataactgtaattttattcttcgctcttcattatgaattgattcttgaggtataaacctaacacaaattatattattagacttttcgtatgtaatgtctttcatgttataagtttttaatcctggaatagaatctattttaatgaggcttttaaacgcagagttctccaacgagtcaaagcataatactctgttgtttttcttatatacgatgttacgattttcttctttgaatggaataggtttttgaattagtttataattacaacataatagataaggaagtgtgcaaatagtacgcggaaaaaacataatagctcccctgttttcatccatggttttaagtaaatgatcactggcttctttagtcaatggatattcgaacattaaccgtttcatcatcattggacagaatccatatttcttaatgtaaagagtgatcaaatcattgtgtttattgtaccatcttgttgtaaatgtgtattcggttatcggatctgctcctttttctattaaagtatcgatgtcaatctcgtctaagaattcaactatatcgacatatttcatttgtatacacataaccattactaacgtagaatgtataggaagagatgtaacgggaacagggtttgttgattcgcaaactattctaatacataattcttctgttaatacgtcttgcacgtaatctattatagatgccaagatatctatataattattttgtaagatgatgttaactatgtgatctatataagtagtgtaataattcatgtattttgatatatgttccaactctgtctttgtgatgtctagtttcgtaatatctatagcatcctcaaaaaatatattcgcatatattcccaagtcttcagttctatcttctaaaaaatcttcaacgtatggaatataataatctattttacctcttctgatatcattaatgatatagtttttgacactatcttctgtcaattgattcttattcactatatctaagaaacggatagcgtccctaggacgaactactgccattaatatctctattatagcttctggacataattcatctattataccagaattaatgggaactattccgtatctatctaacatagttttaagaaagtcagaatctaagacttgatgttcatatattggttcatacatgaaatgatctctattgatgatagtgactatttcattctctgaaaattggtaactcattctatatatgctttccttgttgatgaaggatagaatatactcaatagaatttgtaccaacaaactgttctcttatgaatcgtatatcatcatctgaaataatcatgtaaggcatacatttaacaattagagacttgtctcctgttatcaatatactattcttgtgataatttatgtgtgaggcaaatttgtccacgttctttaattttgttatagtagatatcaaatccaatggagctacagttcttggcttaaacagatatagtttttctggaacaaattctacaacattattataaaggactttgggtagataagtgggatgaaatcctattttaattaatgcgatagccttgtcctcgtgcagatatccaaacgcttttgtgatagtatggcattcattgtctagaaacgctctacgaatatctgtgacagatatcatctttagagaatatactagtcgcgttaatagtactacaatttgtattttttaatctatctcaataaaaaaattaatatgtatgattcaatgtataactaaactactaactgttattgataactagaatcagaatctaatgatgacgtaaccaagaagtttatctactgccaatttagctgcattatttttagcatctcgtttagattttccatcggccttatcgaatactcttccgtcgatgtctacacaggcataaaatgtaggagagttactaggcccaactgattcaatacgaaaagaccaatctctcctagtaatttggcagtactcattaataacggtgacagggttagcatctttccaatcaataatttttttagccggaataacatcatcaaaagacttatgatcctctctcattgatttttcgcgggatacatcatctattatgacgtcagccatagcatcagcatccggcttatccgcctccgttgtcataaaccaacgaggaggaatatcgtcggagctgtacaccatagcactacgttgaagatcgtacagagctttattaacttctcgcttctccatattaagttgtctagttagttgtgcagcagtagctccttcgattccaatgtttttaatagccgcacacacaatctctgcgtcagaacgctcgtcaatatagatcttagacatttttagagagaactaacgcaaccagcaataaaactgaacctactttatcatttttttattcatcatcctctggtggttcgtcgttcctatcaaatgtagctctgattaacccgtcatctataggtgatgctggttctggagattctggaggagatggattattatctggaagaatctctgttatttccttgttttcatgtatcgattgcgttgtaacattaagattgcgaaatgctctaaatttgggaggcttaaagtgttgtttgcaatctctacacgcgtgtctaactagtggaggttcgtcagctgctctagtttgaatcatcatcggcgtagtattcctacttttacagttaggacacggtgtattgtatttctcgtcgagaacgttaaaataatcgttgtaactcacatcctttattttatctatattgtattctactcctttcttaatgcattttataccgaataagagatagcgaaggaattctttttcggtgccgctagtacccttaatcatatcacatagtgttttatattccaaatttgtggcaatagacggtttatttctatacgatagtttgtttctggaatcctttgagtattctataccaatattattctttgattcgaatttagtttcttcgatattagattttgtattacctatattcttgatgtagtactttgatgatttttccatggcccattctattaagtcttccaagttggcatcatccacatattgtgatagtaattctcggatatcagtagcggctaccgccattgatgtttgttcattggatgagtaactactaatgtatacattttccatttataacacttatgtattaactttgttcatttatattttttcattattatgttgatattaacaaaagtgaatatatatatgttaataattgtattgtggttatacggctacaattttataatgagtgaaagtcagtgtccgatgatcaatgacgatagctttactctgaaaagaaagtatcaaatcgatagtgcggagtcaacaataaaaatggataagaagaggataaagtttcagaatagagccaaaatggtaaaagaaataaatcagacaataagagcagcacaaactcattacgagacattgaaactaggatacataaaatttaagagaatgattatgactactactctagaagatatagcaccatctattccaaataatcagaaaacttataaactattctcggacatttcagccatcggcaaagcatcacagaatccgagtaagatggtatatgctctgctgctttacatgtttcccaatttgtttggagatgatcatagattcattcgttatagaatgcatccaatgagtaaaatcaaacacaagatcttctctcctttcaaacttaatcttattagaatattagtggaagaaagattctataataatgaatgcagatctaataaatggagaataattggaacacaagttgataaaatgttgatagctgaatctgataaatatacaatagatgcaaggtataacctaaaacccatgtatagaatcaagggagaatctgaagaagataccctctttatcaaacagatggtagaacaatgtgtgacatcccaggaattggtggaaaaagtgttgaagatactgtttagagatttgttcaagagtggagaatacaaagcgtacagatacgatgatgatgtagaaaatggatttattggattggatacactaaaattaaacattgttcatgatatagttgaaccatgtatgcctgttcgtaggccagtggctaagatactgtgtaaagaaatggtaaataaatactttgagaatccgctacatattattggtaaaaatcttcaagagtgcattgactttgttagtgaataggcatttcatctttctccaatactaattcaaattgttaaattaataatggatagtataaatagttattagttataagatagtaaaaataattattagaataagagtgtagtatcatagataactctcttctataaaaatggattttattcgtagaaagtatcttatatacacagtagaaaataatatagattttttaaaggatgatacattaagtaaagtaaacaattttaccctcaatcatgtactagctctcaagtatctagttagcaattttcctcaacacgttattactaaggatgtattagctaataccaatttttttgttttcatacatatggtacgatgttgtaaagtgtacgaagcggttttacgacacgcatttgatgcacccacgttgtacgttaaagcattgactaagaattatttatcgtttagtaacgcaatacaatcgtacaaggaaaccgtgcataaactaacacaagatgaaaaatttttagaggttgccgaatacatggacgaattaggagaacttataggcgtaaattatgacttagttcttaatccattatttcacggaggggaacccatcaaagatatggaaatcatttttttaaaactgtttaagaaaacagacttcaaagttgttaaaaaattaagtgttataagattacttatttgggcatacctaagcaagaaagatacaggcatagagtttgcggataatgatagacaaaatatatacactctatttcaacaaactggtagaatcgtccatagcaatctaacagaaacgtttagagattatatctttcccggagataagactagctattgggtgtggttaaacgaaagtatagctaatgatgcggatatcgttcttaatagacacgccattaccatgtatgataaaattcttagttatatatactctgagataaaacaaggacgcgttaataaaaacatgcttaagttagtttatatctttgagcctgaaaaagatatcagagaacttctgctagaaatcatatatgatattcctggagatatcctatctattattgatgcaaaaaacgacgattggaaaaaatattttattagtttttataaagctaattttattaacggtaatacatttattagtgatagaacgtttaacgaggacttattcagagttgttgttcaaatagatcccgaatatttcgataatgaacgaattatgtctttattctctacgagtgctgcggacattaaacgatttgatgagttagatattaataacagttatatatctaatataatttatgaggtgaacgatatcacattagatacaatggatgatatgaagaagtgtcaaatctttaacgaggatacgtcgtattatgttaaggaatacaatacatacctgtttttgcacgagtcggatcccatggtcatagagaacggaatactaaagaaactgtcatctataaaatccaagagtagacggctgaacttgtttagcaaaaacattttaaaatattatttagacggacaattggctcgtctaggtcttgtgttagatgattataaaggagacttgttagttaaaatgataaaccatcttaagtctgtggaggatgtatccgcattcgttcgattttctacagataaaaaccctagtattcttccatcgctaatcaaaactattttagctagttataatatttccatcatcgtcttatttcaaaggtttttgagagataatctatatcatgtagaagaattcttggataaaagcatccatctaaccaagacggataagaaatatatacttcaattgataagacacggtagatcatagaacagaccaaatatattattaataatttgtatatacatagatataattatcacacatttttgataaatgggaactgctgcaacaattcagactcccaccaaattaatgaataaagaaaatgcagaaatgattttggaaaaaattgttgatcatatagttatgtatattagtgacgaatcaagtgattcagaaaataatcctgaatatattgattttcgtaacagatacgaagactatagatctctcattataaaaagtgatcacgagtttgtaaagctatgtaaaaatcatgcggagaaaagttctccagaaacgcaacaaatgattatcaaacacatatacgaacaatatcttattccagtatctgaagtactattaaaacctataatgtccatgggtgacataattacatataacggatgtaaagacaatgaatggatgctagaacaactctctaccctaaactttaacaatctccgcacatggaactcatgtagcataggcaatgtaacgcgtctgttttatacattttttagttatctgatgaaagataaactaaatatataagtataatcccattctaatactttaacctgatgtattagcatcttattagaatattaacctaactaaaagacataacataaaaactcattacatagttgataaaaagcggtaggatataaatattatggctgccaccgttccgcgttttgacgacgtgtacaaaaatgcacaaagaagaattctagatcaagaaacattttttagtagaggtctaagtagaccgttaatgaaaaacacatatctatttgataattacgcgtatggatggataccagaaactgcaatttggagtagtagatacgcaaacctagatgctagtgactattatcccatttcgttgggattacttaaaaagttcgagtttctcatgtctctatataaaggtcctattcccgtatatgaagaaaaagtaaatactgaattcatagccaatggatcgttctctggtagatacgtatcatatcttcgaaagttttctgcccttccaacaaacgagtttattagttttttgttactgacttccattccaatctataatatcttgttctggtttaaaaacacacagtttgatattactaaacacacattattcagatacgtctatacagataatgccaaacacctggcgttggctaggtatatgcatcaaacaggagactataagcctttgtttagtcgtctcaaagagaattatatatttaccggtcccgttccaataagtatcaaagatatagatcaccctaatcttagtagagcaagaagtccatccgattatgagacattagctaatattagtactatattgtactttaccaagtatgatccggtattaatgtttttattgttttacgtacctgggtattcaattactacaaaaattactccagccgtagaatatctaatggataaactgaatctaacaaagagcgacgtacaactgttgtaaattattttatgcttcgtaaaatgtaggttttgaaccaaacattctttcaaagaatgagatgcataaaactttattatccaatagattgactatttcggacgtcaatcgtttaaagtaaacttcgtaaaatattctttgatcactgccgagtttaaaacttctatcgataattgtctcatatgttttaatatttacaagttttttggtccatggtacattagccggacaaatatatgcaaaataatatcgttctccaagttctatagtttctggattatttttattatattcagtaactaaatacatattagggttatctgcggatttataatttgagtgatgcattctactcaacataaataattctagaggagacgatctactatcaaattcggatcgtaaatctgtttctaaagaacggagaatatctatacatacctgattagaattcatccgtccttcagacaacatctcagacagtctggttttgtacatcttaatcatattcttatgaaacttggaaacatctcttctagtttcactagtacctttattaattctctcaggtacagattttgaattcgacgatgctgagtatttcatcgttgtatatttcttcttcgattgcataatcagattcttatataccgcctcaaactctattttaaaattattaaacaatactctattattaatcagtcgttctaactctttcgctatttctatagacttatctacatcttgactgtctatctctgtaaacacggagtcggtatctccatacacgctacgaaaacgaaatctgtaatctataggcaacgatgttttcacaatcggattaatatctctatcgtccatataaaatggattacttaatggattggcaaaccgtaacataccgttagataactctgctccatttagtaccgattctagatacaagatcattctacgtcctatggatgtgcaactcttagccgaagcgtatgagtatagagcactatttctaaatcccatcagaccatatactgagttggctactatcttgtacgtatattgcatggaatcatagatggccttttcagttgaactggtagcctgttttagcatctttttatatctggctctctctgccaaaaatgttcttaatagtctaggaatggttccttctatcgatctatcgaaaattgctatttcagagatgaggttcggtagtctaggttcacaatgaaccgtaatatatctaggaggtggatatttctgaagcaatagctgattatttatttcttcttccaatctattggtactaacaacgacaccgactaatgtttccggagatagatttccaaagatacacacattaggatacagactgttataatcaaagattaatacattattactaaacattttttgttttggagcaaataccttaccgccttcataaggaaacttttgttttgtttctgatctaactaagatagttttagtttccaacaatagctttaacagtggacccttgatgactgtactcgctctatattcgaataccatggattgaggaagcacatatgttgacgcacccgcgtctgtttttgtttctactccataatactcccacaaatactgacacaaacaagcatcatgaatacagtatctagccatatctaaagctatgtttagattataatccttatacatctgagctaaatcaacgtcatcctttccgaaagataatttatatgtatcattaggtaaagtaggacataatagtacgactttaaatccattttcccaaatatctttacgaattactttacatataatatcctcatcaacagtcacataattacctgtggttaaaacctttgcaaatgcagcggctttgcctttcgcgtctgtagtatcgtcaccgatgaacgtcatttctctaactcctctatttaatactttacccatgcaactgaacgcgttcttggatatagaatccaatttgtacgaatccaatttttcaaatttttgaatgaatgaatatagatcgaaaaatatagttccattattgttattaacgtgaaacgtagtattggccatgccgcctactcccttatgactagactgatttctctcataaatacagagatgtacagcttcctttttgtccggagatctaaagataattttctctcctgttaataactctagacgattagtaatatatctcagatcaaagttatgtccgttaaaggtaacgacgtagtcgaacgttagttccaacaattgtttagctattcgtaacaaaactatttcagaacatagaactagttctcgttcgtaatccatttccattagtgactgtatcctcaaacatcctctatcgacggcttcttgtatttcctgttccgttaacatctcttcattaatgagcgtaaacaataatcgtttaccacttaaatcgatataacagtaacttgtatgcgagattgggttaataaatacagaaggaaacttcttatcgaagtgacactctatatctagaaataagtacgatcttgggatatcgaatctaggtatttttttagcgaaacagttacgtggatcgtcacaatgataacatccattgttaatctttgtcaaatattgctcgtccaacgagtaacatccgtctggagatatcccgttagaaatataaaaccaactaatattgagaaattcatccatggtggcattttgtatgctgcgtttctttggctcttctatcaaccacatatctgcgacggagcattttctatctttaatatctagattataacttattgtctcgtcaatgtctatagttctcatctttcccaacggcctcgcattaaatggaggaggagacaatgactgatatatttcgtccgtcactacgtaataaaagtaatgaggaaatcgtataaatacggtctcgccatttcgacatctggatttcagatataaaaatctgttttcaccgtgactttcaaaccaattaatgcaccgaacatccatttatagaatttagaaatatattttcatttaaatgaatcccaaacattggggaagagccgtatggaccattatttttatagtactttcgcaagcgggtttagacggcaacatagaagcgtgtaaacgaaaactatatactatagttagcactcttccatgtcctgcatgtagacggcacgcgactatcgctatagaggacaataatgtcatgtctagcgatgatctgaattatatttattattttttcatcagattatttaacaatttggcatctgatcccaaatacgcgatcgatgtgacaaaggttaaccctttataaacttaacccattataaaacttatgattagtcacaactgaaataaccgcgtgattattttttggtataattctacacggcatggtttctgtgactatgaattcaacccccgttacattagtgaaatctttaacaaacagcaagggttcgtcaaagacataaaactcattgtttacaatcgaaatagaccccctatcacacttaaaataaaaaatatccttatcctttaccaccaaataaaattctgattggtcaatgtgaatgtattcacttaacagttccacaaatttatttattaactccgaggcacatacatcgtcggtattttttatggcaaactttactcttccagcatccgtttctaaaaaaatattaacgagttccatttatatcatccaatattattgaaatgacgttgatggacagatgatacaaataagaaggtacggtacctttgtccaccatctcctccaattcatgctctattttgtcattaactttaatgtatgaaaacagtacgccacatgcttccatgacagtgtgtaacactttggatacaaaatgtttgacattagtataattgtccaagactgtcaatctataatagatagtagctataatatattctatgatggtattgaagaagatgacaaccttggcatattgatcatttaacacagacatggtatcaacagatagcttgaatgaaagagaatcagtaattggaataagcgtcttctcgatagagtgtccgtataccaacatgtctgatattttgatgtattccattaaattatttagttttttctttttattctcgttaaacagcatttctgtcaacggaccccaacatcgttgaccgattaagttttgattgatttttccgtgtaaggcgtatctagtcagatcgtatagcctatccaataatccatcgtctgtgtgtagatcacatcgtacactttttaattctctatagaagagcgacagacatctggagcaattacagacagcaatttctttattctctacagatgtaagatacttgaagacattcctatgatgatgcagaattttggataacacggtattgatggtatctgttaccataattcctttgatggctgatagtgtcagagcacaagatttccaatctttgacaatttttagcaccattatctttgttttgatatctatatcagacagcatggtgcgtctgacaacacagggattaagacggaaagatgaaatgattctctcaacatcttcaatagataccttgctattttttctggcattatctatatgtgcgagaatatcctctagagaatcagtatcctttttgatgatagtggatctcaatgacatgggacgtttaaaccttcttattctatcaccagattgcatggtgatttgtcttctttcttttatcataatgtaatctctaaattcatcggcaaattgtctatatctaaaatcataatatgagatgtttacctctacaaatatctgttcgtccaatgttagagtatttacatcagttttgtattccaaattaaacatggcaacggatttaattttatattcctctattaagtcctcgtcgataataacagaatgtagataatcatttaatccgtcgtacatggttggaagatgcttgttgacaaaatctttaattgtcttgatgaaggtgggactatatctaacatcttgattaataaaatttataacattgtccataggatactttgtaactagttttatacacatctcttcatcggtaagtttagacagaatatcgtgaacaggtggtatattatattcatcagatatacgaagaacaatgtccaaatctatattgtttaatatattatatagatgtagcgtagctcctacaggaatatctttaactaagtcaatgatttcatcaaccgttagatctattttaaagttaatcatataggcattgatttttaaaaggtatgtagccttgactacattctcattaattaaccattccaagtcattgtgtgtaagaagattatattctatcataagcttgactacatttggtcccgataccattaaagaattcttatgatataaggaaacagattttaggtactcatctactctacaagaattttggagagccttaacgatatcagtgacgtttattatttcaggaggaaagaatctaacattgagaatatcggaattaatagcttccagatacagtgattttggcaatagtccgtgtaatccataatccagtaacacgagctggtgcttgctagacaccttttcaatgtttaatttttttgaaataagctttgataaagccttcctcgcaaattccggatacatgaacatgtcggcgacatgattaagtattgttttttcattatttttatattttctcaacaagttctcaataccccaatagatgatagaatatcacccaatgcgtccatgttgtctatttccaacaggtcgctatatccaccaatagaagtttttccaaaaaagattctaggaacagttctaccaccagtaatttgttcaaaataatcccgcaattcattttcgggtttaaattctttaatatcgacaatttcatacgctcctcttttgaaactaaacttatttagaatatccagtgcatttctacaaaaaggacatgtatacttgacaaaaattgtcactttgttattggccaacctttgttgtacaaattcctcggccattttaatatttaagtgatataaaactatctcgacttatttaactctttagtcgagatatatggacgcagatagctatatgatagccaactacagaaggcaaacgctataaaaaacataattacgacgagcatatttataaatatttttattcagcattacttgatatagtaatattaggcacagtcaaacattcaaccactctcgatacattaactctctcattttctttaacaaattctgcaatatcttcgtaaaaagattcttgaaactttttagaatatctatcgactctagatgaaatagcgttcgtcaacatactatgttttgtatacataaaggcgcccattttaacagtttctagtgacaaaatgctagcgatcctaggatcctttagaatcacatagattgacgattcgtctctcttagtaactctagtaaaataatcatacaatctagtacgcgaaataatattatccttgacttgaggagatctaaacaatctagttttgagaacatcgataagttcatcgggaatgacatacatactatctttaatagaactcttttcatccagttgaatggattcgtccttaaccaactgattaatgagatcttctattttatcattttccagatgatatgtatgtccattaaagttaaattgtgtagcgcttctttttagtctagcagccaatactttaacatcactaatatcgatatacaaaggagatgatttatctatggcattaagaattcgtttttcgacatccgtcaaaaccaattcctttttgcctgtatcatccagttttccatcctttgtaaagaaattattttctactagactattaataagactgataaggattcctccataattgcacaatccaaactttttaacaaaactagactttacgagatctacaggaatgcgtacttcaggttttttagcttgtgattttttcttttgcggacattttctagtaaccaactcatctaccatttcattgattttagcagtgaaataagctttcaatgcacgggcactgatactattgaaaacgagttgatcttcaaattccgccatttaagttcaccaaacaacttttaaatacaaatatatcaatagtagtagaataagaactataaaaaaaataataattaaccaaccccaacaaccggtattattagttgatgtggtagttttctcatcacttagaacagatttaacaatttctataaagtctgtcaaatcatcttccggagaccccataaatacaccaaatatagcggcgtacaacttatccatttatacattgaatattggcttttctttatcgctatcttcatcatattcatcatcaatatcaacaagtcccagattacgagccagatcttcttctacattttcagtcattgatacacgttcactatctccagagagtccgataacgttagccaccacttctctatcaatgattagtttcttgagcgcgaaagtaatttttgtttccgttccggatctatagaagacgataggtgtgataattgccttggccaattgtctttctcttttactgagtgattctagttcaccttctatagatctgagaatggatgattctccagtcgaaacatattctaccatggatccgtttaatttgttgatgaagatggattcatccttaaatgttttctctgtaatagtttccaccgaaagactatgcaaagaatttggaatgcgttccttgtgcttaatgtttccatagacggcttctagaagttgatacaacataggactagccgcggtaacttttatttttagaaagtatccatcgcttctatcttgtttagatttatttttataaagtttagtctctccttccaacataataaaagtggaagtcatttgactagataaactatcagtaagttttatagagatagacgaacaattagcgtattgagaagcatttagtgtaacgtattcgatacattttgcattagatttactaatcgattttgcatactctataacacccgcacaagtctgtagagaatcgctagatgcagtaggtcttggtgaagtttcaactctcttcttgattaccttactcatgattaaacctaaataattgtactttgtaatataatgatatatattttcactttatctcatttgagaataaaaatgtttttgtttaaccactgcatgatgtacagatttcggaatcgcaaaccaccagtggttttattttatccttgtccaatgtgaattgaatgggagcggatgcgggtttcgtacgtagatagtacattcccgtttttagaccgagactccatccgtaaaaatgcatactcgttagtttggaataactcggatctgctatatggatattcatagattgactttgatcgatgaaggctcccctgtctgcagccatttttatgatcgtcttttgtggaatttcccaaatagttttataaactcgcttaatatcttctggaaggtttgtattctgaatggatccaccatctgccataatcctattcttgatctcatcattccataattttctctcggttaaaactctaaggagatgcggattaactacttgaaattctccagacaatactctccgagtgtaaatattactggtatacggttccaccgactcattatttcccaaaatttgagcagttgatgcagtcggcataggtgccaccaataaactatttctaagaccgtatgttctgattttatcttttagaggttcccaattccaaagatccgacggtacaacattccaaagatcatattgtagaataccgttactggcgtacgatcctacatatgtatcgtatggtccttccttctcagctagttcacaactcgcctctaatgcaccgtaataaatggtttcgaagatcttcttatttagatcttgtgcttccaggctatcaaatggataatttaagagaataaacgcgtccgctaatccttgaacaccaataccgataggtctatgtctcttattagagatttcagcttctggaataggataataattaatatctataattttattgagatttctgacaattactttgaccacatccttcagtttgagaaaatcaaatcgcccatctattacaaacatgttcaaggcaacagatgccagattacaaacggctacctcattagcatccgcatattgtattatctcagtgcaaagattactacacttgatagttcctaaattttgttgattactctttttgttacacgcatccttataaagaatgaatggagtaccagtttcaatctgagattctataatcgctttccagacgactcgagcctttattatagatttgtatctcctttctctttcgtatagtgtatacaatcgttcgaactcgtctccccaaacattgtccaatccaggacattcatccggacacatcaacgaccactctccgtcatccttcactcgtttcataaagagatcaggaatccaaagagctataaatagatctctggttctatgttcctcgtttcctgtattctttttaagatcgaggaacgccataatatcagaatgccacggttccaagtatatggccataactccaggccgtttgtttcctccctgatctatgtatctagcggtgttattataaactctcaacattggaataataccgtttgatataccattggtaccggagatatagcttccactggcacgaatattactaattgatagacctattccccctgccattttagagattaatgcgcatcgttttaacgtgtcatagataccctctatgctatcatcgatcatgttaagtagaaaacagctagacatttggtgacgactagttcccgcattaaataaggtaggagaagcgtgcgtaaaccatttttcagaaagtagattgtacgtctcaatagctgagtctatatcccattgatgaattcctactgcgacacgcattaacatgtgctgaggtctttcaacgatcttgttgtttattttcaacaagtaggatttttccaaagttttaaaaccaaaatagttgtatgaaaagtctcgttcgtaaataataaccgagttgagtttatccttatatttgttaactatatccatggtgatacttgaaataatcggagaatgtttcccatttttaggattaacatagttgaataaatcctccatcacttcactaaatagtttttttgtttccttgtgtagatttgatacggctattctggcggctagaatggcataatccggatgttgtgtagtacaagtggctgctatttcggctgccagagtgtccaattctaccgttgttactccattatatattccttgaataaccttcatagctattttaataggatctatatgatccgtgtttaagccataacataattttctaatacgagacgtgattttatcaaacatgacattttccttgtatccatttcgtttaatgacaaacatttttgttggtgtaataaaaaaattatttaacttttcattaatagggatttgacgtatgtagcgtacaaaatgattgttcctggtatatagataaagagtcctatatatttgaaaatcgttacggctcgattaaactttaatgattgcatagtgaatatatcattaggatttaactccttgactatcatggcggcgccagaaattaccatcaaaagcattaatacagttataccgatcgcagttagaacggttatagcatccaccatttatatctaaaaattagatcaaagaatatgtgacaaagtcctagttgtatactgagaattgacgaaacaatgtttcttacatatttttttcttattagtaaccgacttaatagtaggaactggaaaactagacttgattattctataagtatagatacccttccaaataatattctctttgataaaagttccagaaaatgtagaattttttaaaaagttatcttttgctattaccaagattgtgtttagacgcttattattaatatgagtgatgaaatccacaccgcctctagatatcgcctttatttccacattagatggtaaatccaatagtgaaactatctttttaggaatgtatggactcgcgtttagaggagtaaacgtcttaggcgtcggaaaggatgattcatcaaacgaataaacaatttcacaaatggatgttaatgtattagtaggaaattttttgacgctattggaattgaagattctaatggatgatgttctacctatttcatccgataacatgttaatttccgacaccaacggttttaatatttcgatgatatacggtagtctctctttcggacttatatagcttattccacaatacgagtcattatatactccaaaaaacaaaataactagtataaaatctgtatcgaatgggaaaaacgaaattatcgacataggtatagaatccggaacattgaacgtattaatacttaattctttttctgtggtaagtaccgataggttattgacattgtatggttttaaatattctataacttgagacttgatagatattagtgatgaattgaaaattatttttatcaccacgtgtgtttcaggatcatcgtcgacgcccgtcaaccaaccgaacggagtaaaataaatatcattaatatatgctctagatattagtatttttatcaatcctttgattatcatcttctcgtaggcgaatgattccatgatcaagagtgatttaagaacatcctccggagtattaatgggcttagtaaacagtccatcgttgcaataataaaagttatccaagttaaaggatattatgcattcgtttaaagatatcacctcatctgacggagacaattttttggtaggttttagagactttgaagctacttgtttaacaaagttattcatcgtcgtctactattctatttaattttgtagttaatttatcacatatcacattaattgactttttggtccacttttccatacgtttatattcttttaatcctgcgttatccgtttccgttatatccagggatagatcttgcaagttaaatagaatgctcttaaataatgtcattttcttatccgctaaaaatttaaagaatgtataaacctttttcagagatttgaaactcttaggtggtgtcctagtacacaatatcataaacaaactaataaacattccacattcagattccaacagctgattaacttccacattaatacagcctattttcgctccaaatgtacattcgaaaaatctgaataaaacatcgatgtcacaatttgtattatccaatacagaatgtttgtgattcgtgttaaaaccatcggagaaggaatagaaataaaaattattatagtggtggaattcagttggaatattgcctccggagtcataaaaggatactaaacattgttttttatcataaattacacatttccaatgagacaaataacaaaatccaaacattacaaatctagaggtagaacttttaattttgtctttaagtatatacgataagatatgtttattcataaacgcgtcaaatttttcatgaatcgctaaggagtttaagaatctcatgtcaaattgtcctatataatccacttcggatccataagcaaactgagagactaagttcttaatacttcgattgctcatccaggctcctctctcaggctctattttcatcttgacgacctttggattttcaccagtatgtattcctttacgtgataaatcatcgattttcaaatccatttgtgagaagtctatcgccttagatactttttcccgtagtcgaggtttaaaaaaatacgctaacggtatactagtaggtaactcaaagacatcatatatagaatggtaacgcgtctttaactcgtcggttaactctttcttttgatcgagttcgtcgctactattgggtctgctcaggtgccccgactctactagttccaacatcataccgataggaatacaagacactttgccggcggttgtagatttatcatatttttccactacatatccgttacaatttgttaaaaatttagatacatctatattgctacataatccagctagtgaatatatatgacataataaattggtaaatcctagttctggtattttactaattactaaatctgtatatctttccatttatcatggaaaagaatttaccagatatcttcttttttccaaactgcgttaatgtattctcttacaaatattcacaagatgaattcagtaatatgagtaaaacggaacgtgatagtttctcattggccgtgtttccagttataaaacatagatggcataacgcacacgttgtaaaacataaaggaatatacaaagttagtacagaagcacgtggaaaaaaagtatctcctccatcactaggaaaacccgcacacataaacctaaccgcgaagcaatatatatacagtgaacacacaataagctttgaatgttatagttttctaaaatgtataacaaatacagaaatcaattcgttcgatgagtatatattaagaggactattagaagctggtaatagtttacagatattttccaattccgtaggtaaacgaacagatactataggtgtactagggaataagtatccatttagcaaaattccattggcctcattaactcctaaagcacaacgagagatattttcagcgtggatttctcatagacctgtagttttaactggaggaactggagtgggtaagacgtcacaggtacccaagttattgctttggtttaattatttatttggtggattctctactctagataaaatcactgactttcacgaaagaccagtcattctatctcttcctaggatagctttagttagattgcatagcaataccattttaaaatcattgggatttaaggtactagatggatctcctatttctttacggtacggatctataccggaagaattaataaacaaacaaccaaaaaaatatggaattgtattttctacccataagttatctctaacaaaactatttagttatggcactcttattatagacgaagttcatgagcatgatcaaataggagatattattatagcagtagcgagaaagcatcatacgaaaatagattctatgtttttaatgactgccacgttagaggatgacagggaacggctaaaagtatttttacctaatcccgcatttatacatattcctggagatacactgtttaaaattagcgaggtatttattcataataagataaatccatcttccagaatggcatacatagaagaagaaaagagaaatttagttactgctatacagatgtatactcctcctgatggatcatccggtatagtctttgtggcatccgttgcacagtgtcacgaatataaatcatatttagaaaaaagattaccgtatgatatgtatattattcatggtaaggtcttagatatagacgaaatattagaaaaagtgtattcatcacctaatgtatcgataattatttctactccttatttggaatccagcgttactatacgcaatgttacacacatttatgatatgggtagagtttttgtccccgctccttttggaggatcgcaacaatttatttctaaatctatgagagatcaacgaaaaggaagagtaggaagagttaatcctggtacatacgtctatttctatgatctgtcttatatgaagtctatacagcgaatagattcagaatttctacataattatatattgtacgctaataagtttaatctaacactccccgaagatttgtttataatccctacaaatttggatattctatggcgtacaaaggaatatatagactcgttcgatattagtacagaaacatggaataaattattatccaattattatatgaagatgatagagtatgctaaactttatgtactaagtcctattctcgctgaggagttggataactttgagaggacgggagaattaactagtattgtacgagaagccattttatctctaaatttacaaattaagattttaaattttaaacataaagatgatgatacgtatatacacttttgtaaaatattattcggtgtctataacggaacaaacgctactatatattatcatagacctctaacgggatatatgaatatgatttcagatactatatttgttcctgtagataataactaaaaatcaaactctaatgaccacatctttttttagagatgaaaaattttccacatctccttttgtagacacgactaaacattttgcagaaaaaagtttattagtgtttagataatcgtatacttcatcagtgtagatagtaaatgtgaacagataaaaggtattcttgctcaatagattggtaaattccatagaatatattaatcctttcttcttgagatcccacatcatttcaaccagagacgttttatccaatgatttacctcgtactataccacatacaaaactagattttgcagtgacgtcgtacctggtattcctaccaaacaaaattttacttttagttcttttagaaaattctaaggtagaatctctatttgccaatatgtcatctatggaattaccactagcaaaaaatgatagaaatatatattgatacatcgcagctggttttgatctactatactttaaaaacgaatcagattccataattgcctgtatatcatcagctgaaaaactatgttttacacgtattccttcggcatttctttttaatgatatatcttgtttagacaatgataaagttatcatgtccatgagagacgcgtctccgtatcgtataaatatttcattagatgttagacgcttcattaggggtatacttctataaggtttcttaatcagtccatcattggttgcgtcaagaactactatcggatgttgttgggtatctctagtgttacacatggccttactaaagtttgggtaaataactatgatatctctattaattatagatgcatatatttcattcgtcaaggatattagtatcgacttgctatcgtcattaatacgtgtaatgtaatcatataaatcatgcgatagccaaggaaaatttaaatagatgttcatcatataatcgtcgctataattcatattaatacgttgacattgactaatttgtaatatagcctcgccacgaagaaagctctcgtattcagtttcatcgataaaggataccgttaaatataactggttgccgatagtctcatagtctattaagtggtaagtttcgtacaaatacagaatccctaaaatattatctaatgttggattaatctttaccataactgtataaaatggagacggagtcataactattttaccgtttgtacttactggaatagatgaaggaataatctccggacatgctggtaaagacccaaatgtctgtttgaagaaatccaatgttccaggtcctaatctcttaacaaaaattacgatattcgatcccgatatcctttgcattctatttaccagcatatcacgaactatattaagattatctatcatgtctattctcccaccgttatataaatcgcctccgctaagaaacgttagtatatccatacaatggaatacttcatttctaaaatagtattcgttttctaattctttaatgtgaaatcgtatactagaaagggaaaaattatctttgagttttccgttagaaaagaaccacgaaactaatgttctgattgcgtccgattccgttgctgaattaatggatttacaccaaaaactcatataacttctagatgtagaagcattcgctaaaaaattagtagaatcaaaggatataagtagatgttccaacaagtgagcaattcccaagatttcatctatatcattctcgaatccgaaattagaaattcccaagtagatatcctttttcatccgatcgttgatgaaaatacgaactttattcggtaagacaatcatttactaaggagtaaaataggaagtaatgttcgtatgtcgttatcatcgtataaattaaaggtgtgttttttaccattaagtgacattataattttaccaatattggaattataatataggtgtatttgcgcactcgcgacggttgatgcatcggtaaatatagctgtatctaatgttctagtcggtatttcatcatttcgctgtctaataatagcgttttctctatctgtttccattacagctgcctgaagtttattggtcggataatatgtaaaataataagaaatacatacgaataacaaaaataaaataagatataataaagatgccatttagagatctaattttgtttaacttgtccaaattcctacttacagaagatgaggaatcgttggagatagtgtcttccttatgtagaggatttgaaatatcttataatgacttgataacttactttccagataggaaataccataaatatatttataaagtatttgaacatgtagatttatcggaggaattaagtatggaattccatgatacaactctgagagatttagtctatcttagattgtacaagtattccaagtgtatacggccgtgttataaattaggagataatctaaaaggcatagttgttataaaggacaggaatatttatattagggaagcaaatgatgacttgatagaatatctcctcaaggaatacactcctcagatttatacatattctaatgagcgcgtccccataactggttcaaaattaattctttgtggattttctcaagttacatttatggcgtatacaacgtcgcatataacaacaaataaaaaggtagatgttctcgtttccaaaaaatgtatagatgaactagtcgatccaataaattatcaaatacttcaaaatttatttgataaaggaagcggaacaataaacaaaatactcaggaagatattttattcggtaacaggtggccaaactccataggtagctttttctatttcggattttagaatttccaaattcaccagcgatttatcggttttggtgaaatccaaggatttattaatgtccacaaatgccatttgttttgtctgtggattgtatttgaaaatggaaacgatgtagttagatagatgcgctgcgaagtttcctattagggttccgcgcttcacgtcacccagcatacttgaatcaccatcctttaaaaaaaatgataagatatcaacatggagtatatcatactcgaattttaattcttctactgactcactgacattttcacaaatactacaatacggtttaccgaaaataatcagtacgttcttcatttatgggtatcaaaaacttaaaatcgttactgctggaaaataaatcactgacgatattagatgataatttatacaaagtatacaatggaatatttgtggatacaatgagtatttatatagccgtcgccaattgtgtcagaaacttagaagagttaactacggtattcataaaatacgtaaacggatgggtaaaaaagggagggcatgtaaccctttttatcgatagaggaagtataaaaattaaacaagacgttagagacaagagacgtaaatattctaaattaaccaaggacagaaaaatgttagaattagaaaagtgtacatccgaaatacaaaatgttaccggatttatggaagaagaaataaaggcagaaatgcaattaaaaatcgataaactcacatttcaaatatatttatctgattctgataacataaaaatatcattgaatgagatactaacacatttcaacaataatgagaatgttacattattttattgtgatgaacgagacgcagaattcgttatgtgtctcgaggctaaaacacatttctctaccacaggagaatggccgttgataataagtaccgatcaggatactatgctatttgcatctgctgataatcatcctaagatgataaaaaacttaactcaactgtttaaatttgttccctcggcagaggataactatttagcaaaattaacggcgttagtgaatggatgtgatttctttcctggactctatggggcatctataacacccaccaacttaaacaaaatacaattgtttagtgattttacaatcgataatatagtcactagtttggcaattaaaaattattatagaaagactaactctaccgtagacgtgcgtaatattgttacgtttataaacgattacgctaatttagacgatgtctactcgtatattcctccttgtcaatgcactgttcaagaatttatattttccgcattagatgaaaaatggaatgaatttaaatcatcttatttagaaagcgtgccgttaccctgccaattaatgtacgcgttagaaccacgcaaggagattgatgtttcagaagttaaaactttatcatcttatatagatttcgaaaatactaaatcagatatcgatgttataaaatctatatcctcgatcttcggatattctaacgaaaactgtaacacgatagtattcggcatctataaggataatttactactgagtataaataattcattttactttaacgatagtctgttaataaccaatactaaaagtgataatataataaatataggttactagattaaaaatggtgttccaactcgtgtgctctacatgcggtaaagatatttctcacgaacgatataaattgattatacgaaaaaaatcattaaaggatgtactcgtcagtgtaaagaacgaatgttgtaggttaaaattatctacacaaatagaacctcaacgtaacttaacagtgcaacctctattggatataaactaatatggatccggttaattttatcaagacatatgcgcctagaggttctattatttttattaattataccatgtcattaacaagtcatttgaatccatcgatagaaaaacatgtgggtatttattatggtacgttattatcggaacacttggtagttgaatctacctatagaaaaggagttcgaatagtcccattggatagtttttttgaaggatatcttagtgcaaaagtatacatgttagagaatattcaagttatgaaaatagcagctgatacgtcattaactttattgggtattccgtatggatttggtcatgatagaatgtattgttttaaattggtagctgactgttataaaaatgccggtattgatacatcgtctaaacgaatattgggcaaagatatttttctgagccaaaacttcacagacgataatagatggataaagatatatgattctaataatttaacattttggcaaattgattaccttaaagggtgagttaatatgcataactactcctccgttgttttttccctcgttctttttcttaacgttgtttgccatcactctcataatgtaaagatattctaaaatggtaaacttttgcatatcggacgcagaaattggtataaatgttgtaattgtattatttcccgtcaatggactagtcacagctccatcagttttatatcctttagagtatttctcactcgtgtctaacattctagagcattccatgatctgtttatcgttgatattggccggaaagatagattttttattttttattatattactattggcaattgtagatataacttctggtaaatatttttctaccttttcaatctcttctattttcaagccggctatatattctgctatattgttgctagtatcaataccttttctggctaagaagtcatatgtggtattcactatatcagttttaactggtagttccattagcctttccacttctgcagaataatcagaaattggttctttaccagaaaatccagctactataataggctcaccgatgatcattggcaaaatcctatattgtaccagattaatgagagcatatttcatttccaataattctgctagttcttgagacattgatttatttgatgaatctagttggttctctagatactctaccatttctgccgcatacaataacttgttagataaaatcagggttatcaaagtgtttagcgtggctagaatagtgggcttgcatgtattaaagaatgcggtagtatgagtaaaccgttttaacgaattatatagtctccagaaatctgtggcgttacatacatgagccgaatgacatcgaagattgtccaatatttttaatagctgctctttgtccattatttctatatttgactcgcaacaattgtagataccattaatcaccgattcctttttcgatgccggacaatagcacaattgtttagctttggactctatgtattcagaattaatagatatatctctcaatacagattgcactatacattttgaaactatgtcaaaaattgtagaacgacgctgttctgcagccatttaactttaaataatttacaaaaatttaaaatgagcatccgtataaaaatcgataaactgcgccaaattgtggcatatttttcagagttcagtgaagaagtgtctataaatgtagactcgacggatgagttaatgtatatttttgccgccttgggcggatctgtaaacatttgggcaattatacctctaagtgcatcagtgttttaccgaggagccgaaaatattgtgtttaatcttcctgtgtccaaggtaaaatcgtgtttgtgtagttttcacaatgatgccatcatagatatagaacctgatctggaaaataatctagtaaaactttctagttatcatgtagtaagtgtcgattgtaacaaggaactgatgcctattaggacagatactactatttgtctaagtatagatcaaaagaaatcttacgtgtttaattttcacaagtatgaagaaaaatgttgtggtagaaccgtcattcatctagaatggttgttgggctttatcaagtgtattagtcagcatcagcatctggctattatgtttaaagatgacaatattattatgaagactcctggtaatactgatgcgttttccagggaatattctatgactgaatgttctcaagaactacaaaagttttctttcaaaatagctatctcgtctctcaacaaactacgaggattcaaaaagagagtcaatgtttttgaaactagaatcgtaatggataatgacgataacattttaggaatgttgttttcggatagagttcaatcctttaagatcaacatctttatggcgtttttagattaatactttcaatgagataaatatgggtggcggagtaagtgttgagctccctaaacgggatccgcctccgggagtacccactgatgagatgttattaaacgtggataaaatgcatgacgtgatagctcccgctaagcttttagaatatgtgcatataggaccactagcaaaagataaagaggataaagtaaagaaaagatatccagagtttagattagtcaacacaggacccggtggtctttcggcattgttaagacaatcgtataatggaaccgcacccaattgctgtcgcacttttaatcgtactcattattggaagaaggatggaaagatatcagataagtatgaagagggtgcagtattagaatcgtgttggccagacgttcacgacactggaaaatgcgatgttgatttattcgactggtgtcagggggatacgttcgatagaaacatatgccatcagtggatcggttcagcctttaataggagtaatagaactgtagagggtcaacaatcgttaataaatctgtataataagatgcaaacattatgtagtaaagatgctagtgtaccaatatgcgaatcatttttgcattatttacgcgcacacaatacagaagatagcaaagagatgatcgattatattctaagacaacagtctgcggactttaaacagaaatatatgagatgtagttatcccactagagataagttagaagagtcattaaaatatgcggaacctcgagaatgttgggatccagagtgttcgaatgccaatgttaatttcttactaacacgtaattataataatttaggactttgcaatattgtacgatgtaataccagcgtgaacaacttacagatggataaaacttcctcattaagattgtcatgtggattaagcaatagtgatagattttctactgttcccgtcaatagagcaaaagtagttcaacataatattaaacactcgttcgacctaaaattgcatttgatcagtttattatctctcttggtaatatggatactaattgtagctatttaaatgggtgccgcggcaagcatacagacgacggtgaatacactcagcgaacgtatctcgtctaaattagaacaagaagcgaacgctagtgctcaaacaaaatgtgatatagaaatcggaaatttttatatccgacaaaaccatggatgtaacctcactgttaaaaatatgtgctctgcggacgcggatgctcagttggatgctgtgttatcagccgctacagaaacatatagtggattaacaccggaacaaaaagcatacgtgccagctatgtttactgctgcgttaaacattcagacgagtgtaaacactgttgttagagattttgaaaattatgtgaaacagacttgtaattctagcgcggtcgtcgataacaaattaaagatacaaaacgtaatcatagatgaatgttacggagccccaggatctccaacaaatttggaatttattaatacaggatctagcaaaggaaattgtgccattaaagcgttgatgcaattgacgactaaggccactactcaaatagcacctagacaagttgctggtacaggagttcagttttatatgattgttatcggtgttataatattggcagcgttgtttatgtactatgccaagcgtatgttgttcacatccaccaatgataaaatcaaacttattttagccaataaggaaaacgtccattggactacttacatggacacattctttagaacttctccgatggttattgctaccacggatatgcaaaactgaaaatatattgataatattttaatagattaacatggaagttatcgctgatcgtctagacgatatagtgaaacaaaatatagcggatgaaaaatttgtagattttgttatacacggtctagagcatcaatgtcctgctatacttcgaccattaattaggttgtttattgatatactattatttgttatagtaatttatatttttacggtacgtctagtaagtagaaattatcaaatgttgttggtggtgctagtcatcacattaactattttttattactttatactataatagtactagactgacttctaacaaacatctcacctgccataaataaatgcttgatattaaagtcttctatttctaacactattccatctgtggaaaataatactctgacattatcgctaattgacacatcggtgagtgatatgcctataaagtaataatcttctttgggcacatataccagtgtaccaggttctaacaacctatttactggtgctcctgtagcatactttttctttaccttgagaatatccatcgtttgcttggtcaatagcgatatgtgattttttatcaaccactcaaaaaagtaattggagtgttcatatcctctacgggctattgtctcatggccgtgtatgaaatttaagtaacacgactgtggtagatttgttctatagagccgattgccgcaaatagatagaactaccaatatgtctgtacaaatgttaaacattaattgattaacagaaaaaacaatgttcgttctgggaatagaaaccagatcaaaacaaaattcgttagaatatatgccacgtttatacatggaatataaaataactacagtttgaaaaataacagtatcatttaaacatttaacttgcggggttaatctcacaactttactgtttttgaactgttcaaaatatagcatcgatccgtgagaaatacgtttagccgcctttaatagaggaaatcccaccgcctttctggatctcaccaacgacgatagttctgaccagcaactcatttcttcatcatccacctgttttaacatataataggcaggagatagatatccgtcattgcaatattccttctcgtaggcacacaatctaatattgataaaatctccattctcttctctgcatttattatcttgtctcggtggctgattaggctgtggtcttggtttaggccttggtctatcgttgttgaatctattttggtcattaaatctttcatttcttcctggtatatttctatcacctcgtttggttggatttttgtctatattatcgtttgtaacatcggtacgggtattcatttatcacaaaaaaaacttctctaaatgagtctactgctagaaaacctcatcgaagaagataccatattttttgcaggaagtatatctgagtatgatgatttacaaatggttattgccggcgcaaaatccaaatttccaagatctatgctttctatttttaatatagtacctagaacgatgtcaaaatatgagttggagttgattcataacgaaaatatcacaggagcaatgtttaccacaatgtataatataagaaacaatttgggtctaggagatgataaactaactattgaagccattgaaaactatttcttggatcctaacaatgaagttatgcctcttattattaataatacggatatgactgccgtcattcctaaaaaaagtggtaggagaaagaataagaacatggttatcttccgtcaaggatcatcacctatcttgtgcattttcgaaactcgtaaaaagattaatatttataaagaaaatatggaatccgcgtcgactgagtatacacctatcggagacaacaaggctttgatatctaaatatgcgggaattaatgtcctgaatgtgtattctccttccacatccataagattgaatgccatttacggattcaccaataaaaataaactagagaaacttagtactaataaggaactagaatcgtatagttctagccctcttcaagaacccattaggttaaatgattttctgggactattggaatgtgttaaaaagaatattcctctaacagatattccgacaaaggattgattactataaatggagaatgttcctaatgtatactttaatcctgtgtttatagagcccacgtttaaacattctttattaagtgtttataaacacagattaatagttttatttgaagtattcgttgtattcattctaatatatgtattttttagatctgaattaaatatgttcttcatgcctaaacgaaaaatacccgatcctattgatagattacgacgtgctaatctagcgtgtgaagacgataaattaatgatctatggattaccatggatgacaactcaaacatctgcgttatcaataaatagtaaaccgatagtgtataaagattgtgcaaagcttttgcgatcaataaatggatcacaaccagtatctcttaacgatgttcttcgcagatgatgattcattttttaagtatttggctagtcaagatgatgaatcttcattatctgatatattgcaaatcactcaatatctagactttctgttattattattgatccaatcaaaaaataaattagaagctgtgggtcattgttatgaatctctttcagaggaatacagacaattgacaaaattcacagactttcaagattttaaaaaactgtttaacaaggtccctattgttacagatggaagggtcaaacttaataaaggatatttgttcgactttgtgattagtttgatgcgattcaaaaaagaatcctctctagctaccaccgcaatagatcctgttagatacatagatcctcgtcgcaatatcgcattttctaacgtgatggatatattaaagtcgaataaagtgaacaataattaattctttattgtcatcatgaacggcggacatattcagttgataatcggccccatgttttcaggtaaaagtacagaattaattagacgagttagacgttatcaaatagctcaatataaatgcgtgactataaaatattctaacgataatagatacggaacgggactatggacgcatgataagaataattttgaagcattggaagcaactaaactatgtgatgtcttggaatcaattacagatttctccgtgataggtatcgatgaaggacagttctttccagacattgtttaattctgtgagcgtatggcaaacggtaccgagctcttttttttttttttttttttggcatataaataagtcgactccctatcagtgatagagaatggtgaagcgtgagaaaaatgtcatctatggccctgagcctctccatcctttggaggatttgactgccggcgaaatgctgtttcgtgctctccgcaagcactctcatttgcctcaagccttggtcgatgtggtcggcgatgaatctttgagctacaaggagttttttgaggcaaccgtcttgctggctcagtccctccacaattgtggctacaagatgaacgacgtcgttagtatctgtgctgaaaacaatacccgtttcttcattccagtcatcgccgcatggtatatcggtatgatcgtggctccagtcaacgagagctacattcccgacgaactgtgtaaagtcatgggtatctctaagccacagattgtcttcaccactaagaatattctgaacaaagtcctggaagtccaaagccgcaccaactttattaagcgtatcatcatcttggacactgtggagaatattcacggttgcgaatctttgcctaatttcatctctcgctattcagacggcaacatcgcaaactttaaaccactccacttcgaccctgtggaacaagttgcagccattctgtgtagcagcggtactactggactcccaaagggagtcatgcagacccatcaaaacatttgcgtgcgtctgatccatgctctcgatccacgcgtgggcactcagctgattcctggtgtcaccgtcttggtctacttgcctttcttccatgctttcggctttagcattactttgggttactttatggtcggtctccgcgtgattatgttccgccgttttgatcaggaggctttcttgaaagccatccaagattatgaagtccgcagtgtcatcaacgtgcctagcgtgatcctgtttttgtctaagagcccactcgtggacaagtacgacttgtcttcactgcgtgaattgtgttgcggtgccgctccactggctaaggaggtcgctgaagtggccgccaaacgcttgaatcttccagggattcgttgtggcttcggcctcaccgaatctaccagcgctaacattcactctctcggggatgagtttaagagcggctctttgggccgtgtcactccactcatggctgctaagatcgctgatcgcgaaactggtaaggctttgggcccgaaccaagtgggcgagctgtgtatcaaaggccctatggtgagcaagggttatgtcaataacgttgaagctaccaaggaggccatcgacgacgacggctggttgcattctggtgattttggatattacgacgaagatgagcatttttacgtcgtggatcgttacaaggagctgatcaaatacaagggtagccaggttgctccagctgagttggaggagattctgttgaaaaatccatgcattcgcgatgtcgctgtggtcggcattcctgatctggaggccggcgaactgccttctgctttcgttgtcaagcagcctggtaaagaaattaccgccaaagaagtgtatgattacctggctgaacgtgtgagccatactaagtacttgcgtggcggcgtgcgttttgttgactccatccctcgtaacgtaacaggcaaaattacccgcaaggagctgttgaaacaattgttggagaaggccggcggtggttccggagccacgaacttctctctgttaaagcaagcaggagacgtggaagaaaaccccggtcccatggcctcctccgaggacgtcatcaaggagttcatgcgcttcaaggtgcgcatggagggctccgtgaacggccacgagttcgagatcgagggagagggcgagggccgcccctacgagggcacccagaccgccaagctgaaggtgaccaagggcggccccctgcccttcgcctgggacatcctgtcccctcagttccagtacggctccaaggcctacgtgaagcaccccgccgacatccccgactacttgaagctgtccttccccgagggcttcaagtgggagcgcgtgatgaacttcgaggacggcggcgtggtgaccgtgacccaggactcctccctgcaggacggcgagttcatctacaaggtgaagctgcgcggcaccaacttcccctccgacggccccgtaatgcagaagaagaccatgggctgggaggcctccaccgagcggatgtaccccgaggacggcgccctgaagggcgagatcaagatgaggctgaagctgaaggacggcggccactacgacgccgaggtcaagaccacctacatggccaagaagcccgtgcagctgcccggcgcctacaagaccgacatcaagctggacatcacctcccacaacgaggactacaccatcgtggaacagtacgagcgcgccgagggccgccactccaccggcgcctaattaattaatttttatcgatctaattcaacaatgtctggagagctcggatccttctgtgagcgtatggcaaacgaaggaaaaatagttatagtagccgcactcgatgggacatttcaacgtaaaccgtttaataatattttgaatcttattccattatctgaaatggtggtaaaactaactgctgtgtgtatgaaatgctttaaggaggcttccttttctaaacgattgggtgaggaaaccgagatagaaataataggaggtaatgatatgtatcaatcggtgtgtagaaagtgttacatcgactcataatattatattttttatctaaaaaactaaaaataaacattgattaaattttaatataatacttaaaaatggatgttgtgtcgttagataaaccgtttatgtattttgaggaaattgataatgagttagattacgaaccagaaagtgcaaatgaggtcgcaaaaaaactgccgtatcaaggacagttaaaactattactaggagaattattttttcttagtaagttacagcgacacggtatattagatggtgccaccgtagtgtatataggatctgctcccggtacacatatacgttatttgagagatcatttctataatttaggagtgatcatcaaatggatgctaattgacggccgccatcatgatcctattttaaatggattgcgtgatgtgactctagtgactcggttcgttgatgaggaatatctacgatccatcaaaaaacaactgcatccttctaagattattttaatttctgatgtgagatccaaacgaggaggaaatgaacctagtacggcggatttactaagtaattacgctctacaaaatgtcatgattagtattttaaaccccgtggcgtctagtcttaaatggagatgcccgtttccagatcaatggatcaaggacttttatatcccacacggtaataaaatgttacaaccttttgctccttcatattcagctgaaatgagattattaagtatttataccggtgagaacatgagactgactcgagttaccaaattagacgctgtaaattatgaaaaaaagatgtactaccttaataagatcgtccgtaacaaagtagttgttaactttgattatcctaatcaggaatatgactattttcacatgtactttatgctgaggaccgtgtactgcaataaaacatttcctactactaaagcaaaggtactatttctacaacaatctatatttcgtttcttaaatattccaacaacatcaactgaaaaagttagtcatgaaccaatacaacgtaaaatatctagcaaaaattctatgtctaaaaacagaaatagcaagagatccgtacgcggtaataaatagaaacgtactactgagatatactaccgatatagagtataatgatttagttactttaataaccgttagacataaaattgattctatgaaaactgtgtttcaggtatttaacgaatcatccataaattatactccggttgatgatgattatggagaaccaatcattataacatcgtatcttcaaaaaggtcataacaagtttcctgtaaattttctatacatagatgtggtaatatctgacttatttcctagctttgttagactagatactacagaaactaatatagttaatagtgtactacaaacaggcgatggtaaaaagactcttcgtcttcccaaaatgttagagacggaaatagttgtcaagattctctatcgccctaatataccattaaaaattgttagatttttccgcaataacatggtaactggagtagagatagccgatagatctgttatttcagtcgctgattaatcaattagtagagatgagataagaacattataataatcaataatatatcttatatcttatatcttatatcttatatcttgtttagaaaaatgctaatattaaaatagctaacgctagtaatccaatcggaagccatttgatatctataatagggtatctaatttcctgatttaaatagcggacagctatattctcggtagctactcgtttggaatcacaaacattatttacatctaatttactatctgtaatggaaacgtttcccaatgaaatggtacaatccgatacattgcattttgttatatttttttttaaagaggctggtaacaacgcatcgcttcgtttacatggctcgtaccaacaataatagggtaatcttgtatctattcctatccgtactatgcttttatcaggataaatacatttacatcgtatatcgtctttgttagcatcacagaatgcataaatttgttcgtccgtcatgataaaaatttaaagtgtaaatataactattatttttatagttgtaataaaaagggaaatttgattgtatactttcggttctttaaaagaaactgacttgataaaaatggctgtaatctctaaggttacgtatagtctatatgatcaaaaagagattaatgctacagatattatcattagtcatgttaaaaatgacgacgatatcggtaccgttaaagatggtagactaggtgctatggatggggcattatgtaagacttgtgggaaaacggaattggaatgtttcggtcactggggtaaagtaagtatttataaaactcatatagttaagcctgaatttatttcagaaattattcgtttactgaatcatatatgtattcactgcggattattgcgttcacgagaaccgtattccgacgatattaacctaaaagagttatcgggacacgctcttaggagattaaaggataaaatattatccaagaaaaagtcatgttggaacagtgaatgtatgcaaccgtatcaaaaaattactttttcaaagaaaaaggtttgtttcgtcaacaagttggatgatattaacgttcctaattctctcatctatcaaaagttaatttctattcatgaaaagttttggccattattagaaattcatcaatatccagctaacttattttatacagactactttcccatccctccgttgattattagaccggctattagtttttggatagatagtatacccaaagagaccaatgaattaacttacttattaggtatgatcgttaagaattgtaacttgaatgctgatgaacaggttatccagaaggcggtaatagaatacgatgatattaaaattatttctaataacactaccagtatcaatttatcatatattacatccggcaaaaataatatgattagaagttatatcgtcgcccgacgaaaagatcagaccgctagatctgtaattggtcccagtacatctatcaccgttaatgaggtaggaatgcccgcatatattagaaatacacttacagaaaagatatttgttaatgcctttacagtggataaagttaaacaactattagcgtcaaaccaagttaaattttactttaataaacgattaaaccaattaacaagaatacgccaaggaaagtttattaaaaataaaatacatttattgcctggtgattgggtagaagtagctgttcaagaatatacaagtattatttttggaagacagccgtctctacatagatacaacgtcatcgcttcatctatcagagctaccgaaggagatactatcaaaatatctcccggaattgccaactctcaaaatgctgatttcgacggggatgaggaatggatgatattagaacaaaatcctaaagctgtaattgaacaaagtattcttatgtatccgacgacgttactcaaacacgatattcatggagcccccgtttatggatctattcaagatgaaatcgtagcagcgtattcattgtttaggatacaagatctttgtttagatgaagtattgaacatcttggggaaatatggaagagagttcgatcctaaaggtaaatgtaaattcagcggtaaagatatctatacttacttgataggtgaaaagattaattatccgggtctcttaaaggatggtgaaattattgcaaacgacgtagatagtaattttgttgtggctatgaggcatctgtcattggctggactcttatccgatcataagtcgaacgtggaaggtatcaactttattatcaagtcatcttatgtttttaagagatatctatctatttacggttttggggtgacattcaaagatctgagaccaaattcgacgttcactaataaattggaggccatcaacgtagaaaaaatagaacttatcaaagaagcatacgccaaatatctcaacgatgtaagagacgggaaaatagttccattatctaaagctttagaggcggactatgtggaatccatgttatccaacttgacaaatcttaatatccgagagatagaagaacatatgagacaaacgctgatagatgatccagataataacctcctgaaaatggccaaagcgggttataaagtaaatcccacagaactaatgtatattctaggtacgtatggacaacaaaggattgatggtgaaccagcagagactcgagtattgggtagagttttaccttactatcttccagactctaaggatccagaaggaagaggttacattcttaattctttaacaaaaggattaacgggttctcaatattacttttcgatgctggttgccagatctcaatctactgatatcgtctgtgaaacatcacgtaccggaacactggctagaaaaatcattaaaaagatggaggatatggtggtcgacggatacggacaagtagttataggtaatacgctcatcaagtacgccgccaattataccaaaattctaggctcagtatgtaaacctgtagatcttatctatccagatgagtccatgacttggtatttggaaattagtgctctgtggaataaaataaaacagggattcgtttactctcagaaacagaaacttgcaaagaagacattggcgccgtttaatttcctagtattcgtcaaacccaccactgaggataatgctattaaggttaaggatctgtacgatatgattcataacgtcattgatgatgtgagagagaaatacttctttacggtatctaatatagattttatggagtatatattcttgacgcatcttaatccttctagaattagaattacaaaagaaacggctatcactatctttgaaaagttctatgaaaaactcaattatactctaggtggtggaactcctattggaattatttctgcacaggtattgtctgagaagtttacacaacaagccctgtccagttttcacactactgaaaaaagtggtgccgtcaaacaaaaacttggtttcaacgagtttaataacttgactaatttgagtaagaataagaccgaaattatcactctggtatccgatgatatctctaaacttcaatctgttaagattaatttcgaatttgtatgtttgggagaattaaatccaaacatcactcttcgaaaagaaacagataaatatgtagtagatataatagtcaatagattatacatcaagagagcagaaataaccgaattagtcgtcgaatatatgattgaacgatttatctcctttagcgtcattgtaaaggaatggggtatggagacattcattgaggacgaggataatattagatttactgtctacctaaatttcgttgaaccggaagaattgaatcttagtaagtttatgatggttcttccgggggcagccaacaagggaaagattagtaaattcaagattcctatctctgattatacgggatatgacgacttcaatcaaacaaaaaagctcaataagatgactgtagaactcatgaatctaaaagaattgggttctttcgatttggaaaacgtcaacgtgtatcctggagtatggaatacatacgatatcttcggtatcgaggccgctcgtgaatacttgtgcgaagccatgttaaacacctatggagaagggttcgattatctgtatcagccttgtgatcttctcgctagtttactatgtgctagttacgaaccagaatcagtgaataaattcaagttcggcgcagctagtactcttaagagagctacgttcggagacaataaagcattgttaaacgcggctcttcataaaaagtcagaacctattaacgataatagtagctgccacttttttagcaaggtccctaatataggaactggatattacaaatactttatcgacttgggtcttctcatgagaatggaaaggaaactatctgataagatatcttctcaaaagatcaaggaaatggaagaaacagaagacttttaattcttatcaataacatatttttctatgatctgtcttttaaacgatggattttccacaaatgcgcctctcaagtccctcatagaatgatacacgtataaaaaatatagcataggcaatgactccttatttttagacattagatatgccaaaatcatagccccgcttctatttactcccgcagcacaatgaaccaacacgggctcgtttcgttgatcacatttagataaaaaggcggttacgtcgtcaaaatatttactaatatcggtagttgtatcatctaccaacggtatatgaataatattaatattagagttaggtaatgtatatttatccatcgtcaaatttaaaacatatttgaacttaacttcagatgatggtgcatccatagcatttttataatttcccaaatacacattattggttacccttgtcattatagtgggagatttggctttgtgcatatctccagttgaacgtagtagtaagtatttatacaaacttttcttatccatttataacgtacaaatggataaaactactttatcggtaaacgcgtgtaatttagaatacgttagagaaaaggctatagtaggcgtacaagcagccaaaacatcaacacttatattctttgttattatattggcaattagtgcgctattactctggtttcagacgtctgataatccagtctttaatgaattaacgagatatatgcgaattaaaaatacggttaacgattggaaatcattaacggatagcaaaacaaaattagaaagtgatagaggtagacttctagccgctggtaaggatgatatatttgaattcaaatgtgtggatttcggcgcctattttatagctatgcgattggataagaaaacatatctgccgcaagctattaggcgaggtactggagacgcgtggatggttaaaaaggcggcaaaggtcgatccatctgctcaacaattttgtcagtatttgataaaacacaagtctaataatgttattacttgtggtaatgagatgttaaatgaattaggttatagcggttattttatgtcaccgcattggtgttccgattttagtaatatggaatagtgttagataaatgcggtaacgaatgttcctgtaaggaaccataacagcttagatttaacgttaaagatgagcataaacataataaacaaaattacaatcaaacttataacattaatatcaaacaatccaaaaaatgaaatcagtggagtagtaaacgcgtacataactcctggataacgtttagcagctgccgttcctattctagaccaaaaattcggtttcatgttttcgaaacggtattctgcaacaagtcgaggatcgtgttctacatatttggcggcattatccagtatctgcctattgatcttcatttcgttttcgattctggctatttcaaaataaaatcccgatgatagacctccagactttataatttcatctacgatgttcagcgccgtagtaactctaataatataggctgataagctaacatcataccctcctgtatatgtgaatatggcatgatttttgtccattacaagctcggttttaactttattgcctgtaataatttctctcatctgtaggatatctatttttttgtcatgcattgccttcaagacgggacgaagaaacgtaatatcctcaataacgttatcgttttctacaataactacatattctacctttttattttctaactcggtaaaaaaattagaatcccatagggctaaatgtctagcgatatttcttttcgtttcctctgtacacatagtgttacaaaaccctgaaaagaagtgagtatacttgtcatcatttctaatgtttcctccagtccactgtataaacgcataatccttgtaatgatctggatcatccttgactaccacaacatttcttttttctggcataacttcgttgtcctttacatcatcgaacttctgatcattaatatgctcatgaacattaggaaatgtttctgatggaggtctatcaataactggcacaacaataacaggagttttcaccgccgccatttagttattgaaattaatcatatacaactctttaatacgagttatattttcgtctatccattgtttcacattgacatatttcgacaaaaagatataaaatgcgtattccaatgcttctctgtttaatgaattactaaaatatacaaacacgtcactgtctggcaataaatgatatcttagaatattgtaacaatttattttgtattgcacatgttcgtgatctatgagttcttcttcgaatggcataggatctccgaatctgaaaacgtataaataggagttagaataataatatttgagagtattggtaatatataaactctttagcggtataattagtttttttctctcaatttctatttttagatgtgatggaaaaatgactaattttgtagcattagtatcatgaactctaatcaaaatcttaatatcttcgtcacacgttagctctttgaagtttttaagagatgcatcagttggttctacagatggagtaggtgcaacaattttttgttctacacatgtatgtactggagccattgttttaactataatggtgcttgtatcgaaaaactttaatgcagatagcggaagctcttcgccgcgactttctacgtcgtaattgggttctaacgccgatctctgaatggatactagttttctaagttctaatgtgattctctgaaaatgtaaatccaattcctccggcattatagatgtgtatacatcggtaaataaaactatagtatccaacgatcccttctcgcaaattctagtcttaaccaaaaaatcgtatataaccacggagatggcgtatttaagagtggattcttctaccgttttgttcttggatgtcatataggaaactataaagtccgcactactgttaagaatgattactaacgcaactatatagtttaaattaagcattttggaaacataaaataactctgtagacgatacttgactttcgaataagtttgcagacaaacgaagaaagaacagacctctcttaatttcagaagaaaactttttttcgtattcctgacgtctagagtttatatcaataagaaagttaagaattagtcggttaatgttgtatttcattacccaagtttgagatttcataatattatcaaaagacatgataatattaaagataaagcgctgactatgaacgaaatagctatatggttcgctcaagaatatagtcttgttaaacgtggaaacgataactgtatttttaatcacgtcagcggcatctaaattaaatataggtatatttattccacacactctacaatatgccacaccatcttcataataaataaattcgttagcaaaattattaattttagtgaaatagttagcgtcaactttcatagcttccttcaatctaatttgatgctcacacggtgcgaattccactctaacatcccttttccatgcctcaggttcatcgatctctataatatctagttttttgcgtttcacaaacacaggctcgtctctcgcgatgagatctgtatagtaactatgtaaatgataactagatagaaagatgtagctatatagatgacgatcctttaagagaggtataataactttaccccaatcagatagactgttgttatggtcttcggaaaaagaatttttataaatttttccagtattttccaaatatacgtacttaacatctaaaaaatccttaatgataataggaatggataatccgtctattttataaagaaatacatatcgcacattatacttttttttggaaatgggaataccgatgtgtctacataaatatgcaaagtctaaatattttttagagaatcttagttggtccaaattcttttccaagtacggtaatagatttttcatattgaacggtatcttcttaatctctggttctagttccgcattaaatgatgaaactaagtcactatttttataactaacgattacatcacctctaacatcatcatttaccagaatactgatcttcttttgtcgtaaatacatgtctaatgtgttaaaaaaaagatcatacaagttatacgtcatttcatctgtggtattcttgtcattgaaggataaactcgtactaatctcttctttaacagcctgttcaaatttatatcctatatacgaaaaaatagcaaccagtgtttgatcatccgcgtcaatattctgttctatcgtagtgtataacaatcgtatatcttcttctgtgatagtcgatacgttataaaggttgataacgaaaatatttttatttcgtgaaataaagtcatcgtaggattttggacttatattcgcgtctagtagatatgcttttatttttggaatgatctcaattagaatagtctctttagagtccatttaaagttacaaacaactaggaaattggtttatgatgtataatttttttagtttttatagattctttattctatacttaaaaaatgaaaataaatacaaaggttcttgagggttgtgttaaattgaaagcgagaaataatcataaattatttcattatcgcgatatccgttaagtttgtatcgtaatggcgtggtcaattacgaataaagcggatactagtagcttcacaaagatggctgaaatcagagctcatctaaaaaatagcgctgaaaataaagataaaaacgaggatattttcccggaagatgtaataattccatctactaagcccaaaaccaaacgagccactactcctcgtaaaccagcggctactaaaagatcaaccaaaaaggaggaagtggaagaagaagtagttatagaggaatatcatcaaacaactgaaaaaaattctccatctcctggagtcagcgacattgtagaaagcgtggccgctgtagagctcgatgatagcgacggggatgatgaacctatggtacaagttgaagctggtaaagtaaatcatagtgctagaagcgatctctctgacctaaaggtggctaccgacaatatcgttaaagatcttaagaaaattattactagaatctctgcagtatcgacggttctagaggatgttcaagcagctggtatctctagacaatttacttctatgactaaagctattacaacactatctgatctagtcaccgagggaaaatctaaagttgttcgtaaaaaagttaaaacttgtaagaagtaaatgcgtgcacttttttataaagatggtaaactctttaccgataataattttttaaatcctgtatcagacgataatccagcgtatgaggttttgcaacatgttaaaattcctactcatttaacagatgtagtagtatatgaacaaacgtgggaggaggcgttaactagattaatttttgtgggaagtgattcaaaaggacgtagacaatacttttacggaaaaatgcatgtacagaatcgcaacgctaaaagagatcgtatttttgttagagtatataacgttatgaaacgaattaattgttttataaacaaaaatataaagaaatcgtccacagattccaattatcagttggcggtttttatgttaatggaaactatgttttttattagatttggtaaaatgaaatatcttaaggagaatgaaacagtagggttattaacactaaaaaataaacacatagaaataagtcccgatgaaatagttatcaagtttgtaggaaaggacaaagtttcacatgaatttgttgttcataagtctaatagactatataaaccgctattgaaactgacggatgattctagtcccgaagaatttctgttcaacaaactaagtgaacgaaaggtatacgaatgtatcaaacagtttggtattagaatcaaggatctccgaacgtatggagtcaattatacgtttttatataatttttggacaaatgtaaagtccatatctcctcttccgtcaccaaaaaagttaatagcattaactatcaaacaaactgctgaagtggtaggtcatactccatcaatttcaaaaagagcttatatggcaacgactattttagaaatggtaaaggataaaaattttttagatgtagtatctaaaactacgttcgatgaattcctatctatagtcgtagatcacgttaaatcatctacggatggatgatatagatctttacacaaataattacaagaccgataaatggaaatggataagcgtatgaaatctctcgcaatgacagctttcttcggagagctaagcacattagatattatggcattgataatgtctatatttaaacgccatccaaacaataccattttttcagtggataaggatggtcagtttatgattgatttcgaatacgataattataaggcttctcaatatttggatctgaccctcactccgatatctggagatgaatgcaagactcacgcatcgagtatagccgaacaattggcgtgtgcggatattattaaagaggatattagcgaatatatcaaaactactccccgtcttaaacgatttataaaaaaataccgcaatagatcagatactcgtatcagtcgagatacagaaaagcttaaaatagctctagctaaaggcatagattacgaatatataaaagacgcttgttaataagtaaatgaaaaaaaactagtcgtttataataaaacacgatatggatgccaacgtagtatcattttctactattgcgacgtatatagacgctttagcgaagaatgcttcggaattagaacagaggtctaccgcatacgaaataaataatgaattggaactagtatttattaagccgccattgattactttgacaaatgtagtgaatatctctacgattcaggaatcgtttattcgatttaccgttactaataaggaaggtgttaaaattagaactaagattccattatctaaggtacatggtctagatgtaaaaaatgtacagttagtagatgctatagataacatagtttgggaaaagaaatcattagtgacggaaaatcgtcttcacaaagaatgcttgttgagactatcgacagaggaacgtcatatatttttggattacaagaaatatggatcctctatccgactagaattagtcaatcttattcaagcaaaaacaaaaaactttacgatagactttaagctaaaatattttctaggatccggtgcccagtctaaaagttctttgttgcacgctattaatcatccaaagtcaaggcctaatacatctctggaaatagaattcacacctagagacaatgaaacagttccatatgatgaactaataaaggaattgacgactctctcgcgtcatatatttatggcttctccagagaatgtaattctttctccgcctattaacgcgcctataaaaacctttatgttgcctaaacaagatatagtaggtttggatctggaaaatctatatgccgtaactaagactgacggcattcctataactatcagagttacatcaaacgggttgtattgttattttacacatcttggttatattattagatatcctgttaagagaataatagattccgaagtagtagtctttggtgaggcagttaaggataagaactggaccgtatatctcattaagctaatagagcctgtgaatgcaatcaatgatagactagaagaaagtaagtatgttgaatctaaactagtggatatttgtgatcggatagtattcaagtcaaagaaatacgaaggtccgtttactacaactagtgaagtcgtcgatatgttatctacatatttaccaaagcaaccagaaggtgttattctgttctattcaaagggacctaaatctaacattgattttaaaattaaaaaggaaaatactatagaccaaactgcaaatgtagtatttaggtacatgtccagtgaaccaattatctttggagaatcgtctatctttgtagagtataagaaatttagcaacgataaaggctttcctaaagaatatggttctggtaagattgtgttatataacggcgttaattatctaaataatatctattgtttggaatatattaatacacataatgaagtgggtattaagtccgtggttgtacctattaagtttatagcagaattcttagttaatggagaaatacttaaacctagaattgataaaaccatgaaatatattaactcagaagattattatggaaatcaacataatatcatagtcgaacatttaagagatcaaagcatcaaaataggagatatctttaacgaggataaactatcggatgtgggacatcaatacgccaataatgataaatttagattaaatccagaagttagttattttacgaataaacgaactagaggaccgttgggaattttatcaaactacgtcaagactcttcttatttctatgtattgttccaaaacatttttagacgattccaacaaacgaaaggtattggcgattgattttggaaacggtgctgacctggaaaaatacttttatggagagattgcgttattggtagcgacggatccggatgctgatgctatagctagaggaaatgaaagatacaacaaattaaactctggaattaaaaccaagtactacaaatttgactacattcaggaaactattcgatccgatacatttgtctctagtgtcagagaagtattctattttggaaagtttaatatcatcgactggcagtttgctatccattattcttttcatccgagacattatgctaccgtcatgaataacttatccgaactaactgcttctggaggcaaggtattaatcactaccatggacggagacaaattatcaaaattaacagataaaaagacttttataattcataagaatttacctagtagcgaaaactatatgtctgtagaaaaaatagctgatgatagaatagtggtatataatccatcaacaatgtctactccaatgactgaatacattatcaaaaagaacgatatagtcagagtgtttaacgaatacggatttgttcttgtagataacgttgatttcgctacaattatagaacgaagtaaaaagtttattaatggcgcatctacaatggaagatagaccgtctacaaaaaactttttcgaactaaatagaggagccattaaatgtgaaggtttagatgtcgaagacttacttagttactatgttgtttatgtcttttctaagcggtaaataataatatggtatgggttctgatctcccagttctaaatgcattaaataattccaatagagcgatttttgttcctataggaccttccaactgtggatactctgtattgttaatagatatattaatacttttgtcgggtaacagaggttctacgtcttctaaaaataaaagttttataacatctggcctgttcataaataaaaacttggcgattctatatatactcttattatcaaatctagccattgtcttatagatgtgagctactgtaggtgtaccatttgattttctttctaatactatatatttctctcgaagaagttcttgcacatcatctgggaataaaatactactgttgagtaaatcagttattttttttatatcgatattgatggacatttttatagttaaggataataagtatcccaaagtcgataacgacgataacgaagtatttatacttttaggaaatcacaatgactttatcagattaaaattaacaaaattaaaggagcatgtatttttttctgaatatattgtgactccagatacatatggatctttatgcgtcgaattaaatgggtctagttttcagcacggcggtagatatatagaggtggaggaatttatagatgctggaagacaagttagatggtgttctacatccaatcatatatctaaagatatacccgaagatatgcacactgataaatttgtcatttatgatatttatacgtttgattcgttcaagaataaacgattggtattcgtacaggtacctccgtcgttaggagatgatagtcatttgactaatccgttattgtcaccgtattatcgtaattcagtagccagacaaatggtcaatgatatgatttttaatcaagattcatttttaaaatatttattagaacatctgattagaagccactatagagtttctaaacatataacaatagttagatacaaggataccgaagaattaaatctaacgagaatatgttataatagagataagtttaaggcgtttgtattcgcttggtttaacggcgtttcggaaaatgaaaaggtactagatacgtataaaaaggtatctaatttgatataatgaattcagtgactgtatcacacgcgccatatactattacttatcacgatgattgggaaccagtaatgagtcaattggtagagttttataacgaagtagccagttggctgctacgagacgagacgtcgcctattcctgataagttctttatacagttgaaacaaccgcttagaaataaacgagtatgtgtgtgtggtatagatccgtatccgaaagatggaactggtgtaccgttcgaatcaccaaattttacaaaaaaatcaattaaggagatagcttcatctatatctagattaaccggagtaattgattataaaggttataaccttaatataatagacggggttataccctggaattattacttaagttgtaaattaggagaaacaaaaagtcacgcgatttactgggataagatttccaagttactgctgcagcatataactaaacacgttagtgttctttattgtttgggtaaaacagatttctcgaatatacgggccaagttagaatccccggtaactaccatagtcggatatcatccagcggctagagaccgccaattcgagaaagatagatcatttgaaattatcaacgttttactggaattagacaacaaggcacctataaattgggctcaagggtttatttattaatgctttagtgaaattttaacttgtgttctaaatggatgcggctattagaggtaatgatgttatctttgttcttaagactataggtgtcccgtcagcgtgcagacaaaatgaagatccaagatttgtagaagcatttaaatgcgacgagttagaaagatatattgagaataatccagaatgtacactattcgaaagtcttagggatgaggaagcatactctatagtcagaattttcatggatgtagatttagacgcgtgtctagacgaaatagattatttaacggccattcaagattttattatcgaggtgtcaaactgtgtagctagattcgcgtttacagaatgcggcgccattcatgaaaatgtaataaaatccatgagatctaatttttcattgactaagtctacaaatagagataaaacaagttttcatattatctttttagatacgtataccactatggatacattgatagctatgaaacgaacactattagaattaagtagatcatctgaaaatccactaaccagatcgatagacactgccgtatataggagaaaaacaactcttcgggttgtaggtactaggaaaaatccaaattgcgacactattcatgtaatgcaaccaccgcatgataatatagaagattacctattcacttacgtggatatgaacaacaatagttattacttttctctacaacaacgattggaggatttagttcctgataagttatgggaaccagggtttatttcattcgaagacgctataaaaagagtttcaaaaatattcattaattctataataaactttaatgatctcgatgaaaataattttacaacggtaccactggtcatagattacgtaacaccttgtgcattatgtaaaaaacgatcgcataaacatccgcatcaactatcgttggaaaatggtgctattagaatttacaaaactggtaatccacatagttgtaaagttaaaattgttccgttggatggtaataaactgtttaatattgcacaaagaattttagacactaactctgttttattaaccgaacgaggagaccatatagtttggattaataattcatggaaatttaacagcgaagaacccttgataacaaaactaattttgtcaataagacatcaactacctaaggaatattcaagcgaattactctgtccaagaaaacgaaagactgtagaagctaacatacgagacatgttagtagattcagtggagaccgatacctatccggataaacttccgtttaaaaatggtgtattggacctggtagacggaatgttttactctggagatgatgctaaaaaatatacgtgtactgtatcaaccggatttaaatttgacgatacaaagttcgtcgaagacagtccagaaatggaagagttaatgaatatcattaacgatatccaaccattaacggatgaaaataagaaaaatagagagctatatgaaaaaacattatctagttgtttatgcggtgctaccaaaggatgtttaacattcttttttggagaaactgcaactggaaagtcgacaaccaaacgtttgttaaagtctgctatcggtgacctgtttgttgagacgggtcaaacaattttaacagatgtattggataaaggacctaatccatttatcgctaacatgcatttgaaaagatctgtattctgtagcgaactacctgattttgcctgtagtggatcaaagaaaattagatctgacaatattaaaaagttgacagaaccttgtgtcattggaagaccgtgtttctccaataaaattaataatagaaaccatgcgacaatcattatcgatactaattacaaacctgtttttgataggatagataacgcattaatgagaagaattgccgtcgtgcgattcagaacacacttttctcaaccttctggtagagaggctgctgaaaataatgacgcgtacgataaagtcaaactattagacgaggggttagatggtaaaatacaaaataatatatatagatttgcatttctatacttgttggtgaaatggtacaaaaaatatcatgttcctattatgaaactatatcctacacccgaagagattcctgactttgcattctatctcaaaataggtactctgttggtatctagctctgtaaagcatattccattaatgacggacctctccaaaaagggatatatattgtacgataatgtggtcactcttccgttgactactttccaacagaaaatatccaagtattttaattctagactatttggacacgatatagagagcttcatcaatagacataagaaatttgccaatgttagtgatgaatatctgcaatatatattcatagaggatatttcatctccgtaaatatatgctcatatatttatagaagatatcacatatctaaatgaataccggaatcatagatttatttgataatcatgttgatagtataccaactatattacctcatcagttagctactctagattatctagttagaactatcatagatgagaacagaagcgtgttattgttccatattatgggatcaggtaaaacaataatcgctttgttgttcgccttggtagcttccagatttaaaaaggtttacattctagtgccgaacatcaacatcttaaaaattttcaattataatatgggtgtagctatgaacttgtttaatgacgaattcatagctgagaatatctttattcattccacaacaagtttttattctcttaattataacgataacgtcattaattataacggattatctcgctacaataactctatttttatcgttgatgaggcacataatatctttgggaataatactggagaacttatgaccgtgataaaaaataaaaacaagattccttttttactattgtctggatctcccattactaacacacctaatactctgggtcatattatagatttaatgtccgaagagacgatagattttggtgaaattattagtcgtggtaagaaagtaattcagacacttcttaacgaacgcggtgtgaatgtacttaaggatttgcttaaaggaagaatatcatattacgaaatgcctgataaagatctaccaacgataagatatcacggacgtaagtttctagatactagagtagtatattgtcacatgtctaaacttcaagagagagattatatgattactagacgacagctatgttatcatgaaatgtttgataaaaatatgtataacgtgtcaatggcagtattgggacaacttaatctgatgaataatttagatactttatttcaggaacaggataaggaattgtacccaaatctgaaaataaataatggcgtgttatacggagaagaattggtaacgttaaacattagttccaaatttaaatactttattaatcggatacagacactcaacggaaaacattttatatacttttctaattctacatatggcggattggtaattaaatatatcatgctcagtaatggatattctgaatataatggttctcagggaactaatccacatatgataaacggcaaaccaaaaacatttgctatcgttactagtaaaatgaaatcgtctttagaggatctattagatgtgtataattctcctgaaaacgatgatggtagtcaattgatgtttttgttttcatcaaacattatgtccgaatcctatactctaaaagaggtaaggcatatttggtttatgactatcccagatactttttctcaatacaaccaaattcttggacgatctattagaaaattctcttacgccgatatttctgaaccagttaatgtatatcttttagccgccgtatattccgatttcaatgacgaagtgacgtcattaaacgattacacacaggatgaattaattaatgttttaccatttgacatcaaaaagctgttgtatctaaaatttaagacgaaagaaacgaatagaatatactctattcttcaagagatgtctgaaacgtattctcttccaccacatccatcaattgtaaaagttttattgggagaattggtcagacaatttttttataataattctcgtattaagtataacgataccaagttacttaaaatggttacatcagttataaaaaataaagaagacgctaggaattacatagatgatattgtaaacggtcacttctttgtatcgaataaagtatttgataaatctcttttatacaaatacgaaaacgatattattacagtaccgtttagactttcctacgaaccatttgtttggggagttaactttcgtaaagaatataacgtggtatcttctccataaaactgatgagatatataaagaaataaatgtcgagctttgttaccaatggatacctttccgttacattggaaccacacgagctgacgttagacataaaaactaatattaggaatgccgtatataagacgtatctccatagagaaattagtggtaaaatggccaagaaaatagaaattcgtgaagacgtggaattacctctcggcgaaatagttaataattctgtagttataaacgttccgtgtgtaataacctacgcgtattatcacgttggggatatagtcagaggaacattaaacatcgaagatgaatcaaatgtaactattcaatgtggagatttaatctgtaaactaagtagagattcgggtactgtatcatttagcgattcaaagtactgcttttttcgaaatggtaatgcgtatgacaatggcagcgaagtcactgccgttctaatggaggctcaacaaggtatcgaatctagttttgtttttctcgcgaatatcgtcgactcataaaaaagagaatagcggtaagtataaacacgaatactatggcaataattgcgaatgttttattctcttcgatatatttttgataatatgaaaaacatgtctctctcaaatcggacaaccatctcataaaatagttctcgcgcgctggagaggtagttgccgctcgtataatctctccagaataatatacttgcgtgtcgtcgttcaatttatacggatttctatagttctctgttatataatgcggtttgccctcatgattagacgacgacaatagtgttctaaatttagatagttgatcagaatgaatgtttattggcgttggaaaaattatccatacagcgtctgcagagtggttgatagttgttcctagatatgtaaaataatccaacttactaggcagcaaattgtctagataaaatactgaatcaaacggtgcagacgtattggcggatctaatggaatccaattgattaactatcttttgaaaatatacatttttatgatccaatacttgtaagaatatagaaataatgataagtccatcatcgtgtttttttgcctcttcataagaactatattttttcttattccaatgaacaagattaatctctccagagtatttgtacacatctatcaagtgattggatccataatcgtcttcctttccccaatatatatgtagtgatgataacacatattcattggggagaaaccctccacttatatatcctcctttaaaattaatccttactagttttccagtgttctggatagtggttggtttcgactcattataatgtatgtctaacggcttcaatcgcgcgttagaaattgcttttttagtttctatattaataggagatagttgttgcggcatagtaaaaatgaaatgataactgtttaaaaatagctcttagtatgggaattacaatggatgaggaagtgatatttgaaactcctagagaattaatatctattaaacgaataaaagatattccaagatcaaaagacacgcatgtgtttgctgcgtgtataacaagtgacggatatccgttaataggagctagaagaacttcattcgcgttccaggcgatattatctcaacaaaattcagattctatctttagagtatccactaaactattacggtttatgtactacaatgaactaagagaaatctttagacggttgagaaaaggttctatcaacaatatcgatcctcactttgaagagttaatattattgggtggtaaactagataaaaaggaatctattaaagattgtttaagaagagaattaaaagaggaaagtgatgaacgtataacagtaaaagaatttggaaatgtaattctaaaacttacaacacgggataaattatttaataaagtatatataagttattgcatggcgtgttttattaatcaatcgttggaggatttatcgcatactagtatttacaatgtagaaattagaaagattaaatcattaaatgattgtattaacgacgataaatacgaatatctgtcttatatttataatatgctagttaatagtaaatgaacttttacagatctagtataattagtcagattattaagtataatagacgactagctaagtctattatttgcgaggatgactctcaaattattacactcacggcattcgttaaccaatgcctatggtgtcataaacgagtatccgtgtccgctattttattaactactgataacaaaatattagtatgtaacagacgagatagttttctctattctgaaataattagaactagaaacatgtttagaaagaaacgattatttctgaattattccaattatttgaacaaacaggaaagaagtatactatcgtcatttttttctctagatccagctactactgataatgatagaatagacgctatttatccgggtggcatacccaaaaggggtgagaatgttccagagtgtttatccagggaaattaaagaagaagttaatatagacaattcttttgtattcatagacactcggttttttattcatggcatcatagaagataccattattaataaattttttgaggtaatcttctttgtcggaagaatatctctaacgagtgatcaaatcattgatacatttaaaagtaatcatgaaatcaaggatctaatatttttagatccgaattcaggtaatggactccaatacgaaattgcaaaatatgctctagatactgcaaaacttaaatgttacggccatagaggatgttattatgaatcattaaaaaaattaactgaggatgattgattaaaaaatataaattaatttaccatcgtgtatttttataacgggattgtccggcatatcatgtagatagttaccgtctacatcgtatactcgaccatctacgcctttaaatcctctatttattgacattaatctattagaattggaataccaaatattagtaccctcaattagtttattggtaatattttttttagacgatagatcgatggctcttgaaaccaaggttttccaaccggactcattgtcgatcggtgagaagtctttttcattagcatgaatccattctaatgatgtatgtttaaacactctaaacaattggacaaattcttttgatttgctttgaatgatttcaaataggtcttcgtctacagtaggcataccattagataatctagccattataaagtgcacgtttacatatctacgttctggaggagtaagaacgtgactattgagacgaatggctcttcctactatctgacgaagagacgcctcgttccatgtcatatctaaaatgaagatatcattaattgagaaaaaactaataccctcgcctccactagaagagaatacgcatgttttaatgcattctccgttagtgtttgattcttggttaaactcagccaccgccttgattctagtatcttttgttctagatgagaactctatattagagataccaaagactttgaaatatagtaataagatttctattcctgactgattaacaaatggttcaaagactagacatttaccatgggatgctaatattcccaaacatacatctataaatttgacgcttttctcttttaattcagtaaatagagagatatcagccgcactagcatcccctttcaatagttctccctttttaaaggtatctaatgcggatttagaaaactctctatctcttaatgaatttttaaaatcattatatagtgttgctatctcttgcgcgtattcgcccggatcacgattttgtctttcaggaaagctatcgaacgtaaacgtagtagccatacgtctcagaattctaaatgatgatatacctgtttttatttcagcgagtttagccttttgataaatttcttcttgctttttcgacatattaacgtatcgcattaatactgttttcttagcgaatgatgcagacccttctacgtcatcaaaaatagaaaactcgttattaactatatacgaacatagtcctcctagtttggagactaattctttttcatcgactagacgtttattctcaaatagcgattggtgttgtaaggatcctggtcgtagtaagttaaccaacatggtgaattcttgcacactattgacgataggtgtagccgataaacaaatcatcttatggttttttaacgcaatggtcttagataaaaaattatatactgaacgagtaggacggatcttaccatcttctttgattaatgatttagaaatgaagttatgacattcatcaataatgacgcatattctactcttggaattaatagttttgatattagtaaaaaatttatttctaaaattttgatcatcgtaattaataaaaatacaatccttcgttatctctggagcgtatctgagtatagtgttcatccaaggatcttctatcaaagcctttttcaccaataagataatagcccaattcgtataaatatccttaagatgtttgagaatatatacagtagtcattgttttaccgacacccgtttcatggaacaataaaagagaatgcatactgtctaatcctaagaaaactcttgctacaaaatgttgataatccttgaggcgtactacgtccgaccccatcatttcaacgggcatattagtagttctgcgtaaggcataatcgatataggccgcgtgtgatttactcatttatgagtgataagtaataactatgttttaaaaatcacagcagtagtttaactagtcttctctgatgtttgttttcgatactttttgaatcagaagtcatactagaataaagcaacgagtgaacgtaatagagagcttcgtatactctattcgaaaactctaagaacttattaatgaattccgtatccactggattgtttaaaatactaaattgaacactgttcacatccttccaagaagaagacttagtgacggacttaacatgagacataaataaatccaaattttttttacaaacatcactagccaccataatggcgctatctttcaaccagctatcgcttacgcattttagcagtctaacatttttaaagagactacaatatattctcatagtatcgattacacctctaccgaataaagttggaagtttaataatacaatatttttcgtttacaaaatcaaataatggtcgaaacacgtcgaaggttaacatcttataatcgctaatgtatagattgttttcagtgagatgattattagatttaatagcatctcgttcacgtttgaacagtttattgcgtgcgctgaggtcggcaactacggcgtccgctttagtactcctcccataatactttacgctattaatctttaaaatttcatagactttatctagatcgctttctggtaacatgatatcatgtgtaaaaagttttaacatgtcggtcggcattctatttagatcattaactctagaaatctgaagaaagtaattagctccgtattccagactaggtaatgggcttttacctagagacagattaagttctggcaatgtttcataaaatggaagaaggacatgcgttccctcccggatattttttacaatttcatccatttacaactctatagtttgttttcattattattagttattatctcccataatcttggtaatacttaccccttgatcgtaagataccttatacaggtcattacatacaactaccaattgtttttgtacataatagattggatggttgacatccatggtggaataaactactcgaacagatagtttatctttccccctagatacattagccgtaatagttgtcggcctaaagaatatctttggtgtaaagttaaaagttagggttcttgttccattattgctttttgtcagtagttcattataaattctcgagatgggtccgttctctgaatatagaacatcatttccaaatctaacttctagtctagaaataatatcggtcttattcttaaaatctattcccttgatgaagggatcgttaatgaacaaatccttggcctttgattcggctgatctattatctccgttatagacgttacgttgactagtccaaagacttacaggaatagatgtatcgatgatgttgatactatgtgatatgtgagcaaagattgttctcttagtggcatcactatatgttccagtaatggcggaaaactttttagaaatgttatatataaaagaattttttcgtgttccaaacattagcagattagtatgaagataaacactcatattatcaggaacattatcaatttttacatacacatcagcatcttgaatagaaacgataccatcttctggaacctctacgatctcggcagactccggataaccagtcggtgggccatcgctaacaataactagatcatccaacaatctactcacatatgcatctatataatctttttcatcttgtgagtaccctggatacgaaataaatttattatccgtatttccataataaggtttagtataaacagagagagatgttgccgcatgaacttcagttacagtcgccgttggttggtttatttgacctattactctcctaggtttctctataaacgatggtttaatttgtacattcttaaccatatatccaataaagctcaattcaggaacataaacaaattctttgttgaacgtttcaaagtcgaacgaagagtcacgaataacgatatcggatactggattgaaggttaccgttacggtaatttttgaatcggatagtttaagactgctgaatgtatcttccacatcaaacggagttttaatataaacgtatactgtagatggttctttaatagtgtcattaggagttaggccaatagaaatatcattaagttcactagaatatccagagtgtttcaaagcaattgtattattgatacaattattatataattcttcgccctcaatttcccaaataacaccgttacacgaagagatagatacgtgattaatacatttatatccaacatatggtacgtaactgaatcttcccatacctttaacttctggaagttccaaactcagaaccaaatgattaagcgcagtaatatactgatccctaatttcgaagctagcgatagcctgattgtctggaccatcgtttgtcataactccggatagagaaatatattgcggcatatacaaagttggaatttgactatcgactgcgaagacattagaccgtttaatagagtcatccccaccgatcaaagaattaatgatagtattattcattttctatttaaaatggaaaaagcttacaataaactccgtagagaaatatctataatttgtgagttttccttaaagtaacagcttccgtaaacgccgtctttatctcttagtaggtttattgtatttatgaccttttccttatcttcatagaatactaaaggcaacaaagaaatttttggttcttctctaagagctacgtgagacttaaccatagaagccaacgaatccctacatattttagaacagaaataccctacttcaccacccttgtatgtctcaatactaataggtctaaaaaccaaatcttgattacaaaaccaacacttatcaattacactatttgtcttaatagacacatctgccatagatttataatactttggtagtatacaagcgagtgcttcttctttagcgggcttaaagactgctttaggtgctgaaataaccacatctggaaggcttactcgcttagccatttaattacggaactatttttttatacttctaatgagcaagtagaaaacctctcatctacaaaaacgtactcgtgtccataatcctctaccatagttacacgttttttagatctcatatgtgctaaaaagttttcccatactaattggttactattatttttcgtataatttttaacagtttgaggttttagatttttagttacagaagtgatatcgaatattttatccaaaaagaatgaataattaattgtcttagaaggagtgttttcttggcaaaagaataccaagtgcttaaatatttctactacttcattaatcttttctgtactcagattcagtttctcatcttttacttgattgattatttcaaagactaacttataatcctttttatttattctctcgttagccttaagaaaactagatacaaaatttgcatctacatcatccgtggatatttgatttttttccatgatatccaagagttccgagataatttctccagaacattgatgagacaataatctccgcaatacatttctcaaatgaataagtttattagacacgtggaagtttgactttttttgtacctttgtacatttttgaaataccgactcgcaaaaaatacaatattcatatccttgttcagatactataccgttatgtctacaaccgctacataatcgtagattcatgttaacactctacgtatctcgtcgtccaatattttatataaaaacattttatttctagacgttgccagaaaatcctgtaatatttttagttttttgggctgtgaataaagtatcgccctaatattgttaccgtcttccgccaatatagtagttaaattatccgcacatgcagaagaacaccgcttaggcggattcagtacaatgttatatttttcgtaccaactcatttaaatatcataatctaaaatagttctgtaatatgtctagcgctaatatattgatcataatcctgtgcataaattaagatacaacaatgtctcgaaatcatcgacatggcttcttccatagttagaagatcgtcgtcaaagttagcaacgtgattcatcaacatttgctgttttgaggcagcaaatactgaaccgtcgccattcaaccattcataaaaaccatcgtctgaatccattgataatttcttgtactggtttttgagagctcgcatcaatctagcatttctagctcccggattgaaaacagaaagaggatcgtacatccagggtccattttctgtaaatagaatcgtataatgtcccttcaagaagatatcagacgatccacaatcaaagaattggtctccgagtttgtaacaaactgcggactttaacctatacatgataccgtttagcataatttctggtgatacgtcaatcggagtatcatctattagagatctaaagccggtgtaacattctccaccaaacatattcttattctgacgtcgttctacataaaacatcattgctccattaacgataacaggggaatgaacagcactacccatcacattagttcccaatggatcaatgtgtgtaactccagaacatcttccatagcctatgttaggaggagcgaacaccactcttccactattgccatcgaatgccatagaataaatatccttggaattgatagaaatcggactgtcggatgttgtgatcatcttcataggattaacaactatgtatggtgccgcctgaagtttcatatcgtaactgatgccgtttataggtctagccacagaaaccaacgtaggtctaaatccaactatagacaaaatagaagccaatatctgttcctcatctgtcataacttgagagcatccagtatgaataatcttcattagatggggatctaccgcatcatcatcgttacaataaaaaattcccattctaatgttcataattgcttttctaatcatggtatgcatgtttgctctctgaatctctgtggaaattagatctgatacacctgtaatcactatcggattatcctccgtaagacgattaaccaacaacatataattataagactttacttttctaaattcataaagttgctggattaggctataggtgtctccatgtacatacgcgttctcgagcgcaggaagtttaataccgaatagtgccatcagaataggatgaatatagtaattagtttctggttttctataaataaaagacaaatcttgtgaactagacatatcggtaaaatgcatggattggaatcgtgtagtcgacagaagaatatgatgattagatggagagtatattttatctaactctttgagttggtcaccgattctaggactagctcgagaatgaataagtactaaaggatgagtacatttcacagaaacactagcattgttcaatgtgctctttacatgggtaaggagttgaaatagctcgtttctatttgttctgacaatatttagtttattcataatgttaagcatatcctgaatagtaaagttagatgtgtcatacttgttagtagttagatatttagcaattgcattcccatcatttctcaatctcgtactccaatcatgcgtggatgctacttcgtcgatggaaaccatacaatcctttttgataggctgttgagattgatcatttcctgcacgtttaggtttggtacgttgatttctagcccctgcggatataaagtcatcgtctacaatttgggacaatgaattgcatacactacaagacaaagatttatcagaagtgtgaatatgatcttcatctaccaaagaaagagtttgattagtataactagattttagtcctgcgttagatgttaaaaaaacatcgctattgaccacggcttccattatttatattcgtagtttttactcgaaagcgtgattttaatatccaatcttattacttttggaatcgttcaaaacctttgactagttgtagaatttgatctattgccctacgcgtatactcccttgcatcatatacgttcgtcaccagatcgtttgtttcggcctgaagttggtgcatatctctttcaacattcgacatgagatccttaagggccatatcgtctagattttgttgagatgctgctcctggatttggattttgttgtgctgttgtacatactgtaccaccagtaggtgtaggagtacatacagtggccacaataggaggttgagaaagtgtaaccgttggagtagtacaagaaatacttccatccgattgttgtgtacatgtagttgttggtaacgtctgagaaggttgggtagatggcggcgtcgtcgttttttgatctttattaaatttagagataatatcctgaacagcattgctcggcgtcaacgctggaaggagtgaactcgccggcgcatcagtatcttcagacagccaatcaaaaagattagacatatcagatgatgtattagtttgttgtcgtggttttggtgtaggagcagtactactaggtagaagaataggagccgatgtagctgttggaaccggctgtggagttatatgaatagttggttgtagcggttggataggctgtctgctggcggccatcatattatctctagctagttgttctcgcaactgtctttgataatacgactcttgagactttagtcctatttcaatcgcttcatcctttttcgtatccggatccttttcttcagaataatagattgacgactttggtgtagaggattctgccagcctctgtgagaacttgttaaagaagtccatttaaggctttaaaattgaattgcgattataagattaaatggcagacacagacgatattatcgactatgaatccgatgatctcaccgaatacgaggatgatgaagaagaggaagaagatggagagtcactagaaactagtgatatagatcccaaatcttcttataagattgtagaatcagcatccactcatatagaagatgcgcattccaatcttaaacatatagggaatcatatatctgctcttaaacgacgctatactagacgtataagtctatttgaaatagcgggtataatagcagaaagctataacttgcttcaacgaggaagattacctctagtttcagaattttctgacgaaacgatgaagcaaaatatgctacatgtaattatacaagagatagaggagggttcttgtcctatagtcatcgaaaagaacggagaattgttgtcggtaaacgattttgacaaagatggtctaaaattccatctagactatattatcaaaatttggaaacttcaaaaacgatattagaatttatacgaatatcgttctctaaatgtcacaatcaagtctcgcatgttcagcaatttattgtcgtactttatatcgtgttcattaacgatatcttgcaaaatagtaatgattctatcttccttcgatagatattcttcagagattattgtcttatattctttcttgttatcagatatgaatttgataagactttgaacattattgatacccgtctgtttaattttttctacagatattttagttttggcagattctatcgtatctgtcaatagacatccaacatcgacattcgacgtcaattgtctataaatcaacgtataaattttagaaataacattagcgaattgttgtgcgttgatgtcgttattctgaaacagtatgattttaggtagcattttcttaacaaagagaacgtatttattgttactcagttgaacagatgatatatccagattactaacgcatctgattccgtataccaaactttcagaagaaatggtatacaattgtttgtattcattcaatgtctctttttcagaaattagtttagagtcgaatactgcaataattttcaagagatagttttcatcagataagattttatttagtgtagatatgataaaactattgttttgttggagaacttgatacgccgcgttctctgtagtcgacgctctcaaatgggaaacaatctccattatttttttggaatcggatactatatcttcggtatcttgacgcagtctagtatacatagagttaagagagattagagtttgtacattaagcaacatgtctctaaatgtggctacaaacttttcctttttcacatcatctagtttattatataccgatttcacaacggcaccagatttaaggaaccagaatgaaaaactctgataactacaatatttcatcatagttacgattttatcatcttctatagttggtgtaatagcgcatacctttttctccaagactggaaccaacgtcataaaaatgtttaaatcaaaatccatatcaacatctgatgcgctaagaccagtctcgcgttcaagattatctttactaatggtgacgaactcatcgtataaaactctaagtttgtccattatttatttacagatttagttgtttaatttatttgtgctcttccagagttgggatagtatttttctaacgtcggtattatattattaggatctacgttcatatgtatcataatattaatcatccacgttttgataaatctatctttagcttctgaaataacgtatttaaacaaaggagaaaaatatttagctacggcatcagacgcaataacattttttgtaaatgtaacgtatttagacgacagatcttcgttaaaaagttttccatctatgtagaatccatcggttgttaacaccattcccgcgtcagattgaataggagtttgaatagtttgttttggaaatagatccttcaataacttatagttgggtgggaaaaaatcgattttatcactagactctttcttttttactatcattacctcatgaactatttcttgaatgagtatatgtattttctttcctatatcggacgcgttcattggaaaatataccatgtcgttaactataagaatatttttatcctcgtttacaaactgaataatatcagatgtagttcgtaaacgaactatatcatcaccagcacaacatctaactatatgatatccactagtttcctttagccgtttattatcttgttccatattagcagtcattccatcatttaagaaggcgtcaaaaataatagggagaaatgacattttggattctgttacaactttaccaaaattaaggatatacggacttactatctttttctcaacgtcaatttgatgaacacacgatgaaaatgtgcttctatgagattgatcatgtagaaaacaacaagggatacaatatttccgcatatcatgaaatatattaagaaatcccaccttattatatttccccaaaggatccatgcacgtaaacattatgccgttatcattaataaagacttctttctcatcggatctgtaaaagttgttactgatttttttcattccaggatctagataattaataatgatgggttttctattcttattctttgtattttggcatatcctagaccagtaaacagtttccactttggtaaaatcagcagacttttgaacgctattaaacatggcattaatggcaataactaaaaatgtaaaatatttttctatgttaggaatatggtttttcactttaatagatatatggtttttggccaaaatgatagatatttttttatccgaggatagtaaaatattattagtcgccgtctctataaaaatgaagctagtctcgatatccaattttattctagaattgataggagtcgccaaatgtaccttatacgttatatctcccttgatgcgttccatttgtgtatctatatcggacacaagatctgtaaatagttttacgttattaatcatcacggtatcgccgtcgctagataacgctaatgtaccatccaagtcccaaatggagagatttaactgttcatcgtttagaataaaatgattaccggtcatattaataaagtgttcatcgtatctagataacaacgacttataattaatgtccaagtcttgaactcgctgaatgatcttttttaacccagttagttttagattggtacgaaatatattgttaaactttgattctacagtaatgtccaaatctagttgtggaaatacttccatcaacattgtttcaaacttgataatattattatctacatcttcgtacgatccaaattccggaatagatgtatcgcacgctctggccacccagataaccaaaaagtcacacgctccaggatatacattgtataaaaagctatcgttttttagtagggtttttttctgcgtgtatacgaagggattaaaaatagtattatcaacgtaactatattccaaattattcttatgagaatagataataatatcgtccttaatatctaacaaatttcctaaatatccctttaattgagtcattcgaagcgtcaatagaatatgtctcttaactatttccggctgttgtatatttaaatgacttcgtaaaaaataatatatgggcgacttctcatctatgtaatcatatggagtgagatatagggctcgttctacctcctgccccttacccacctgtaataccaattgcggacttactatatatcgcatatttatatcgtggggtaaagtgaaaatctactaccgatgatgtaagtcttacaatgttcgaaccagtaccagatcttaatttggaggcctccgtagaactaggggaggtaaatatagatcaaacaacacctatgataaaggagaatagcggttttatatcccgcagtagacgtctattcgcccatagatctaaggatgatgagagaaaactagcactacgattctttttacaaagactttattttttagatcatagagagattcattatttgttcagatgcgttgacgctgtaaaagacgtcactattaccaaaaaaaataacattatcgtggcgccttatatagcacttttaactatcgcatcaaaaggatgcaaacttacagaaacaatgattgaagcattctttccagaactatataatgaacatagtaagaaatttaaattcaactctcaagtatccatcatccaagaaaaactcggataccagtttggaaactatcacgtttatgattttgaaccgtattactctacagtagctctggctattcgagatgaacattcatctggcatttttaatatccgtcaagagagttatctggtaagttcattatctgaaataacatatagattttatctaattaatctaaaatctgatcttgttcaatggagtgctagtacgggcgctgtaattaatcaaatggtaaatactgtattgattacagtgtatgaaaagttacaactggtcatagaaaatgattcacaatttacatgttcattggctgtggaatcaaaacttccaataaaattacttaaagatagaaatgaattatttacaaaattcattaacgagttaaaaaagaccagttcattcaagataagcaaacgcgataaggatacgctactaaaatattttacttaggactggagttagaatttatagacgactcatttcgtttatcattgttactattattactattactatcattattagtgttggcattattagtattcttcttgtcatcttgttcagaaatatacagcaatgctatacctaatactaaatacattatcatgctcgcaatggctctaacaacaacgaaccaaaatgaatttggtcgtagcttttgttcacaaaaatacataaagaaatgtctacataaatctatggcgccattggctacttgaaatagcgccagtcctcctacagattttaatatagctgtataacatgacatttattcatcatcaaaagagacagagtcaccatctgtcatatttagattttttttcatgtgttcaaagtatcctctactcatttcattataatagtttatcatacttagaattttaggacggatcaatgagtaagacttgactagatcgtcagtagtaatttgtgcatcgtctattctgcatccgcttcgtcgaataatgtatagcatcgctttgagattctccatagctatcaagtctttatacaatgacatggaaatatctgtgaatactttatacttctccaacatcgatgccttaacatcatcgcctactttagcattgaaaatacgttctattgtgtagatggatgtagcaagatttttaaacaacaatgccatcttacacgatgattgcctcaagtctccaatcgtttgtttagaacgattagctacagagtccaatgcttggctgactagcatattattatctttagaaattgtattcttcaatgaggcgtttatcatatctgtgatttcgttagtcatattacagtctgactgggttgtaatgttatccaacatatcacctatggatacggtacacgtaccagcatttgtaataatcctatctaagatgttgtatggcattgcgcagaaaatatcttctcctgtaatatctccactctcgataaatctactcagattattcttaaatgccttattctctggagaaaagatatcagtgtccatcatttcattaatagtatacgcagaaaagataccacgagtatcaattctatccaagatacttatcggttccgagtcacagataatggtttcctctccttcgggagatcctgcatagaaatatctaggacaatagtttctatactgtctgtaactctgataatctctaaagtcactaactgataccatgaaattgagaagatcaaacgctgaagtaattaatttttctgcctcgtttttactacaactagttttcatcaatgtagtgacgatgtattgtttagttacttttggtctaatactgatgatagagatattattgcttcccataatggatcttctagtagtcaccttaaagcccattgatgcgaatagcagatagataaagtcttggtatgactcctttctaatatagtacggactacctttgtcacccaactttatacccacataagccataacaacctctttaatagccgtttcatgaggtttatcagccatgagcctgagtagttggaagaatctcatgaatcccgtctcagaaagtcctatatgcatgatagatttatctttcctgggaaactctcgtatagtcatagatgaaatactctttaaagtttctgaaataagattagtaacagtcttacctccgactactctaggtaacaaacaaactctaataggtgttttctctgcggagataatatcagaaaggatagagcaataagtagtattattgtgattataaagaccgaatacataacaggtagaatttataaacatcatgtcctgaaggtttttagacttgtattcctcgtaatccataccgtcccaaaacatggatttggtaactttgatagccgtagatctttgttccttcgccaacaggttaaagaaattaataaagaatttgttgtttctatttatgtccacaaattgcacgtttggaagcgccacggttacattcactgcagcattttgaggatcgcgagtatgaagtacgatgttattgtttactggtatatctggaaagaaatctaccagtctaggaataagagattgatatcgcatagaaatagtaaagtttataatctcatcatcgaagagcattttgttaccattgtaataaatatccactctgtcatatgtataaatgaagtactgttcaaacatgatgagatgtttatatgttggcatagtagtgagatcgacgtttggtaatggcaatgtattaagattaactccataatgtctagcagcatctgcgatgttataagcgtcgtcaaagcggggtcgatcttgtattgttatatattgtctaacacctataagattatcaaaatcttgtctgcttaatacaccgttaacaatttttgccttgaattcttttattggtgcattaataacatccttatagaggatgttaaacaaataagtgttatcaaagttaagatctggatatttcttttctgctagaacatccattgagtcggagccatctggtttaatataaccaccgataaatctagctctgtattctgtatccgtcaatctaatattaagaaggtgttgagtgaaaggtggaagatcgtaaaagctgtgagtattaatgataggattagtttccgaactaatgttaattggggtattaataatatctatatttccagcgttaagtgtaacattaaacagttttaattcacgtgacgtggtatcaattaaataattaatgcccaatttggatatagcagcctgaagctcatcttgtttagttacggatcctaatgagttattaagcaatatatcgaacggatgaacgaaggttgttttaagttggtcacatactttgtaatctagacatagatgcggaagaacggtagaaactatacgaaataaatattcagagtcctctaattgatcaagagtaactattgacttaataggcatcatttatttagtattaaatgacgaccgtaccagtgacggatatacaaaacgatttaattacagagttttcagaagataattatccatctaacaaaaattatgaaataactcttcgtcaaatgtctattctaactcacgttaacaacgtggtagatagagaacataatgccgccgtagtgtcatctccagaggaaatatcctcacaacttaatgaagatctatttccagatgatgattcaccggccactattatcgaacgagtacaacctcatactactattattgacgatactccacctcctacgtttcgtagagagttattaatatcggaacaacgtcaacaacgagaaaaaagatttaatattacagtatcgaaaaatgctgaagcaataatggaatctagatctatgataacttctatgccaacacaaacaccatccttgggagtagtttatgataaagataaaagaattcagatgttagaggatgaagtggttaatcttagaaatcaacgatctaatacaaaatcatctgataatttagataattttaccaaaatactatttggtaagactccgtacaaatcaacagaagttaataagcgtatagccatcgttaattatgcaaatttgaacgggtcccccttatcagtcgaggacttggatgtttgttcggaggatgaaatagatagaatctataaaacgattaaacaatatcacgaaagtagaaaacgaaaaattatcgtcactaacgtgattattattgtcataaacattatcgagcaggcattgctaaaactcggatttgaagaaatcaaaggactgagtaccgatatcacttcagaaattatcgatgtggagatcggagatgactgcgatgctgtagcatctaaactaggaatcggtaacagtccggttcttaatattgtattgtttatactcaagatattcgttaaacgaattaaaattatttaatttaatacattcccatatccagacaacaatcgtctggattaatctgttcctgtcgtctcataccggacgacatattaatctttttattagtgggcatctttttagatggtttctttttcccagcattaactgagtcgatacctagaagatcgtgattgatctctccgaccattccacgaacttctaattggccgtctctgacggtaccataaactattttaccagcattagtaacagcttggacaatctgaccatccatcgcattgtacgatgtagtagtaactgttgttctacgtctaggagcaccagaagtatttttggagcccttggatgttgatgtagaagaagacgaggattttgattttggtttacatgtaatacattttgaactctttgattttgtatcacatgcgccggcagtcacatctgtttgagaattaagattattgttgcctcctttgacggctgcatctccaccgatttgcgctagtagatttttaagctgtggtgtaatcttattaactgtttcgatataatcatcgtaactgcttctaacggctaaattttttttatccgccatttagaagctaaaaatatttttatttatgcagaagatttaactagattatacaatgaactaatatgatccttttccagattatttacaaacttggtattttttggttctggaggaggcgaatttaaattcggacttggattcggattttgtaagttcttgatcttattatacatcgagtataggatggcgacagtaactgctacacaaataccgatcaaaagaagaataccaatcatttattgacaataacttcactattgatcaagtatgcaatatatcatcttttcactaaataagtagtaataatgattcaacaatgtcgagatatatggacgataataatttagttcatggaaatatcgctatgattggtgtgaatgactccgctaactctgtggggtgcgcagtgctttccccacatagaataaattagcattccgactgtgataataataccaagtataaacgccataatactcaatactttccatgtacgagtgggactggtagacttactaaagtcaataaaggcgaagatacacgaaagaatcaaaagaatgattccagcgattagcacgccggaaaaataatttccaatcataagcatcatgtccatttaactaataaaaattttaaatcgccgaatgaacaaagtggaatataaaccatataaaaacaatagtttgtactgcaaaaataatatctatttttgttttcgaagatatggtaaaattaaatagtagtacacagcatgttataactaacagcagcaacggctcgtaattacttatcatttactagacgaaaaggtggtgggatattttcttgctcaaataatacgaatatatcacccatccattttatgcgatgtttatatactctaatctttaatagatctatagacgacgggtttaccaacaatatagattttatcgattcatctaatttaaacccttccttaaacgtgaatgatctattatctggcataacgatgaccctacctgatgaatcggacaatgtactgggccatgtagaataaattatcaacgaattatcgtctacgaacatttatatcatttgttttaattttaggacgcgaataaatggatataaaatagaaaataacagatattacaaccagtgttatggccgcgcccaaccaggtaggcagttttattttatcttttactacaggttctcctggatgtacgtcaccaacggcggacgtagttctagtacaattagacgtaagttccgcttgggaattttttaacgctaaagagttaacgttaatcgtgcacccaacgtatttacatctagttcgttgaacatcttgattataatataaccattttctatctctagattcgtcagtgcactcatgtaaccaacataccctaggtcctaaatatttatctccggaattagattttggataattcgcgcaccaacaatttctatttcctttatgatcgttacaaaagacgtataatgccgtatccccaaaagtaaaataatcaggacgaataattctaataaactcagaacaatatctcgcatccatatgtttggagcaaatatcggaataagtagacatagccggtttccgttttgcacgtaaccattctaaacaattggggtttccaggatcgtttctacaaaatccagtcatgaaatcgtcacaatgttctgtcttgtaattattattaaatatttttggacagtgtttggtatttgtcttagaacaacattttgccacgctatcactatcgcccaggagataatccttttttataaaatgacatcgttgcccggatgctatataatcagtagcgtgttttaaatccttaatatattcaggagttacctcgttctgataatagattaatgatccaggacgaaatttgaaagaactacatggttctccatgaattaatacatattgtttagcaaattcaggaactataaaactactacaatgatctatcgacataccatctatcaaacaaaacttgggtttaatttctcccggagatgtttcataatagtacgtataactttcttctgcaaacttaacagctctattatattcaggataattaaaacctaattccatatatttgtctcgtatatctgctattcctggtgctattttgattctattaagagtaacagctgcccccattcttaataatcgtcagtatttaaactgttaaatgttggtatatcaacatctaccttatttcccgcagtataaggtttgttgcaggtatactgttcaggaatggttacatttatacttcttctatagtcctgtctttcgatgttcatcacatatgcaaagaacagaataaacaaaataatgtaagaaataatattaaatatctgtgaattcgtaaatacattgattgccataataattacagcagctacaatacacacaatagacattcccacagtgttgccattacctccacgatacatttgagttactaagcaataggtaataactaagctagtaagaggcaatagaaaagatgagataaatatcatcaatatagagattagaggagggctatatagagccaagacgaacaaaatcaaaccgagtaacgttctaacatcattatttttgaagattcccaaataatcattcattcctccataatcgttttgcatcatacctccatctttaggcataaacgattgctgctgttcctctgtaaataaatctttatcaagcactccagcacccgcagagaagtcgtcaagcatattgtaatatcttaaataactcatttatatattaaaaaatgtcactattaaagatggagtataatctttatgccgaactaaaaaaaatgacttgtggtcaacccctaagtctttttaacgaagacggggatttcgtagaagttgaaccgggatcatcctttaagtttctgatacctaagggattttacgcctctccttccgtaaagacgagtctagtattcgagacattaacaacgaccgataataaaatcactagtatcaatccaacaaatgcgccaaagttatatcctcttcaacgcaaagtcgtatctgaagtagtttctaatatgaggaaaatgatcgaatcaaaacgtcctctatacatcactcttcacttggcgtgtggatttggtaagactattaccacgtgttatcttatggctacacacggtagaaaaaccgtcatttgcgtacccaataaaatgttaatacatcaatggaagacacaggtagaggcagtcggattggaacataagatatccatagatggagtaagtagtctattaaaggaactaaagactcaaagtccggatgtattaatagtagtcagtagacatctgacaaacgatgccttttgtaaatatatcaataagcattatgatttgttcatcttggatgaatcacatacgtataatctgatgaacaatacagcagttacaagatttttagcgtattatcctccgatgatgtgttattttttaactgctacacctagaccatctaaccgaatttattgtaacagtattattaatattgccaagttatccaatctaaaaaaaactatctatgcagtagatagtttttttgagccatattccacagataatattagacatatggtaaaacgactagatggaccatctaataaatatcatatatataccgagaagttattatctgtagacgagcctagaaatcaacttattcttgataccctggtagaagaattcaagtcaggaactattaatcgcattttagttattactaaactacgtgaacatatggtattattctacaaacgattattagattttttcggaccagaggttgtatttataggagacgcccaaaatagacgtactccagatatggtcaaatcaatcaaggaactaaatagatttatattcgtatccaccttattttattccggtactggtttagatattcctagtttggattcgttgttcatttgctcggcagtaatcaacaatatgcaaatagagcaattactagggagggtatgtcgagaaacagaactattagataggacggtatatgtatttcctaacacatccatcaaagaaataaagtacatgataggaaatttcatgcaacgaattattagtctgtctgtagataaactaggatttaaacaaaaaagttatcggaaacatcaagaatccgatcccacttctgcatgtacaacatcatccagagaagaacgtgtattaaatagaatatttaactcgcaaaatcgttaagaagtttaagcgacgatccgcatgctgcgcaggccagtgtattacccctcatagtattaatataatccaatgatacttttgtgatgtcggaaatcttaaccaatttagactgacaggcagaacacgtcatgcaatcatcatcgtcatcgataactgtagtcttgggcttctttttgcgactcttcattccggaacgcacattggtgctatccatttaggtagtaaaaaataagtcagaatatgccctataacacgatcgtgcaaaacctggtatatcgtctctatctttatcacaatatagtgtatcgacatttttattattattgacctcgtttatcttggaacatggaatgggaacatttttgttatcaacggccatctttgccttaattccagatgttgtaaaattataactaaacagtctatcatcgacacaaatgaaattcttgtttagacgtttgtagtttacgtatgcggctcgttcgcgtctcattttttcagatattgcaggtactataatattaaaaataagaatgaaataacataggattaaaaataaagttatcatgacttctagcgctgatttaactaacttaaaagaattacttagtctgtacaaaagtttgagattttcagattctgcggctatagaaaagtataattctttggtagaatggggaacatctacttactggaaaataggcgtgcaaaaggtagctaatgtcgagacgtcaatatctgattattatgatgaggtaaaaaataaaccgtttaatattgatccgggctattacattttcttaccggtatattttgggagcgtctttatttattcgaagggtaaaaatatggtagaacttggatctggaaactcttttcaaataccagatgatatgcgaagtgcgtgtaacaaagtattagacagcgataacggaatagactttctgagatttgttttgttaaacaatagatggataatggaagatgctatatcaaaatatcagtctccagttaatatatttaaactagctagtgagtacggattaaacatacccaaatatttagaaattgaaatagaggaagacacattatttgacgacgagttatactctattatagaacgctctttcgatgataaatttccaaaaatatccatatcgtatattaagttgggagaacttagacggcaagttgtagactttttcaaattctcattcatgtatattgagtccatcaaggtagatcgtataggagataatatttttattcctagcgttataacaaaatcaggaaaaaagatattagtaaaagatgtagaccatttaatacgatccaaggttagagaacatacatttgtaaaagtaaaaaagaaaaacacattttccattttatacgactatgatggaaacggaacagaaactagaggagaagtaataaaacgaattatagacactataggacgagactattatgttaacggaaagtatttctctaaggttggtagtgcaggcttaaagcaattgactaataaattagatattaatgagtgcgcaactgtcgatgagttagttgatgagattaataaatccggaactgtaaaacgaaaaataaaaaaccaatcagcatttgatttaagcagagaatgtttgggatatccagaagcggattttataacgttagttaataacatgcggttcaaaatagaaaattgtaaggttgtaaatttcaatattgaaaatactaattgtttaaataacccgagtattgaaactatatatggaaactttaaccagttcgtctcaatctttaatgtcgtcaccgatgtcaaaaaaagattattcgagtgaaataatatgcgcctttgatataggtgcaaaaaatcctgccagaactgttttagaagtcaaggataactccgttagggtattggatatatcaaaattagactggagttctgattgggaaaggcgcatagctaaagatttgtcacaatatgaatacactacagttcttctagaacgtcagcctagaaggtcgccgtatgttaaatttatctattttattaaaggctttttatatcatacatcggctgccaaagttatttgcgtctcgcctgtcatgtctggtaattcatatagagatcgaaaaaagagatcggtcgaagcatttcttgattggatggacacattcggattgcgagactccgttccggatagacgcaaattagacgatgtagcggatagtttcaatttggctatgagatacgtattagataaatggaatactaattatacaccttataataggtgtaaatctagaaattacataaaaaaaatgtaataacgttagtaacgccattatggataatctatttacctttctacatgaaatagaagatagatatgccagaactatttttaactttcatctaataagttgcgatgaaataggagatatatatggtcttatgaaagaacgcatttcctcagaggatatgtttgataatatagtgtataataaagatatacatcctgccattaagaaactagtgtattgcgacatccaacttactaaacacattattaatcagaatacgtatccggtatttaacgattcttcacaagtgaaatgttgtcattatttcgacataaactcagataatagcaatattagctctcgtacagtagagatatttgagagggaaaagtcatctcttgtatcatatattaaaactaccaataagaagagaaaggtcaattacggcgaaataaagaaaactgttcatggaggcactaatgcaaattacttttccggtaaaaagtctgacgagtatctgagtactacagttagatccaacattaatcaaccttggatcaaaaccatctctaagaggatgagagttgatatcattaatcactctatagtaacgcgtggaaaaagctctatattacaaactatagaaattatttttactaatagaacatgtgtgaaaatattcaaggattctactatgcacattattctatccaaggacaaggatgaaaaggggtgtatacacatgattgacaaattattctatgtctattataatttatttctgttgttcgaagatatcatccaaaacgagtactttaaagaagtagctaatgttgtaaaccacgtactcacggctacggcattagatgagaaattattcctaattaagaaaatggctgaacacgatgtttatggagttagcaatttcaaaatagggatgtttaacctgacatttattaagtcgttggatcataccgttttcccctctctgttagatgaggatagcaaaataaagttttttaaggggaaaaagctcaatattgtagcattacgatctctggaggattgtataaattacgtgactaaatccgagaatatgatagaaatgatgaaggaaagatcgactattttaaatagcatagatatagaaacggaatcggtagatcgtctaaaagaattgcttctaaaatgaaaaaaaacactaattcagaaatggatcaacgactagggtataagtttttggtgcctgatcctaaagccggagttttttatagaccgttacatttccaatatgtatcgtattctaattttatattgcatcgattgcatgaaatcttgaccgtcaagcggccactcttatcgtttaagaataatacagaacgaattatgatagaaattagcaatgttaaagtgactcctccagattactcacctataatcgcgagtattaaaggtaagagttatgacgcattagccacgttcactgtaaatatctttaaagaggtaatgaccaaagagggtatatccatcactaaaataagtagttatgagggaaaagattctcatttgataaaaattccgctactaataggatacgggaataaaaatccacttgatacagccaagtatcttgttcctaatgtcataggtggagtctttatcaataaacaatctgtcgaaaaagtaggaattaatctagtagaaaagattacaacatggccaaaatttagggttgttaagccaaactcattcactttctcgttttcctccgtatcccctcctaatgtattaccgacaagatatcgccattacaagatatctctggatatatcacaattggaagcgttgaatatatcatcgacaaagacatttataacggtcaatattgttttgctgtctcaatatttatctagagtgagtctagaattcattagacgtagtttatcatacgatatgcctccagaagttgtctatctagtaaacgcgataatagatagtgctaaacgaattactgaatctattactgactttaatattgatacatacattaatgacctggtggaagctgaacacattaaacaaaaatctcagttaacgatcaacgagttcaaatatgaaatgctgcataactttttacctcatatgaactatacacccgatcaactaaagggattttatatgatatctttactaagaaagtttctctactgtatcttccacacttctagatatccagatagagattcgatggtttgtcatcgcatcctaacgtacggcaaatattttgagacgttggcacatgatgaattagagaattacataggcaacatccgaaacgatatcatgaacaatcacaagaacagaggcacttacgcggtaaacattcatgtactaacaactcccggacttaatcacgcgttttctagcttattgagtggaaagttcaaaaagtcagacggtagttatcgaacacatcctcactattcatggatgcagaatatttctattcctaggagtgttggattttatccggatcaagtaaagatttcaaagatgttttctgtcagaaaataccatccaagtcaatatctttacttttgttcatcagacgttccggaaagaggtcctcaggtaggtttagtatctcaattgtctgtcttgagttccattacaaatatactaacgtctgagtatttggatttggaaaagaaaatttgtgagtatatcagatcatattataaagatgatataagttactttgaaacaggatttccaatcactatagaaaatgctctagtcgcatctcttaatccaaatatgatatgtgattttgtaactgactttagacgtagaaaacggatgggattcttcggtaacttggaggtaggtattactttagttagggatcacatgaatgaaattcgcattaatattggagcgggaagattagtcagaccattcttggttgtggataacggagagctcatgatggatgtgtgtccggagttagaaagcagattagacgacatgacattctctgacattcagaaagagtttccgcatgtcatcgaaatggtagatatagaacaatttacttttagtaacgtatgtgaatcggttcaaaaatttagaatgatgtcaaaggatgaaagaaagcaatacgatttatgtgactttcctgccgaatttagagatggatatgtagcatcttcattagtgggaatcaatcacaattctggacccagagctattcttggatgtgctcaagctaaacaagctatctcttgtctgagctcggatatacgaaataaaatagacaatggaattcatttgatgtatccagagaggccaatcgtgattagtaaggctttagaaacttcaaagattgcggctaattgcttcggccaacatgttactatagcattaatgtcgtacaaaggtatcaatcaagaggatggaattatcatcaaaaaacaatttattcagagaggcggtctcgatattgttacagccaagaaacatcaagtagaaattccattggaaaactttaataacaaagaaagagataggtctaacgcctattcaaaattagaaagtaatggattagttagactgaatgctttcttggaatccggagacgctatggcacgaaatatctcatcaagaactcttgaagatgattttgctagagataatcagattagcttcgatgtttccgagaaatataccgatatgtacaaatctcgcgttgaacgagtacaagtagaacttactgacaaagttaaggtacgagtattaaccatgaaagaaagaagacccattctaggagacaaatttaccactagaacgagtcaaaagggaacagtcgcgtatgtcgcggatgaaacggaacttccatacgacgaaaatggtatcacaccagatgtcattattaattctacatccatcttctctagaaaaactatatctatgttgatagaagttattttaacagccgcatattctgctaagccgtacaacaataagggagaaaaccgacctgtctgttttcctagtagtaacgaaacatccatcgatacatatatgcaattcgctaaacaatgttatgagcattcaaatccgaaattgtccgatgaagaattatcggataaaatcttttgtgaaaagattctctatgatcctgaaacggataagccttatgcatccaaagtattttttggaccaatttattacttgcgtctgaggcatttaactcaggacaaggcaaccgttagatgtagaggtaaaaagacgaagctcattagacaggcgaatgagggacgaaaacgtggaggaggtatcaagttcggagaaatggagagagactgtttaatagcgcatggtgcagccaatactattacagaagttttgaaagattcggaagaagattatcaagatgtgtatgtttgtgaaaattgtggagacatagcagcacaaatcaagggtattaatacatgtcttagatgttcaaaacttaatctctctcctctcttaacaaaaattgataccacgcacgtatctaaagtatttcttactcaaatgaacgccagaggcgtaaaagtcaaattagatttcgaacgaaggcctccttcgttttataaaccattagataaagttgatctcaagccgtcttttctggtgtaatattctagtttggtagtagatacatatcaatatcatcaaattcgagatccgaattataaaatgggcgtggattgttaactatagaatcggacgtctgatattcgaaaatctgtggagtttcaggttttggtggaggtgtaactgctacttgggatactgaagtctgatattcagaaagctgtggatgttctggttcggcatccaccgatggtgtcacatcactaatcggttcggtaacgtctgtggatggaggtgctacttctacagaacctgtagcctcagttgtcaacggagatacatttttaatgcgagaaaatgtataatttggtaatggtttcttatgtggatctgaagaagaggtaagatatctactagaaagataccgatcacgttctagttctcttttgtagaacttaactttttctttctccgcatctagttgatattccaacctcttcacgttactacgttcagattccaattcacgttcgcatgggttacctccgcagtttttacgagcgatttcacgttcagccttcatgcgtctctccctctctctatcgagtttatcagagcagtctttctgaaggcgatcgaactccataaatttctccaacgctttgattgtttccatagatttccgaagttcagcttttaggactgtgattctttttctttcgaattcacagctggatgtacaaccgtttccattaccgccatctctaagtttcttttctagatcggcaacatttcatccccatgccttttacattcctcgagtctactgtcgtcgaaatatcgttccagctccttttcgacatcaataactttagcacgttgtctctcaagctctcttttgtagttatctgattccctggcacgtttaagatcttcatgcaattgagtcagctcttaacttcctctcttgcttcttcgtcatagtacgcgcaatcactgtgagatccattgttaccacgtctacactcggcgagctcgcgtttaagagattcaatttcccgtttgtattggtccatgtttccattgctaccaccattagatttacaggctgctagttgtcgttcgagatcagaaatacgggttttcttggaattgatttcgtcgatgtacttggcatcgaaacacttattaagttctttttccaattctacgattttatttctttcgcgagtcaattccctcctgtagtaactatctgttttgtcagattcacgctctctacgtagactttcttgcaagttactaatttgttccctagcacgtccgagtttagttttatatgctgaatagagttctgattcatcctttgagcagatctctagcgatcgtttaagattcctaattctagtctttagcctatttacctcctcagaagatgttccgttaccgttgcgtttacactcgttaagctgtctatcaagatccatgattctatctctaagacgttgcatctctctttccatatcagcattgctttcattattacgtctgcagtcactcaactgtctttcaatatctgagattctatctctaagacgtcgcatctctctctgtttcggcattggtttcattattacgtttacagtcgttcaactgtctttcaagatctgatattctagattggagtctgctaatctctgtagcattttcacggcattcactcagttgtctttcaagatctgaaattttagattggagtctgctaatctctgtaagatttcctcctccgctctcgatgcagtcggtcaacttattctctagttctctaatacgcgaacgcagtgcatcaacttcttgcgtgtcttcctggttgcgtgtacattcatcgagatctctaacgcgtcgtcgttcttcctcaagttctctgcgtactacagaaagcgtgtccctatcttgttgatatttagcaatttctgattctagagtactgattttgcttacgtagttactaatagttgtcttggccttatcaagatcctccttgtatttgtcgcattccttgatatccctacgaagtctggacagttcccattcgacattacgacgtttatcgatttcagctcggagatcgtcatcgcgttgttttagccacatacgactgagttcaagttctcgttgacaagatccatctacttttccattcctaatagtatccagttccttttctagttctgaacgcatttctcgttccctatcaagcgattctctcaattctcggatagtcttcttatcaatttctaataaatctgaaccatcatctgtcccattttgaatatccctgtgttctttgatctcttttgtaagtcggtcgattctttcggttttataaacagaatccctttccaaagtcctaatcttactgagtttatcactaagttctgcattcaattcggtgagttttctcttggcttcttccaactctgttttaaactctccactatttccgcattcttcctcgcatttatctaaccattcaattagtttattaataactagttggtaatcagcgattcctatagccgttcttgtaattgtgggaacataattaggatcttctaatggattgtatggcttgatagcatcatctttatcattattagggggatggacaaccttaattggttggtcctcatctcctccagtagcgtgtggttcttcaataccagtgttagtaataggcttaggcaaatgcttgtcgtacgcgggcacttcctcatccatcaagtatttataatcgggttctacttcagaatattcttttctaagagacgcgacttcgggagttagtagaagaactctgtttctgtatctatcaacgctggaatcaatactcaagttaaggatagcgaatacctcatcgtcatcatccgtatcttctgaaacaccatcatatgacatttcatgaagtctaacgtattgataaatagaatcagatttagtattaaacagatccttaacctttttagtaaacgcatatgtatattttagatctccagatttcataatatgatcacatgccttaaatgtcagtgcttccatgatataatctggaacactaatgggtgacgaaaaagatacagcaccatatgctacgttgataaataaatctgaaccactaagtagataatgattaatgttaagaaagaggaaatattcagtgtataggtatgtcttggcgtcatatcttgtactaaacacgctaaacagtttgttaatgtgatcaatttccaatagattaattagagcagcgggaataccaacaaacatattaccacatccgtattttctatgaatatcacatatcatgttaaaaaatcttgatagaagagcgaatatctcgtctgacttaatgagtcgtagttcagcagcaacataagtcataactgtaaatagaacatactttcctgtagtgttgattctagactccacatcaacaccattattaaaaatagttttatatacatctttaatctgctctccgttaatcgtcgaacgttctagtatacggaaacactttgatttcttatctgtagttaatgacttagtgatatcacgaagaatattacgaattacatttcttgtttttcttgagagacctgattcagaactcaactcatcgttccatagtttttctacctcagtggcgaaatctttggagtgcttggtacatttttcaataaggttcgtgacctccatttattataaaaaatttattcaaaacttaactacaatcgggtaattataagatcgtagatctcccatgtggcggaatactaccatctatcgcatgtggatggacagtaggtaatggccatgggaacagtaatgtttgcatatttatctttcttgctagtattactgcatattgtcccaatgtttcgatgtgatgttctaacctatcaactgccgctgtatcacaacaatagtgtccgatgaaattaagattatgatccaatgtgtttaatatatgattatcaagtcttatacgatccgcgtcttttttgacaggatcaggttcttctacaggaagaagtttcggcctcttatgatattcatgtctgggaaacggtggtctagggtgaggctccggtatcggagtgggttttggattataatcatcatcgtctatgacatcatcttcgacttcgatatttattttgctatcttgatgatgtcctgtatcagttgcattttcagcactcgactgaatattagcgcattcattgtctattattaccatatttctaaacccaaaatgtatgtgttgaacatcagtactatcgttgatgagtcttatagcatgaattcgcttatcgttatcgggtttatcttctgtcaccttagcaattccttttttattaaactctacataatcatatccatttctattgtttgttctaatataaacgagtatagcatcattgctaaatttttcaatagtatcaaaaacagaatatcctaaaccatataatatatattcaggaacactcaaactaaatgtccaggattctcctaaatacgtaaactttaatagtgcgaaatcattcaaaaatctaccacttatagatagatagtacataaatgcgtatagtagtctacctatctctttattatgaaaaccggcattacgatcatatatgtcgtgatatacctgtgatccgtttacgttaaaccataaatacatgggtgatcctataaacatgaatttatttctaattctcagagctatagttaattgaccgtgtaatatttgcttacatgcatacttgatacgcttattaataagatttttatcattgctcgttatttcagaatcgtatatataaggagtaccatcgtgattcttaccagatattatacaaaatactatatataaaatatattgacccacgttagtaatcatataaatgtttaacgttttaaattttgtattcaatgatccattatcatacgctatcatggtcttgtaatattcattctttaaaatataatattgtgttagccattgcattggagctcctaatggagattttctattctcatccattttaggataggctttcataaagtccctaataacttcgtgaataatgtttctatgttttctactgatgcatgtatttgcttcgatttttttatcccatgtttcatctatcatagatttaaacgcagtaatgctcgcaacattaacatcttgaaccgttggtacaattccgttccataaatttataatgttcgccatttatataactcattttttgaatatacttttaattaacaaaagagttaagttactcatatggacgccgtccagtctgaacatcaatctttttagccagagatatcatagccgctcttagagtttcagcgtgattttccaacctaaatagaacttcatcgttgcgtttacaacacttttctatttgttcaaactttgttgttacattagtaatctttttttccaaattagttagccgttgtttgagagtttcctcattgtcgtcttcatcggctttaacaattgcttcgcgtttagcctctggctttttagcagcctttgtagaaaaaaattcagttgctggaattgcaagatcgtcatctccggggaaaagagttccgtccatttaaagtacagattttagaaactgacactctgcgttatttatatttggtacaacacatggattataaatattgatgttaataacatcagaaaatgtaaagtctatacattgttgcatcgtgttaaattttctaatggatctagtattattgggtccaacttctgcctgaaatccaaatatggaagcggatacaaaaccgtttcctggataaaccacacatctccacttttgctttacatcagaaattgtgtcgttgacatcttgaactctcctatctaatgccggtgttccacctatagattttgaatattcgaatgctgcatgagtagcattaaattccttaatattgccataattttcatatattgagtaaccctggataaaaagtaaacacaccgcagccgtcgctaccacaataaaaaaaattgatagagagttcatttataatctattagaagctgacaaaatttttttacacgcatcagacaatgctttaataaatagttcaacatctacttttgtcatatcgaaccgatggtatgattctaacctagaattacatccgaaaaagttgactatgttcatagtcattaagtcattaacaaacaacattccagactctggattataagacgatactgtttcgtcacaattacctaccttaatcatgtgattatgaatattggctattagagcaccttctaagaaatctataatatctttgaaacacgatttaaaatcaaaccacgaatatacttctacgaagaaagttagtttacccataggagaaataactataaatggagatctaaatacaaaatccggatctatgatagttttaacattattatattctctattaaatacctccacatctaaaaatgttaattttgaaactatgtcttcgtttattaccgtacctgaactaaacgctataagctctattgtttgagaactctttaaacgatattcttgaaatacatgtaacaaagtttcctttaactcggtcggtttatctaccatagttacagaatttgtatccttatctataatataataatcaaaatcgtataaagttatataattatcgcgttcagattgtgatcttttcaaatagactaaaaaccccatttctctagtaagtatcttatgtatatgtttgtaaaatatcttcatggtgggaatatgctctaccgcagttagccattcctcattgacagcggtagatgtattagacaaaactattccaatgtttaacaagggccattttacgagattattaaatccttgtttgataaatgtagccaatgagggttcgagttcaacgacgattgaattctcttcccgcggatgctgcatgatgaacgacgggatgttgttcgattgatttggaattctttttcgactttttgtttatattaaatattttaaaatttatagcggatagcaattcatgtaccacggataatgtagacgcgtattgcgcatcgatatctttattattagataaatttatcaataaatgtgagaagtttgcctcgttaaggtcttccatttaaatattatataaacatttgtgtttgtatcttattcgtcttttatggaatagttttttactagtaaagctgcaattacacactttgtccgtaaaacataaatataaacaccagcttttatcaatcgttccaaaaagtcgacggcggacatttttaacatggcatctattttaaatacacttaggtttttggaaaaaacatcattttataattgtaacgattcaataactaaagaaaagattaagattaaacataagggaatgtcatttgtattttataagccaaagcattctaccgttgttaaatacttgtctggaggaggtatatatcatgatgatttggttgtattggggaaggtaacaattaataatctaaagatgatgctattttacatggatttatcatatcatggagtgacaagtagtggagcaatttacaaattgggatcgtctatcgatagactttctctaaataggactattgttacaaaagttaataattatgatgatacattttttgacgacgatgattgatcgctattgcacaattttgtttttgtactttctaatatagtgtttaggttctttttcatatgagaatattgatttactaaaatatctatgtttaacttttgttctatgacgtccttatcggcggtatcggtacatatacgtaattcaccttcacaaaatacggagtcttcgataataatagccaatcgattattggatctagctgtctgtatcatattcaacatgtttaatatatcctttcgtttcccctttacaggcatcgatcgtagcatattttccgcgtctgatatggaaatgttaaaactacaaaaatgcgtaatgttagcccgtcctaatattggtacgtgtctataagtttggcatagtagaataatagacgtgtttaaatgccttccaaagtttaagaattctattagagtattgcattttgatagtttatcgcctacatcatcaaaaataagtaaaaagtgtgctgattttttatgattttgtgcgacagcaatacatttttctatgttacttttagttcgtatcagattatattctagagattcctgactactaacgaaattaatatgatttggccaaatgtatccatcataatctgggttataaacgggtgtaaacaagaatatatgtttatattttttaactagtgtagaaaacagagatagtaaatagatagtttttccagatccagatcctcctgttaaaaccattctaaacggcatttttaataaattttctcttgaaaattgtttttcttggaaacaattcataattatatttacagttactaaattaatttgataataaatcaaaatatggaaaactaaggttgttagtagggaggagaacaaagaaggcacatcgtgatataaataacatttattatcatgatgacaccagaaaacgacgaagagcagacatctgtgttctccgctactgtttacggagacaaaattcagggaaagaataaacgcaaacgcgtgattggtctatgtattagaatatctatggttatttcactactatctatgattaccatgtccgcgtttctcatagtgcgcctaaatcaatgcatgtctgctaacgaggctgctattactgacgccgctgttgccgttgctgctgcatcatctactcatagaaaggttgcgtctagcactacacaatatgatcacaaagaaagctgtaatggtttatattaccagggttcttgttatatattacattcagactaccagttattctcggatgctaaagcaaattgcactgcggaatcatcaacactacccaataaatccgatgtcttgactacctggctcattgattatgttgaggatacatggggatctgatggtaatccaattacaaaaactacatccgattatcaagattctgatgtatcacaagaagttagaaagtatttttgtgttaaaacaatgaactaatatttatttttgtacattaataaatgaaatcgcttaatagacaaactgtaagtaggtttaagaagttgtcggtgccggccgctataatgatgatactctcaaccattattagtggcataggaacatttctgcattacaaagaagaactgatgcctagtgcttgcgccaatggatggatacaatacgataaacattgttatttagatactaacattaaaatgtctacagataatgcggtttatcagtgtcgtaaattacgagctagattgcctagacctgatactagacatctgagagtattgtttagtattttttataaagattattgggtaagtttaaaaaagaccaatgataaatggttagatattaataatgataaagatatagatattagtaaattaacaaattttaaacaactaaacagtacgacggatgctgaagcgtgttatatatacaagtctggaaaactggttaaaacagtatgtaaaagtactcaatctgtactatgtgttaaaaaattctacaagtgacaacaaaaaatgaattaataataagtcgttaacgtacgccgccatggacgccgcgtttgttattactccaatgggtgtgttgactataacagatacattgtatgatgatctcgatatctcaatcatggactttataggaccatacattataggtaacataaaaactgtccaaatagatgtacgggatataaaatattccgacatgcaaaaatgctactttagctataagggtaaaatagttcctcaggattctaatgatttggctagattcaacatttatagcatttgtgccgcatacagatcaaaaaataccatcatcatagcatgcgactatgatatcatgttagatatagaagataaacatcagccattttatctattcccatctattgatgtttttaacgctacaatcatagaagcgtataacctgtatacagctggagattatcatctaatcatcaatccttcagataatctgaaaatgaaattgtcgtttaattcttcattctgcatatcagacggcaatggatggatcataattgatgggaaatgcaatagtaattttttatcataaaagttgtaaagtaaataataaaacaataaatattgaactagtagtacgtatattgagcaatcagaaatgatgctggtacctcttatcacggtgaccgtagttgcgggaacaatattagtatgttatatattatatatttgtaggaaaaagatacgtactgtctataatgacaataaaattatcatgacaaaattaaaaaagataaagagttctaattccagcaaatctagtaaatcaactgatagcgaatcagactgggaggatcactgtagtgctatggaacaaaacaatgacgtagataatatttctaggaatgagatattggacgatgatagcttcgctggtagtttaatatgggataacgaatccaatgttatggcgcctagcacagaacacatttacgatagtgttgctggaagcacgctgctaataaataatgatcgtaatgaacagactatttatcagaacactacagtagtaattaatgaaacggagactgttgaagtacttaatgaagataccaaacagaatcctaactattcatccaatcctttcgtaaattataataaaaccagtatttgtagcaagtcaaatccgtttattacagaacttaacaataaatttagtgagaataatccgtttagacgagcacatagcgatgattatcttaataagcaagaacaagatcatgaacacgatgatatagaatcatcggtcgtatcattggtgtgattagtttcctttttataaaattgaagtaatatttagtattattgctgccgtcacgttgtacaaatggagatattccctgtattcggcatttctaaaattagcaattttattgctaataatgactgtagatattatatagatacagaacatcaaaaaattatatctgatgagatcaatagacagatggatgaaacggtacttcttaccaacatcttaagcgtagaagttgtaaatgacaatgagatgtaccatcttattcctcatagattatcgacgattatactctgtattagttctgtcggaggatgtgttatctctatagataatgacatcaatggcaaaaatattctaacctttcccattgatcatgctgtaatcatatccccactgagtaaatgtgtcgtagttagcaagggtcctacaaccatattggttgttaaagcggatatacctagcaaacgattggtaacatcgtttacaaacgacatactatatgtaaacaatctgtcactgattaattatttgccgttgtctgtattcattattagacgagtcaccgactatttggatagacacatatgcgatcagatatttgctaataataagtggtattcccttataaccatcgacgataagcaatatcctattccatcaaactgtataggtatgtcctctgccaagtacataaattctagcatcgagcaagatactttaatccatgtttgtaacctcgagcatccgttcgactcagtatacaaaaaaatgcagtcgtacaattctctacctatcaaggaacaaatattgtacggtagaattgataatataaatatgagcattagtatttctgtggattaatagatttctagtatggggatcattaatcatctctaatctctaaatacctcataaaacgaaaaaaaagctattatcaaatactgtacggaatggattcattctcttctctttttatgaaactctgttgtatatctactgataaaactggaagcaaaaaatctgatagaaagaataagaataagatcaaggattatatggaacacgattattataaaataacaatagttcctggttcctcttccacgtctactagctcgtggtattatacacatgcctagtaatagtctctttgcgttgacggaaagcagactagaaataacaggctaaaatgttcagacaccataatagttcccaacccagataataacagagttccatcaacacattcctttaaactcaatcccaaacccaaaaccgttaaaatgtatccggccaattgatagtagataatgaggtgtacagcgcatgataatttacacagtaaccaaaatgaaaatactttagtaattataagaaatatagacggtaatgtcatcatcaacaatccgataatatgcctgagagtaaacattgacggataaaacaaaaatgctccgcataactctatcatggcaataacacaaccaaatacttgtaagattcctaaattagtagaaaatacaacgaatatcgatgtataagtgatctcgagaaataataagaataaagtaatgcccgtaaagataaacatcaacattgtttggtaatcattaaaccaattagtatgaagttgaactaatttcacagtagattttattccagtgttatcctcgcatgtataagtacctggtaagatatctttatattccataatcaatgagacatcactatctgataacgaatgaagtctagcactagtatgccatttacttaatattgtcgtcttggaagttttattataagttaaaatatcatggttatccaatttccatctaatatactttgtcggattatctatagtacacggaataatgatggtatcattacatgctgtatactctatggtctttgtagttgttataacaaccaacgtatagaggtatatcaacgatattctaactcttgacattttttatttatttaaaatgatacctttgttatttattttattctattttgctaacggtattgaatggcataagtttgaaacgagtgaagaaataatttctacttacttattagacgacgtattatacacgggtgttaatggggcggtatacacattttcaaataataaactaaacaaaactggtttaactaataataattatataacaacatctataaaagtagaggatgcggataaggatacattagtatgcggaaccaataacggaaatcccaaatgttggaaaatagacggttcagacgacccaaaacatagaggtagaggatacgctccttatcaaaatagcaaagtaacgataatcagtcacaacggatgtgtactatctgacataaacatatcaaaagaaggaattaaacgatggagaagatttgacggaccatgtggttatgatttattcacggcggataacgtaattccaaaagatggtttacgaggagcattcgtcgataaagacggtacttatgacaaagtttacattcttttcactgatactatcggctcaaagagaattgtcaaaattccgtatatagcacaaatgtgcctaaacgacgaaggtggtccatcatcattgtctagtcatagatggtcgacgtttctcaaagtcgaattagaatgtgatatcgacggaagaagttatagacaaattattcattctagaactataaaaacagataatgatacgatactatatgtattcttcgatagtccttattccaagtccgcattatgtacctattctatgaataccattaaacaatctttttctacgtcaaaattggaaggatatacaaagcaattgccgtctccagctcctggtatatgtttaccagctggaaaagttgttccacataccacgtttgaagtcatagaacaatataatgtactagatgatattataaagcctttatctaaccaacctatcttcgaaggaccgtctggtgttaaatggttcgatataaaggagaaggaaaatgaacatcgggaatatagaatatacttcataaaagaaaattctatatattcgttcgatacaaaatctaaacaaactcgtagctcgcaagtcgatgcgcgactattttcagtaatggtaactgcgaaaccgttatttatagcagatatagggataggagtaggaatgccacaaatgaaaaaaatacttaaaatgtaatcttaatcgagtacaccacacgacaatgaacaaacataagacagattatgctggttatgcttgctgcgtaatatgcggtctaattgtcggaattatttttacagcgacactattaaaagttgtagaacgtaaattagttcatacaccattaatagataaaacgataaaagatgcatatattagagaagattgtcctactgactggataagctataataataaatgtatccatttatctactgatcgaaaaacctgggaggaaggacgtaatgcatgcaaagctctaaattcaaattcggatctaattaagatagagactccaaacgagttaagttttttaagaagccttagacgaggctattgggtaggagaatccgaaatattaaaccagacaaccccatataattttatagctaagaatgccacgaagaatggaactaaaaaacggaaatatatttgtagcacaacgaatactcccaaactgcattcgtgttacactatataacaattacactacatttttatcataccactacttcggttagatgttttagaaaaaaataaatatcgccgtaccgttcttgtttttataaaaataacaattaacaattatcaaattttttctttaatattttacgtggttgaccattcttggtggtaaaataatctcttagtgttggaatggaatgctgtttaatgtttccacactcatcgtatattttgacgtatgtagtcacatcgtttacgcaatagtcagactgtagttctatcatgcttcctacatcagaaggaggaacagttttaaagtctcttggttttaatctattaccgttagttttcatgaaatcctttgttttatccacttcacattttaaataaatgtccactatacattcttttgttaattttactagatcgtcatgggtcatagaatttataggttccgtagtccatggatccaaactagcaaacttcgcgtatacggtatcgcgattagtgtatacaccaactgtatgaaaattaagaaaacagtttaataaatcaacagaaatatttaatcctccgtttgatacagatgcgccatatttatggatttcggattcacacgttgtttgtctgaggtgttcgtctagtgttgcttctacgtaaacttcgattcccatatattctttattgtcagaatcgcataccgatttatcatcatacactgtttgaaaactaaatggtatacacatcaaaataataaataataacgagtacattctgcaatattgttatcgtaattggaaaaatagtgttcgagtgagttggattatgtgagtattggattgtatattttattttatattttgtaataagaataaaatgctaatgtcaagtttattccaatagatgtcttattaaaaacatatataataaataacaatggctgaatggcataaaattatcgaggatatctcaaaaaataataagttcgaggatgccgccatcgttgattacaagactacaaagaatgttctagctgctattcctaacagaacatttgccaagattaatccgggtgaaattattcctctcatcactaatcgtaatattctaaaacctcttattggtcagaaatattgtattgtatatactaactctctaatggatgagaacacgtatgctatggagttgcttactgggtacgcccctgtatctccgatcgttatagcgagaactcataccgcacttatatttttgatgggtaagccaacaacatccagacgtgacgtgtatagaacgtgtagagatcacgctacccgtgtacgtgcaactggtaattaaaataaaaagtaatattcatatgtagtgtcaattttaaatgatgatgatgaaatggataatatccatattgacgatgtcaataatgccggtattggcatacagttcatcgatttttagatttcattcagaggatgtggaattatgttatgggcatttgtattttgataggatctataatgtagtaaatataaaatataatccgcatattccatatagatataattttattaatcgcacgttaaccgtagatgaactagacgataatgtcttttttacacatggttattttttaaaacacaaatatggttcacttaatcctagtttgattgtctcattatcaggaaacttaaaatataatgatatacaatgctcagtaaatgtatcgtgtctcattaaaaatttggcaacgagtacatctactatattaacatctaaacataagacttattctctacatcggtccacgtgtattactataataggatacgattctattatatggtataaagatataaatgacaagtataatgacatctatgattttactgcaatatgtatgctaatagcgtctacattgatagtgaccatatacgtgtttaaaaaaataaaaatgaactcttaattatgctatgctattagaaatggataaaatcaaaattacggttgattcaaaaattggtaatgttgttaccatatcgtataacttggaaaagataactattgatgtcacacctaaaaagaaaaaagaaaaggatgtattattagcgcaatcagttgctgtcgaagaggcaaaagatgtcaaggtagaagaaaaaaatattatcgatattgaagatgacgatgatatggatgtagaaagcgcgtaatacgatctataaaaataagtatataaatactttttatttactgtactcttactgtgtagtggtgataccctactcgattatttttttaaaaaaaaaatacttattctgattcttctagccatttccgtgttcgtttgaatgccacatcgacgtcaaagataggggagtagttgaaatctagttctgcattgttggtacgcacctcaaatgtagtgttggatatcttcaacgtatagttgttgagtagtgatggttttctaaatagaattctcttcatatcattcttgcacgcgtacatttttagcatccatcttggaatcctagatccttgttctattcccaatggtttcatcaatagaagattaaacatatcgtacgaacacgatggagagtaatcgtagcaaaagtaagcatttcctttaatcttagatcccggatactggatatattttgcagccaacacgtgcatccatgcagcatttcctacatatacccggctatgcaccgcgtcatcatcgactgtacgatacataatgttaccgtgttgcttacattgctcgtaaaagactttcatcaatttgtctccttctccgtaaattccagtgggtcttaggcaacaagtatacaattttgctccattcatgattacggaattattggctttcataaccagttgctcggccatacgtttactttttgcgtatacatgtcctggtgatatatcataaagggtatgctcatggccgatgaatggatcaccgtgtttattgggtcctattgcttccatgctactagtatagatcaaatacttgattcctaggtccacacaagctgccaaaatagtctgtgttccataatagtttactttcatgatttcattatcggtgtattttccaaatacatccactagagcagccgtatgaataatcagatttaccccatctagcgcttctctcaccttatcaaagtcgtttatatcacattgtatatagtttataaccttaactttcgaggttattggttgtggatcttctacaatatctatgactctgatttcttgaacatcatctgcactaattaacagttttactatatacctgcctagaaatccggcaccaccagtaaccgcgtacacggccattgctgccactcataatatcagactacttattctattttactaaataatggctgtttgtataatagaccacgataatatcagaggagttatttactttgaaccagtccatggaaaagataaagttttaggatcagttattggattaaaatccggaacgtatagtttgataattcatcgttacggagatattagtcaaggatgtgattccataggcagtccagaaatatttatcggtaacatctttgtaaacagatatggtgtagcatatgtttatttagatacagatgtaaatatatttacaattattggaaaggcgttatctatttcaaaaaatgatcagagattagcgtgtggagttattggtatttcttacataaatgaaaagataatacattttcttacaattaacgagaatggcgtttgatatatcagttaatgcgtctaaaacaataaatgcattagtttacttttctactcagcaaaataaattagtcatacgtaatgaagttaatgatacacactacactgtcgaatttgatagggacaaagtagttgacacgtttatttcatataatagacataatgacaccatagagataagaggggtgcttccagaggaaactaatattggttgcgcggttagtatgacttacttgtataataagtatagttttaaactgattttagcagaatatataagacacagaaatactatatccggcaatatttattcggcattgatgacactagatgatttggctattaaacagtatggagacattgatctattatttaatgagaaacttaaagtagactccgattcgggactatttgactttgtcaactttgtaaaggatatgatatgttgtgattctagaatagtagtagctctatctagtctagtatctaaacattgggaattgacaaataaaaaatataggtgtatggcattagccgaacatatatctgatagtattccaatatctgagctatctagactacgatacaatctatgtaagtatctacgcggacacactgagagcatagaggataaatttgattattttgaagacgatgattcgtctacatgttctgccgtaaccgacagggaaacggatgtataattttttttatagcgtgaaggatatgataaaaaatataattgttgtatttatcccattccaatcaccttatatgattctgtaacacaataaaggagtcttatagatgtatagaggtcagatactggtttgataaactgtttattccacataagtatgtttgactttatggttagacccgcatactttaacaaatcactgaaaattggagttaggtattgacctctcagaatcagttgccgttctggaacattaaatgtattttttatgatatactccaacgcatttatgtgggcatacaacaagtcattactaatggaatattccaagagttttagttgtctagtatttaacaagagaagagatttcaacagactgtttatgaactcgaatgccgcctcattgtcgcttatattgatgatgtcgaattctcccaatatcatcaccgatgagtagctcatcttgttatcgggatccaagttttctaaagatgtcattaaaccctcgatcatgaatggatttatcatcatcgtttttatgttggacatgagcttagtccgtttgtccacatctatagaagatgatttctgaattatttcatatatctctctctttaactccaggaacttgtcaggatggtctactttaatatgttctcgtctaagagatgaaaatctttggatggttgcacgcgacttttctctaaaggatgacgttgcccaagatcctctcttaaatgaatccatcttatccttggacaagatggacagtctattttccttagatggtttaatatttttgttacccatgatctataaaggtagacctaatcgtctcggatgaccatatatttattttcagttttattatacgcataaattgtaaaaaatatgttaggtttacgaaaatgtctcgtggggcattaatcgtttttgaaggattggacaaatctggaaaaacaacacaatgtatgaacatcatggaatcaataccttcaaacacaataaaataccttaactttcctcagagatccactgtcactggaaagatgatagatgactatctaactcgtaaaaaaacctataatgatcatatagttaatctattattttgtgcaaatagatgggagtttgcatcttttatacaagaacaactagaacagggaattactttaatagttgatagatacgcattttctggagtagcgtatgccgccgctaaaggcgcgtcaatgactctcagtaagagttatgaatctggattgcctaaacccgacttagttatattcttggaatctggtagcaaagaaattaatagaaacgtcggtgaggaaatttatgaagatgttacattccaacaaaaggtattacaagaatataaaaaaatgattgaagaaggagatattcattggcaaattatttcttctgaattcgaggaagatgtaaagaaggagttgattaagaatatagttatagaggctatacacacggttactggaccagtggggcaactgtggatgtaatagtgaaattacattttttataaatagatgttagtacagtgttataaatggatgaagcatattactctggcaacttggaatcagtactcggatacgtgtccgatatgcataccgaactcgcatcaatatctcaattagttattgccaagatagaaactatagataatgatatattaaacaaggacattgtaaattttatcatgtgtagatcaaacttggataatccatttatctctttcctagatactgtatatactattatagatcaagagaactatcagactgagttgattaattcattagacgacaatgaaattatcgattgtatagttaataagtttatgagcttttataaggataacctagaaaatatagtagatgctatcattactctaaaatatataatgaataatccagattttaaaactacgtatgccgaagtactcggttccagaatagccgatatagatattaaacaagtgatacgtaagaatatactacaattgtctaataatatccgcgaacgatatttgtgaaaatattaaaaaaaaatactttttttattaaatgacgtcttttcgtgaatttagaaaattatgctgtgctatatatcacgcatcaggatataaagaaaaatctaaattaattagagactttataacagatagggatgataaatatttgatcattaagctattgcttcccggattagacgatagaatttataacatgaacgataaacaaattataaaattatatagtataatatttaaacaatctcaggaagatatgctacaagatttaggatacggatatataggagacactattaggactttcttcaaagagaacacagaaatccgtccacgagataaaagcattttaactttagaagaagtggatagttttttaactacgttatcatccgtaactaaagaatcgcatcaaataaaattattgactgatgtagcatctgtttgtacatgtaatgatttaaaatgtgtagtcatgcttattgataaagatctaaaaattaaagcgggtcctcggtacgtacttaacgctattagtcctaatgcctatgatgtgtttagaaaatctaataacttgaaagagataatagaaaattcatctaaacaaaatctagactctatatctatttctgttatgactccaattaatcccatgttagcggaatcgtgtgattctgtcaataaggcgtttaaaaaatttccatcaggaatgtttgcggaagtcaaatacgatggtgaaagagtacaagttcataaaaataataacgagtttgccttctttagtagaaacatgaaaccagtactctctcataaagtggattatctcaaagaatacataccgaaagcatttaaaaaagctacgtctatcgtattggattctgaaattgttcttgtagacgaacataatgtaccgctcccgtttggaagtttaggtatacacaaaaagaaagaatataaaaactctaacatgtgtttgttcgtgtttgactgtttgtactttgatggattcgatatgacggacattccattgtacgaacgaagatcttttctcaaagatgttatggttgaaatacccaatagaatagtattctcagagttgacgaatattagtaacgagtctcagttaactgacgtattggatgatgcactaacgagaaaattagaaggattggtcttaaaagatattaatggagtatacgaaccgggaaagagaagatggttaaaaataaagcgagactatttgaacgagggttccatggcagattctgccgatttagtagtactaggtgcctactatggtaaaggagcaaagggtggtatcatggcagtctttctaatgggttgttacgacgatgaatccggtaaatggaagacggttaccaagtgttcaggacacgatgataatacgttaagggagttgcaagaccaattaaagatgattaaaattaacaaggatcccaaaaaaattccagagtggttagtagttaataaaatctatattcccgattttgtagtagaggatccgaaacaatctcagatatgggaaatttcaggagcagagtttacatcttccaagtcccataccgcaaatggaatatccattagatttcctagatttactaggataagagaggataaaacgtggaaagaatctactcatctaaacgatttagtaaacttgactaaatcttaatagttacatacaaactgaaaattaaaataacactatttagttggtggtcgccatggatggtgttattgtatactgtctaaacgcgctagtaaaacatggcgaggaaataaatcatataaaaaatgatttcatgattaaaccatgttgtgaaagagtttgtgaaaaagtcaagaacgttcacattggcggacaatctaaaaacaatacagtgattgcagatttgccatatatggataatgcggtatccgatgtatgcaattcactgtataaaaagaatgtatcaagaatatccagatttgctaatttgataaagatagatgacgatgacaagactcctactggtgtatataattattttaaacctaaagatgccattcctgttatcatatctataggaaaggataaagatgtctgtgaactattaatctcatcagacatatcgtgtgcatgcgtggagttaaattcatatcacgtagccattcttcccatggatgtttccttttttaccaaaggaaatgcatcattgattattctcctgtttgatttctctatcgatgcggcacctctcttaagaagtgtaaccgataataatgttattatatctagacaccagcgtctacatgacgagcttccgagttccaattggttcaagttttacataagtataaagtccgactattgttctatattatatatggttgttgatggatctgtgatgcatgcgatagctgataatagaactcacgcaattattagcaaaaatatattagacaatactacgattaacgatgagtgtagatgctgttattttgaaccacagattaggattcttgatagagatgagatgctcaatggatcatcgtgtgatatgaacagacattgtattatgatgaatttacctgatgtaggcgaatttggatctagtatgttggggaaatatgaacctgacatgattaagattgctctttcggtggctggtaatttaataagaaatcgagactacattcccgggagacgaggatatagctactacgtttacggtatagcctctagataatttttttaagcacgaaataaaaaacataattttaaaccaatctatttcatactattttgtgtgatcaccatggacataaagatagatattagtatttctggtgataaatttacggtgactactaggagggaaaatgaagaaagaaaaaaatatctacctctccaaaaagaaaaaactactgatgttatcaaacctgattatcttgagtacgatgacttgttagatagagatgagatgtttactattctagaggaatattttatgtacagaggtctattaggcctcagaataaaatatggacgactctttaacgaaattaaaaaattcgacaatgatgcggaagaacaattcggtactatagaagaactcaagcagaaacttagattaaattctgaagagggagcagataactttatagattatataaaggtacaaaaacaggatatcgtcaaacttactgtatacgattgcatatctatgataggattgtgtgcatgcgtggtagatgtttggagaaatgagaaactgttttctagatggaaatattgtttacgagcgattaaactgtttattgatgatcacatgcttgataagataaaatctatactgcagaatagactagtatatgtggaaatgtcatagaaagttaaaagttaatgagagcaaaaatatataaggttgtattccatatttgttatttttttctgtaatagttagaaaaatacattcgatggtctatctatcagattattatgtgttataaggtactttttctcataataaactagagtatgagtaagatagtgtttttcaaaacatataaatctaaaattgatggatgagatatacagctattaatttcgaaaatatattttaatctgataactttaaacatggatttttaatggtggtttaacgttttaaaaaaagattttgttattgtagtatatgataatattaaaagatggatataaagaatttgctgactgcatgtactattttttacattactacattggctacggcagatatacctacttcgtcactgccacacgctccggtaaacggggcatgtgacgagggagaatatcttgataagaggcataatcaatgttgtaatcagtgtccacctggagaatttgccaaggttagatgtaatggtaacgataacacaaaatgtgaacgctgcccacctcatacatataccgcaatccccaattactctaatggatgtcatcaatgtagaaaatgcccaacaggatcatttgataaggtaaagtgtaccggaacacagaacagtaaatgttcgtgtcttcctggttggtattgcgctactgattcttcacagactgaagattgtcgagattgtataccaaaaaggagatgtccatgcggatactttggtggaatagatgaacaaggaaatcctatttgtaaatcgtgttgtgttggtgaatattgcgactacctacgtaattatagacttgatccatttcctccatgcaaactatctaaatgtaattaattatgattttgatgataatgttaccatacattatatcgctacttggttagtgtattattcagtatgaagacctattaataattacttatcttttgacgatcttgttataattataatataaaaatacttatggcatagtaactcataattgctgacgcgataaattcgtaataatctgttttgttcaaatttttataaggaatctacaggcataaaaataaaaatataatttataatatactcttacagcgcgccatcatgaataacagcagtgaattgattgctgttattaatggatttagaaatagtggacgattttgtgatattaatatagttattaatgatgaaaggataaacgctcacagactcatcctatctggagcctccgaatatttttccattctgttttccaataattttatcgattctaatgaatacgaagttaatctaagtcatttagattatcaaagtgttaacgatttgatcgattacatttatgggatacctttgagcctaactaacgataacgtgaaatatattctttcaaccgctgattttttacaaattggatctgctattacggagtgtgaaaattacatacttaaaaatctttgttctagaaactgtatcgatttctacatatacgctgataaatataataacaagaaaatagaatcagcgtcgtttaacacaatattacaaaatattttgagactcatcaacgatgaaaactttaaatacttaacagaggaatcaatgataaaaattttaagcgatgatatgttaaatataaaaaatgaggatttcgccccactaattctcattaaatggttagagagtactcaacaaccatgcaccgtcgagttacttaaatgcctcagaatatcattgctttccccacaagttataaaatcactttatagtcatcgactggttagttcaatctacgaatgtataacattcttaaacaatatagcattcttggatgaatcatttcctagataccatagcatcgagttgatatctatcggtataagtaattcgcatgataagatttccataaactgctacaatcataaaaaaaatacatgggaaatgatatcttcacgtagatataggtgtagtttcgcagtggccgtcctggataatattatctatatgatgggtggatatgatcagtccccgtatagaagttcaaaggttatagcgtacaatacatgtacaaattcttggatatatgatataccagagctaaaatatcctcgttctaattgtgggggactggctgatgacgaatacatttattgtataggcggcatacgcgatcaggattcatcgttgacatctagtattgatagatggaagccatcaaaaccatattggcagaagtatgctaaaatgcgcgaaccaaaatgtgatatgggggttgcgatgttaaacggattaatatatgttataggtggaatcgttaaaggtgacacgtgtaccgacgcactagagagtttatcagaagatggatggatgaagcatcaacgtcttccaataaaaatgtccaatatgtcgacgattgttcatgatggcaagatttatatatctggaggttacaacaatagtagtgtagttaatgtaatatcgaatctagtccttagctataattcgatatatgatgaatggaccaaattatcatcattaaacattcctagaattaatcccgctctatggtcagcgcataataaattatatgtaggaggaggaatatctgatgatgttcgaactaatacatctgagacatacgacaaagaaaaagattgttggacattggataatggtcacgtgttaccacgcaattatataatgtataaatgcgaaccgattaaacataaatatccattggaaaaaacacagtacacgaatgattttctaaagtatttggaaagttttataggtagttgatagaacaaaatacataattttgtaaaaataaatcactttttatactaatatgacacgattaccaatacttttgttactaatatcattagtatacgctacaccttttcctcagacatctaaaaaaataggtgatgatgcaactctatcatgtaatcgaaataatacaaatgactacgttgttatgagtgcttggtataaggagcccaattccattattcttttagctgctaaaagcgacgtcttgtattttgataattataccaaggataaaatatcttacgactctccatacgatgatctagttacaactatcacaattaaatcattgactgctagagatgccggtacttatgtatgtgcattctttatgacatcaactacaaatgacactgataaagtagattatgaagaatactccacagagttgattgtaaatacagatagtgaatcgactatagacataatactatctggatctacacattcaccggaaactagttctaagaaacctgattatatagataattctaattgctcgtcggtattcgaaatcggtacccggggatcagcttgcatgcctgcagcaattcccgaggctgtagccgacgatggtgcgccaggagagttgttgattcattgtttgcctccctgctgcggtttttcaccgaagttcatgccagtccagcgtttttgcagcagaaaagccgccgacttcggtttgcggtcgcgagtgaagatccctttcttgttaccgccaacgcgcaatatgccttgcgaggtcgcaaaatcggcgaaattccatacctgttcaccgacgacggcgctgacgcgatcaaagacgcggtgatacatatccagccatgcacactgatactcttcactccacatgtcggtgtacattgagtgcagcccggctaacgtatccacgccgtattcggtgatgataatcggctgatgcagtttctcctgccaggccagaagttctttttccagtaccttctctgccgtttccaaatcgccgctttggacataccatccgtaataacggttcaggcacagcacatcaaagagatcgctgatggtatcggtgtgagcgtcgcagaacattacattgacgcaggtgatcggacgcgtcgggtcgagtttacgcgttgcttccgccagtggcgcgaaatattcccgtgcaccttgcggacgggtatccggttcgttggcaatactccacatcaccacgcttgggtggtttttgtcacgcgctatcagctctttaatcgcctgtaagtgcgcttgctgagtttccccgttgactgcctcttcgctgtacagttctttcggcttgttgcccgcttcgaaaccaatgcctaaagagaggttaaagccgacagcagcagtttcatcaatcaccacgatgccatgttcatctgcccagtcgagcatctcttcagcgtaagggtaatgcgaggtacggtaggagttggccccaatccagtccattaatgcgtggtcgtgcaccatcagcacgttatcgaatcctttgccacgcaagtccgcatcttcatgacgaccaaagccagtaaagtagaacggtttgtggttaatcaggaactgttcgcccttcactgccactgaccggatgccgacgcgaagcgggtagatatcacactctgtctggcttttggctgtgacgcacagttcatagagataaccttcacccggttgccagaggtgcggattcaccacttgcaaagtcccgctagtgccttgtccagttgcaaccacctgttgatccgcatcacgcagttcaacgctgacatcaccattggccaccacctgccagtcaacagacgcgtggttacagtcttgcgcgacatgcgtcaccacggtgatatcgtccacccaggtgttcggcgtggtgtagagcattacgctgcgatggattccggcatagttaaagaaatcatggaagtaagactgctttttcttgccgttttcgtcggtaatcaccattcccggcgggatagtctgccagttcagttcgttgttcacacaaacggtgatacgtacacttttcccggcaataacatacggcgtgacatcggcttcaaatggcgtatagccgccctgatgctccatcacttcctgattattgacccacactttgccgtaatgagtgaccgcatcgaaacgcagcacgatacgctggcctgcccaacctttcggtataaagacttcgcgctgataccagacgttgcccgcataattacgaatatctgcatcggcgaactgatcgttaaaactgcctggcacagcaattgcccggctttcttgtaacgcgctttcccaccaacgctgatcaattccacagttttcgcgatccagactgaatgcccacaggccgtcgagttttttgatttcacgggttggggtttctacaggacgtaacattctagtcgaggaattcatttatagcatagaaaaaaacaaaatgaaattctactatatttttacatacatatattctaaatatgaaagtggtgattgtgactagcgtagcatcgcttctagacatctatatactatatagtaataccaatactcaagactacgaaactgatacaatctcttatcatgtgggtaatgttctcgatgtcgatagccatatgcccggtagttgcgatatacataaactgatcactaattccaaacccacccgctttttatagtaagtttttcacccataaataataaatacaataattaatttctcgtaaaagtagaaaatatattctaatttattgcacggtaaggaagtagaatcataaagaacagtgacggatccccgatccccgacctgcaggcatgcaagctcgactccggaaccaattactgataatgtagaagatcatacagacaccgtcacatacactagtgatagcattaatacagtaagtgcatcatctggagaatccacaacagacgagactccggaaccaattactgataaagaagatcatacagttacagacactgtctcatacactacagtaagtacatcatctggaattgtcactactaaatcaaccaccgatgatgcggatctttatgatacgtacaatgataatgatacagtaccaccaactactgtaggcggtagtacaacctctattagcaattataaaaccaaggactttgtagaaatatttggtattaccgcattaattatattgtcggccgtggcaattttctgtattacatattatatatataataaacgttcacgtaaatacaaaacagagaacaaagtctagatttttgacttacataaatgtctgggatagtaaaatctatcatattgagcggaccatctggtttaggaaagacagccatagccaaaagactatgggaatatatttggatttgtggtgtcccataccactagatttcctcgtcctatggaacgagaaggtgttgattaccattacgttaacagagaggccatctggaagggaatagccgccggaaactttctagaacatactgagtttttaggaaatatttacggaacttctaaaacagctgtgaatacagcggctattaataatcgtatttgtgtgatggatctaaacatcgacggtgttagaagtcttaaaaatacgtacctaatgccttactcggtgtatataagacctacctctcttaaaatggttgagaccaagcttcgtcgtagaaacactgaagctaacgatgagattcatcgtcgtgtgatgttggcaaaaactgacatggatgaggcaggtgaagccggtctattcgacactattatcattgaagatgatgtgaatttagcatatagtaagttaattcagatactacaggaccgtattagaatgtattttaacactaattagagacttaagacttaaaacttgataattaataatataactcgtttttatatgtgtctatttcaacgtctaatgtattagttaaatattaaaacttaccacgtaaaacttaaaatttaaaatgatatttcattgacagatagatcacacattatgaactttcaaggacttgtgttaactgacaattgcaaaaatcaatgggtcgttggaccattaataggaaaaggtggattcggtagtatttatactactaatgacaataattatgtagtaaaaatagagcccaaagctaacggatcattatttaccgaacaggcattttatactagagtacttaaaccatccgttatcgaagaatggaaaaaatctcacaatataaagcacgtaggtcttatcacgtgcaaggcatttggtctatacaaatccattaatgtggaatatcgattcttggtaattaatagattaggtgcagatctagatgcggtgatcagagccaataataatagactaccaaaaaggtcggtgatgttgatcggaatcgaaatcttaaataccatacaatttatgcacgagcaaggatattctcacggagatattaaagcgagtaatatagtcttagatcaaatagataagaataaattatatctagtggattacggattggtttctaaattcatgtctaatggcgaacatgttccatttataagaaatccaaataaaatggataacggtactctagaatttacacctatagattcgcataaaggatacgttgtatctagacgtggagatctagaaacacttggatattgtatgattagatggttgggaggtatcttaccatggactaagatatctgaaacaaagaattgtgcattagtaagtgccacaaaacagaaatatgttaacaatactgcgactttgttaatgaccagtttgcaatatgcacctagagaattgctgcaatatattaccatggtaaactctttgacatattttgaggaacccaattacgacaagtttcggcacatattaatgcagggtgtatattattaagtgtggtgtttggtcgataaaaattaaaaaataacttaatttattattgatctcgtgtgtacaaccgaaatcatggcgatgttttacgcacacgctctcggtgggtacgacgagaatcttcatgcctttcctggaatatcatcgactgttgccaatgatgtcaggaaatattctgttgtgtcagtttataataacaagtatgacattgtaaaagacaaatatatgtggtgttacagtcaggtgaacaagagatatattggagcactgctgcctatgtttgagtgcaatgaatatctacaaattggaaatccgatccatgatcaagaaggaaatcaaatctctatcatcacatatcgccacaaaaactactatgctctaagcggaatcgggtacgagagtctagacttgtgtttggaaggagtagggattcatcatcacgtacttgaaacaggaaacgctgtatatggaaaagttcaacatgattattctactatcaaagagaaggccaaagaaatgagtgcacttagtccaggacctatcatcgattaccacgtctggataggagattgtatctgtcaagttactgctgtggacgtacatggaaaggaaattatgaaaatgagattcaaaaagggtgcggtgcttccgatcccaaatctggtaaaagttaaacttggggagaatgatacagaaaatctttcttctactatatcggcggcaccatcgaggtaaccacctctctggaagacagcgtgaatcatgtactcatgaaacgtttggaaactatacgccatatgtggtctgttgtatatgatcattttgatattgtgaatggtaaagaatgctgttatgtgcatacgcattcatctaatcaaaatcctataccgagtactgtaaaaacaaatttgtacatgaagactatgggatcatgcattcaaatggattccatggaagctctagagtatcttagcgaactgaaggaatcaggtggatggagtcccagaccagaaatgcaggaatttgaatatccagatggagtggaagacactgaatcaattgagagattggcagaggagttcttcaatagatcagaacttcaggctggtgaatcagtcaaatttggtaattctattaattgttaaacatacatctgtttcagctaagcaactaagaacacgtatacggcagcagcttccttctatactctcatcttttaccaacacaaagggtggatatttgttcattggagttgataataatacacacaaagtatttggattcacggtgggttacgactacctcagactgatagagaatgatatagaaaagcatatcaaaagacttcgtgttgtgcatttctgtgagaagaaagaggacatcaagtacgcgtgtcgattcatcaaggtatataaacctggggatgagactacctcgacatacgtgtgcgctatcaaagtggaaagatgctgttgtgctgtgtttgcagattggccagaatcatggtatatggatactaatggtatcaagaagtattctccagatgaatgggtgtcacatataaaattttaattaatgtaactatagagaacaaataataaggttgtaatatcatatagacaataactaacaattaattagtaactgttatctcttttttaactaaccaactaactatatacctattaatacatcgtaattatagttcttaacatctattaatcattaattcgcttctttaattttttataaactaacattgttaattgaaaagggataacatgttacagaatataaattatatatggatttttttaaaaaggaaatacttgactggagtatatatttatctcttcattatatagcacgcgtgttttccaatttttccacatcccatataatacaggattataatctcgttcgaacatacgagaaagtggataaaacaatagttgattttttatctaggttgccaaatttattccatattttagaatatggggaaaatattctacatatttattctatggatgatgctaatacgaatattataattttttttctagatagagtattaaatattaataagaacgggtcatttatacacaatctcgggttatcatcatccattaatataaaagaatatgtatatcaattagttaataatgatcatccagataataggataagactaatgcttgaaaatggacgtagaacaagacattttttgtcctatatatcagatacagttaatatctatatatgtattttaataaatcatggattttatatagatgccgaagacagttacggttgtacattattacatagatgtatatatcactataagaaatcagaatcagaatcatacaatgaattaattaagatattgttaaataatggatcagatgtagataaaaaagatacgtacggaaacacaccttttatcctattatgtaaacacgatatcaacaacgtggaattgtttgagatatgtttagagaatgctaatatagactctgtagactttaatagatatacacctcttcattatgtctcatgtcgtaataaatatgattttgtaaagttattaatttctaaaggagcaaatgttaatgcgcgtaataaattcggaactactccattttattgtggaattatacacggtatctcgcttataaaactatatttggaatcagacacagagttagaaatagataatgaacatatagttcgtcatttaataatttttgatgctgttgaatctttagattatctattatccagaggagttattgatattaactatcgtactatatacaacgaaacatctatttacgacgctgtcagttataatgcgtataatacgttggtctatctattaaacaaaaatggtgattttgagacgattactactagtggatgtacatgtatttcggaagcagtcgcaaacaacaacaaaataataatggaagtactattgtctaaacgaccatctttgaaaattatgatacagtctatgatagcaattactaaacataaacagcataatgcagatttattgaaaatgtgtataaaatatactgcgtgtatgaccgattatgatactcttatagatgtacagtcgctacagcaatataaatggtatattttaagatgtttcgatgaaatagatatcatgaagagatgttatataaaaaataaaactgtattccaattagttttttgtatcaaagacattaatactttaatgagatacggtaaacatccttctttcgtgaaatgcactagtctcgacgtatacggaagtcgtgtacgtaatatcatagcatctattagatatcgtcagagattaattagtctattatccaagaagctggatcctggagataaatggtcgtgttttcctaacgaaataaaatataaaatattggaaaactttaacgataacgaactatccacatatctaaaaatcttataaacattattaaaatataaaatctaagtaggataaaatcacactacatcattgtttccttttagtgctcgacagtgtatactatttttaacgctcataaataaaaatgaaaacgatttccgttgttacgttgttatgcgtactacctgctgttgtttattcaacatgtactgtacccactatgaataacgctaaattaacgtctaccgaaacatcgtttaatgataaccagaaagttacgtttacatgtgatcagggatatcattctttggatccaaatgctgtctgtgaaacagataaatggaaatacgaaaatccatgcaaaaaaatgtgcacagtttctgattatgtctctgaactatataataaaccgctatacgaagtgaattccaccatgacactaagttgcaacggcgaaacaaaatattttcgttgcgaagaaaaaaatggaaatacttcttggaatgatactgttacgtgtcctaatgcggaatgtcaacctcttcaattagaacacggatcgtgtcaaccagttaaagaaaaatactcatttggggaatatatgactatcaactgtgatgttggatatgaggttattggtgcttcgtacataagttgtacagctaattcttggaatgttattccatcatgtcaacaaaaatgtgatatgccgtctctatctaacggattaatttccggatctacattttctatcggtggcgttatacatcttagttgtaaaagtggttttacactaacggggtctccatcatccacatgtatcgacggtaaatggaatcccatactcccaatatgtgtacgaactaacgaaaaatttgatccagtggatgatggtcccgacgatgagacagatttgagcaaactctcgaaagacgttgtacaatatgaacaagaaatagaatcgttagaagcaacttatcatataatcatagtggcgttgacaattatgggcgtcatatttttaatctccgttatagtattagtttgttcctgtgacaaaaataatgaccaatataagttccataaattgctaccgtaaatataaatccgttaaaataattaataatttaataacaaacaagtatcaaaagattaaagacttatagctagaatcaattgagatgtcttcttcagtggatgttgatatctacgatgccgttagagcatttttactcaggcactattataacaagagatttattgtgtatggaagaagtaacgccatattacataatatatacaggctatttacaagatgcgccgttataccgttcgatgatatagtacgtactatgccaaatgaatcacgtgttaaacaatgggtgatggatacacttaatggtataatgatgaatgaacgcgatgtttctgtaagcgttggcaccggaatactattcatggaaatgtttttcgattacaataaaaatagtatcaacaatcaactaatgtatgatataattaatagcgtatctataattctagctaatgagagatatagaagcgcttttaacgacgatggtatatacatccgtagaaatatgattaacaagttgtacggatacgcatctctaactactattggcacgatcgctggaggtgtttgttattatctgttgatgcatctagttagtttgtataaataattatttcaatatactagttaaaattttaagattttaaatgtataaaaaactaataacgtttttatttgtaataggtgcattagcatcctattcgaataatgagtacactccgtttaataaactgagtgtaaaactctatatagatggagtagataatatagaaaattcatatactgatgataataatgaattggtgttaaattttaaagagtacacaatttctattattacagagtcatgcgacgtcggatttgattccatagatatagatgttataaacgactataaaattattgatatgtataccattgactcgtctactattcaacgcagaggtcacacgtgtagaatatctaccaaattatcatgccattatgataagtacccttatattcacaaatatgatggtgatgagcgacaatattctattactgcagagggaaaatgctataaaggaataaaatatgaaataagtatgatcaacgatgatactctattgagaaaacatactcttaaaattggatctacttatatatttgatcgtcatggacatagtaatacatattattcaaaatatgatttttaaaaatttaaaatatattatcacttcagtgacagtagtcaaataacaaacaacaccatgagatatattataattctcgcagttttgttcattaatagtatacatgctaaaataactagttataagtttgaatccgtcaattttgattccaaaattgaatggactggggatggtctatacaatatatcccttaaaaattatggcatcaagacgtggcaaacaatgtatacaaatgtaccagaaggaacatacgacatatccgcatttccaaagaatgatttcgtatctttctgggttaaatttgaacaaggcgattataaagtggaagagtattgtacgggactatgcgtcgaagtaaaaattggaccaccgactgtaacattgactgaatacgacgaccatatcaatttgtacatcgagcatccgtatgctactagaggtagcaaaaagattcctatttacaaacgcggtgacatgtgtgatatctacttgttgtatacggctaacttcacattcggagattctaaagaaccagtaccatatgatatcgatgactacgattgcacgtctacaggttgcagcatagactttgtcacaacagaaaaagtgtgcgtgacagcacagggagccacagaagggtttctcgaaaaaattactccatggagttcgaaagtatgtctgacacctaaaaagagtgtatatacatgcgcaattagatccaaagaagatgttcccaatttcaaggacaaaatggccagagttatcaagagaaaatttaatacacagtctcaatcttatttaactaaatttctcggtagcacatcaaatgatgttaccacttttcttagcatgcttaacttgactaaatattcataactaatttttattaatgatacaaaaacgaaataaaactgcatattatacactggttaacgcccttataggctctaaccattttcaagatgaggtccctgattatagtccttctgttcccctctatcatctactccatgtctattagacgatgtgagaagactgaagaggaaacatggggattgaaaatagggttgtgtataattgccaaagatttctatcccgaaagaactgattgcagtgttcatctcccaactgcaagtgaaggattgataactgaaggcaatggattcagggatatacgaaacaccgataaattataaaaaaagcaatgtgtccgctgtttccgttaataatactattttcgtaactggcggattattcataaataactctaatagcacgatcgtggttaacaatatggaaaaacttgacatttataaagacaaacaatggtcgattatagaaatgcctatggctagggtatatcacggcattgactcgacatttggaatgttatattttgccggaggtctatccgttaccgaacaatatggtaatttagagaaaaacaacgagatatcttgttacaatcctagaacgaataagtggtttgatatttcatatactatttataagatatccatatcatcattgtgtaaactaaataacgtcttctatgtatttagtaaggacattggatatgtggaaaagtatgatggtgcatggaagttagtacatgatcgtctccccgctataaaggcattatcaacttctccttattgattgaaaatgaaaatataaatagtttttatgtatagcagtattaccctatagttttattgcttactactaacatggatacagatgttacaaatgtagaagatatcataaatgaaatagatagagagaaagaagaaatactaaaaaatgtagaaattgaaaataataaaaacattaacaagaatcatcccaatgaatatattagagaagcactcgttattaataccagtagtaatagtgattccattgataaagaagttatagaatgtatcagtcacgatgtaggaatatagatcatatctactaatttttataatcgatacaaaacataaaaaacaactcgttattacatagcaggcatggaatccttcaagtattgttttgataacgatggcaagaaatggattatcggaaatactttatattctggtaattcaatactctataaggtcagaaaaaatttcactagttcgttctacaattacgtaatgaagatagatcacaaatcacacaagccattgttgtctgaaatacgattctatatatctgtattggatcctttgactatcgacaactggacacgggaacgtggtataaagtatttggctattccagatctgtatggaattggagaaaccgatgattatatgttcttcgttataaagaattcgggaagagtattcgccccaaaggatactgaatcagtcttcgaagcatgcgtcactatgataaacacgttagagtttatacactctcgaggatttacccatggaaaaatagaaccgaggaatatactgattagaaataaacgtctttcactaattgactattctagaactaacaaactatacaagagtggaaactcacatatagattacaacgaggacatgataacttcaggaaatatcaattatatgtgtgtagacaatcatcttggagcaacagtttcaagacgaggagatttagaaatgttgggatattgcatgatagaatggttcggtggcaaacttccatggaaaaacgaaagtagtataaaagtaataaaacaaaaaaaagaatataaaaaatttatagctactttctttgaggactgttttcctgaaggaaatgaacctctggaattagttagatatatagaattagtatacacgttagattattctcaaactcctaattatgacagactacgtaaactgtttatacaagattgaaattatattcttttttttatagagtgtggtagtgttacggatatctaatattaatattagactatctctatcgcgctacacgaccaatatcgattactatggatatcttctatgaaaggagagaatgtatttatttctccagcgtcaatctcgtcagtattgacaatactgtattatggagctaatggatccactgctgaacagctatcaaaatatgtagaaacggaggagaacacggataaggttagcgctcagaatatctcattcaaatccatgaataaagtatatgggcgatattctgccgtgtttaaagattcctttttgagaaaaattggcgataagtttcaaactgttgacttcactgattgtcgcactatagatgcaatcaacaagtgtgtagatatctttactgaggggaaaatcaatccactattggatgaaccattgtctcctagcaattagtgccgtatactttaaagcaaaatggttgacgccattcgaaaaggaatttaccagtgattatcccttttacgtatctccgacggaaatggtagacgtaagtatgatgtctatgtacggcaaggcatttaatcacgcatctgtaaaagaatcattcggcaacttttcaatcatagaactgccatatgttggagatactagtatgatggtcattcttccagacaagattgatggattagaatccatagaacaaaatctaacagatacaaattttaagaaatggtgtgactttatggatgctatgtttatagatgttcacattcccaagtttaaggtaacaggctcgtataatctggtggatactctagtaaagtcaggactgacagaggtgttcggttcaactggagattatagcaatatgtgtaatttagatgtgagtgtcgacgctatgatccacaaaacgtatatagatgtcaatgaagagtatacagaagcagctgcagcaacttctgtactagtggcagactgtgcatcaacaattacaaatgagttctgtgcagatcatccgttcatctatgtgattaggcatgttgatggaaaaattcttttcgttggtagatattgctctccgacaactaattgttaaccattttttttaaaaaaaatagaaaaaacatgtggtattagtgcaggtcgttgttcttccaattgcaattggtaagatgacggccaactttagtacccacgtcttttcaccacagcactgtggatgtgacagactgaccagtattgatgacgtcaaacaatgtttgactgaatatatttattggtcgtcctatgcataccgcaacaggcaatgcgctggacaattgtattccacactcctctcttttagagatgatgcggaattagtgttcatcgacattcgcgagctggtaaaaaatatgccgtgggatgatgtcaaagattgtacagaaatcatccgttgttatataccggatgagcaaaaaaccatcagagagatttcggccatcatcggactttgtgcatatgctgctacttactggggaggtgaagaccatcccactagtaacagtctgaacgcattgtttgtgatgcttgagatgctaaattacgtggattataacatcatattccggcgtatgaattgatgagttgtacatcttgacattttctttcttctcttctccctttcttctcttctcccttcctccctcttctccctttcccagaaacaaacttttttacccactataaaataaaatgagtatactacctattatatttcttcctatatttttttattcttcattcgttcagacttttaacgcgtctgaatgtatcgacaaagggcaatattttgcatcattcatggagttagaaaacgagccagtaatcttaccatgtcctcaaataaatacgctatcatccggatataatatattagatattttatgggaaaaacgaggagcggataatgatagaattataccgatagataatggtagcaatatgctaattctgaacccgacacaatcagactctggtatttatatatgcattaccacgaacgaaacctactgtgacatgatgtcgttaaatttgacaatcgtgtctgtctcagaatcaaatatagatcttatctcgtatccacaaatagtaaatgagagatctactggcgaaatggtatgtcccaatattaatgcatttattgctagtaacgtaaacgcagatattatatggagcggacatcgacgccttagaaataagagacttaaacaacggacacctggaattattaccatagaagatgttagaaaaaatgatgctggttattatacatgtgttttagaatatatatacggtggcaaaacatataacgtaaccagaattgtaaaattagaggtacgggatagaataataccttctactatgcaattaccagatggcattgtaacttcaataggtagtaatttgactattgcatgcagagtatcgttgagacctcccacaacggacaccgacgtcttttggataagtaatggtatgtattacgaagaagatgatggggacggaaacggtagaataagtgtagcaaataaaatctatatgaccgataagagacgtgttattacatcccggttaaacattaatcctgtcaaggaagaagatgctacaacgtttacgtgtatggcgtttactattcctagcatcagcaaaacagttactgttagtataacgtgaatgtatgttgttacatttccatgtcaattgagtttataagaatttttatacattatcttccaacaaacaattgacgaacgtattgctatgattaactcccacgatactatgcatattattaatcattaacttgcagactatacctagtgctattttgacatactcgtgttcttgtgtaattgcggtatctatattattaaagtacgtaaatctagctatagttttattatttaattttagataatataccgtctccttatttttaaaaattgccacatcctttattaaatcatgaatgggaatttctatgtcatcgttagtatattgtgaacaacaagagcagatatctataggaaagggtggaatgcgatacattgatctatgtagttttaaaacacacgcgaactttgaagaatttatataaatcattccatcgatacatccttctatgttgacatgtatatatccaggaattcttttattaatgtcaggaaatgtataaactaaaacattgcccgaaagcggtgcctctatctgcgttatatccgttcttaacttacaaaatgtaaccaatacctttgcatgacttgttttgttcggcaacgttagtttaaacttgacgaatggattaattacaatagcatgatccgcgcatctattaagtttttttactttaacgcccttgtatgtttttacagagactttatctaaatttctagtgcttgtatgtgttataaatataacgggatatagaaccgaatcacctaccttagatacccaattacattttatcagatccagataataaacaaattttgtcgccctaactaattctatattgttatatattttacaattggttatgatatcatgtaataacttggagtctaacgcgcatcgtcgtacgtttatacaattgtgatttagtgtagtatatctacacatgtatttttccgcactatagtattctggactagtgataaaactatcgttatatctgtcttcaatgaactcatcgagatattgctctctgtcatattcatacacctgcataaactttctagacatcttacaatccgtgttattttaggatcatatttacatatttacgggtatatcaaagatgttagattagttaatgggaatcgtctataataatgaatattaaacaattatatgaggacttttaccacaaagcatcataaaaatgagtcgtcgtctgatttatgttttaaatatcaaccgcaaatcaactcataaaatacaagagaatgaaatatatacatattttagtcattgcaatatagaccatacttctacagaacttgattttgtagttaaaaactatgatctaaacagacgacaacctgtaactgggtatactgcactacactgctatttgtataataattactttacaaacgatgtactgaagatattattaaatcatgacgtaaatgtaacgatgaaaaccagtagcggacgtatgcctgtttatatattgcttactagatgttgtaatatttcacatgatgtagtgatagatatgatagacaaagataaaaaccacttattacatagagactattccaacctattactagagtatataaaatctcgttacatgttattgaaggaagaggatatcgatgagaacatagtatccactttattagataagggaatcgatcctaactttaaacaagacggatatacagcgttacattattattatttgtgtctcgcacacgtttataaactaggtgagtgtagaaaaccgataacgataaaaaaggccaagcgaattatttctttgtttatacaacatggagctaatctaaacgcgttagataattgtggtaatacaccattccatttgtatcttagtattgaaatgtgtaataatattcatatgactaaaatgctgttgacttttaatccgaatttcaaaatatgtaataatcatggattaacgcctatactatgttatataacttccgactacatacaacacgatattcttgttatgttaatacatcactatgaaacaaatgttggagaaatgccgatagatgagcgtcgtatgatcgtattcgagtttatcaaaacatattctacacgtccggcagattcgataacttatttgatgaataggtttaaaaatataaatatttatacccgctatgaaggaaagacattattacacgtagcatgtgaatataataatacacaagtaatagattatcttatacgtatcaacggagatataaatgcgttaaccgacaataacaaacacgctacacaactcattatagataacaaagaaaattccccatataccattaattgtttactgtatatacttagatatattgtagataagaatgtgataagatcgttggtggatcaacttccatctctacctatcttcgatataaaatcatttgagaaattcatatcctactgtatacttttagatgacacattttacgataggcacgttaagaatcgcgattctaaaacgtatcgatacgcattttcaaaatacatgtcgtttgataaatacgatggtataataactaaatgtcacgacgaaacaatgttactcaaactgtccactgttctagacactacactatatgcagttttaagatgtcataattcgagaaagttaagaagatacctcaacgagttaaaaaaatataataacgataagtcctttaaaatatattctaatattatgaatgagagataccttaatgtatattataaagatatgtacgtgtcaaaggtatatgataaactatttcctgttttcacagataaaaattgtctactaacattactaccttcagaaattatatacgaaatattatacatgctgacaattaacgatctttataatatatcgtatccacctaccaaagtatagttgtatttttctcatgcgatgtgtgtaaaaaaactgatattatataaatattttagtgccgtataataaagatgacgatgaaaatgatggtacatatatatttcgtatcattattgttattgctattccacagttacgccatagacatcgaaaatgaaatcacagaattcttcaataaaatgagagatactctaccagctaaagactctaaatggttgaatccagcatgtatgttcggaggcacaatgaatgatatagccgctctaggagagccattcagcgcaaagtgtcctcctattgaagacagtcttttatcgcacagatataaagactatgtggttaaatgggagaggctagaaaagaatagacggcgacaggtttctaataaacgtgttaaacatggtgatttatggatagccaactatacatctaaattcagtaaccgtaggtatttgtgcaccgtaactacaaagaatggtgactgtgttcagggtatagttagatctcatattaaaaaacctccttcatgcattccaaaaacatatgaactaggtactcatgataagtatggcatagacttatactgtggaattctttacgcaaaacattataataatataacttggtataaagataataaggaaattaatatcgacgacattaagtattcacaaacgggaaaggaattaattattcataatccagagttagaagatagcggaagatacgactgttacgttcattacgacgacgttagaatcaagaatgatatcgtagtatcaagatgtaaaatacttacggttataccgtcacaagaccacaggtttaaactaatactagatccgaaaatcaacgtaacgataggagaacctgccaatataacatgcactgctgtgtcaacgtcattattgatcgacgatgtactgattgaatgggaaaatccatccggatggcttataggattcgattttgatgtatactctgttttaactagtagaggcggtatcaccgaggcgaccttgtactttgaaaatgttactgaagaatatataggtaatacatataaatgtcgtggacacaactattattttgaaaaaacccttacaactacagtagtattggagtaaatatacaatgcatttttatatacattactgaattattattactgaattattattactgaattattattaattatatcgtatttgtgctatagaatggatgaagatacgcgactatctaggtatttgtatctcaccgatagagaacatataaatgtagactctattaaacagttgtgtaaaatatcagatcctaatgcatgttatagatgtggatgtacggctttacatgagtacttttataattatagatcagtcaacggaaaatacaagtatagatacaacggttactatcaatattattcatctagcgattatgaaaattataatgaatattattatgatagaactggtatgaacagtgagagtgataatatatcaatcaaaacagaatatgaattctatgatgaaacacaagatcaaagtacacaactagtaggttacgacattaaactcaaaaccaatgaggatgattttatggctatgatagatcagtgggtgtccatgattatatagatgaatcaattaataaagtagtatatggaagagagtctcacgtaagatggcgggatatatggcaagaacataatgatggcgtatacagtataggaaaggagtgcatagataatatatacgaagacaaccataccgtagacgaattctacaagatagacagcgtatcagatgtagatgacgcggaacacatatctccgataactaaaaaaccatagaatcagttgatgataatacctacatttctaatcttccgtataccatcaaatacaaaatattcgagcaacaataagtattttttatacctttaaaactgataaataaattttttctagtgatattttggcaagatgagaatcctatttctcatcgctttcatgtatgggtgtgttcactcatatgttaacgcggttgaaaccaaatgtccaaatctagacattgtaacatcttctggagaatttcattgttcaggatgtgtggaacatatgcctgagtttagctatatgtattggttggcaaaggatatgaaatcggacgaggataccaagtttatagaacatctgggtgatggcatcaaagaagatgaaaccgttcgtaccacagatagtggaatcgtcactctacgtaaagtccttcatgtgactgatactaataaatttgataattataggttcacttgtgtcctcgctacgctagatggcatttataaaaagaatgtttgctgaagtagttgtgtgctactatttttatttatgatataatctaatggaattaatttgaattgatatttatccaatactaaagattatattagaatcaaattaatcttttatacgagaaaaaataacgacatacgtcgtcaacaaattaaactttttatttattagttaactagcttatagaacttgctcattgttatgtttctaaaacgggtacggcatataggacaattatccgacgcaccggtttctcttcgtgttctatgccatatattgatgcatgttatgcaaaatatatgagtacacgaatccaataaaccaaagtatctatcgttttgagtaaacaacttcatagcaaattccacattctttttctttacttactctatacacgtcctcgtatttatttagtattttgatgatatccaactcagaaatggttgttgtattattgggtgtatttggagtataggtattattagctatgtaccaatttaccaaccctcttaatattgattgataatcacatcggttatccaattaataactaaattgtagtgtatatatagaccatatatgtttctatttttttgacagttacgtatagtttcagtaagttttgattgttgtattcctgtatctctagataagttagtcatatagtcccttccggcgatacgttttttccaagcccgaaattgattagccaaatgtgtatttatttttgtgatattgatataatatttcggataatgcatactgttagtcttatatcatttggttcatctatgtattgtaatattgttacatgatctatagatgatgtattgattttggcaggatcgaattccatatccgcgactaaacagtgaaaaaaatgtaaatactttttaaattttaaattagtaaaacttttttttattttttatgattccaaaaatactgaatacaaagtcctaaattataaatatggagatcatactaccacaacttattattatgtatacaaggccggtgtaatagatagatatatataattctattacaccggcagacaattaccgaccggtatttgtcgttaccaacataccgtataatatgtaatatacaattccataacccattgacagttgttatacatcaaaattgcaattcttttgattacgatgttataagaatgtagttaattgatgtatgatgttaatgtgtcctctttcctcttataacatcgtaatcaaaaacttttttataatatatacctaataatgtgtcttaatagttctcgtgattcgtcaaacaatcattcttataaaatataataaagcaacgtaaaaacacataaaaataagcgtaactaataagacaatggatatttacgacgataaaggtctacagactattaaactgtttaataatgaatttgattgtataaggaatgacatcagagaattatttaaacatgtaactgattccgatagtatacaacttccgatggaagacaattctgatattatagaaaatatcagaaaaatactatatagacgattaaaaaatgtagaatgtgttgacatcgataacacaataacttttatgaaatacgatccaaatgatgataataagcgtacgtgttctaattgggtacccttaactaataactatatggaatattgtctagtaatatatttggaaacaccgatatgtggaggcaaaataaaattataccaccctacaggaaatataaagtcggataaggatattatgtttgcaaagactctagactttaaatcaacgaaagtgttaactggacgtaaaacaattgccgttctagacatatccgtttcatataatagatcaatgactactattcactacaacgacgacgttgatatagatatacatactgataaaaatggaaaagagttatgttattgttatataacaatagatgatcattacttggttgatgtggaaactataggagttatagtcaatagatctggaaaatgtctgttagtaaataaccatctaggtataggtatcgttaaagataaacgtataagcgatagttttggagatgtatgtatggatacaatatttgacttttctgaagcacgagagttattttcattaactaatgatgataacaggaatatagcatgggacactgataaactagacgatgatacagatatatggactcccgtcacagaagatgattacaaatttctttctagactagtattgtatgcaaaatctcaatcggatactgtatttgactattatgttcttactggtgatacggaaccacccactgtattcattttcaaggtaactagattttactttaatatgccgaaataaaaaatttttgtataatatctagaggtagaggtattgtttagataaatacaaataacatagatacatcgcatacttagcatttttataaatatacataagacatacactttatacatttttgtaaaaatactcataaaaaaatttataaaaattatggcacaaccatatcttgtataggtagtttagttcgtcgagtgaacctataaacagataatagacaacacataataatgcctactaatacaagcataataccgggagatgggatatatgacgttgtagtgtttgggttttctgaacgttgatagtctactaatactacatgctgacatctaatgcctgtataaccatgagagcatctacaatacataccgtcaatatctctagcgtggatacagtcaccgtgtaaacaatatccatctccctctggaccgcataatctgatagctggaatatctgttgtagcgtttgtaatttctggcaatgtcgtttcgatagcgttaccactatcggcgaatgatctgattatcatagcagcgaacaacaacatcagataatttatcaacatttttgatggattctgtgtttatgctgtttctcagtgtgtgtttatgacaagattgggaattttatattattaattcagtaatataaactaataatatattgttaattgtgtaaataatataaaaataacaatacaatattgaatgtgttgctgttaaaaatgtatgtgttaatataatagaataaaataaatgagtatgatcattttagataacgattgattttatcattaccgcttcattcttatattctttgcttacggaacctatatttagaaacatctactaacaattttttatgcttgcattattaatggtatgtaatatgattgattgtgtacgcaataccaatttgttaagtatgaatacggggtacaaacataaattgaaatttaacattatttatttatgatatatatcgttatcgttaggtctataccatggatatctttaaagaactaatcttaaaacaccctgatgaaaatgttttgatttctccagtttccattttatctactttatctattctaaatcatggagcagctggttctacagctgaacaactatcaaaatatatagagaatatgaatgagaatacacccgatgacaataatgatgacatggaggtagatattccgtattgtgcgacactagctaccgcaaataaaatatacggtagcgatagtatcgagttccacgcctccttcctacaaaaaataaaagacgattttcaaactgtaaactttaataatgctaaccaaacaaaggaactaatcaacgaatgggttaagacaatgacaaatggtaaaattaattccttattgactagtccgctatccattaatactcgtatgacagttgttagcgccgtccattttaaagcaatgtggaaatatccattttctaaacatcttacatatacagacaagttttatatttctaagaatatagttaccagcgttgatatgatggtgggtaccgagaataacttgcaatatgtacatattaatgaattattcggaggattctctattatcgatattccatacgagggaaactctagtatggtaattatactaccggacgacatagaaggtatatataacatagaaaaaaatataacagatgaaaaatttaaaaaatggtgtggtatgttatctactaaaagtatagacttgtatatgccaaagtttaaagtggaaatgacagaaccgtataatctggtaccgattttagaaaatttaggacttactaatatattcggatattatgcagattttagcaagatgtgtaatgaaactatcactgtagaaaaatttctacatacgacgtttatagatgttaatgaggagtatacagaagcatcggccgttacaggagtatttacgattaacttttcgatggtatatcgtacgaaggtctacataaaccatccattcatgtacatgattaaagacaccacaggacgtatactttttatagggaaatactgctatccgcaataaatataaacaaatagacttttataaagagtcttcaacgataagtatatcgacatactacttatgctgcgaaagattctgaacgagaacgactatctcaccctcttggatcatatccgcactgctaaatactaaatctccactacactttttatcatcttatgaggaatgattgccttcgtgaaataggaataattagcaccagaatagctatggattattgtggtagagagtgcactattctatgtcgtctactggatgaagatgtgacgtacaaaaaaataaaactagaaattgaaacgtgtcacaacttatcaaaacatatagatagacgaggaaacaatgcgctacattgttacgtctccaataaatgcgatacagacattaagattgttctctcgcggagtcgagagactttgtagaaacaacgaaggattaactccgctaggagtatacagtaagcatagatacgtaaaatctcagattgtgcatctactgatatccagctattcaaattcctctaacgaactcaagtcgaatataaatgatttcgatctgtattcggataatatcgacttacgtctgctaaaatacctaattgtggataaacggatacgtccgtccaagaatacgaattatgcaatcaatggtctcggattggtggatatatacgtaacgacgcctaatccgagaccagaagtattgctatggcttcttaaatcagaatgttacagcaccggttacgtatttcgtacctgtatgtacgacagtgatatgtgtaagaactctcttcattactatatatcgtctcatagagaatctcaatctctatccaaggatgtaattaaatgtttgatcgataacaatgtttccatccatggcagagacgaaggaggatctttacccatccaatactactggtctttctcaaccatagatatagagattgttaaattattattaataaaggatgtggacacgtgtagagtatacgacgtcagccctatattagaggcgtattatctaaacaagcgatttagagtaaccccatataatgtagacatggaaatcgttaatcttcttattgagagacgtcatactcttgtcgacgtaatgcgtagtattacttcgtacgattccagagaatataaccactacatcatcgataacattctaaagagatttagacaacaggatgaatccatcgtacaagccatactgataaactacttacattacggcgatatggtcgttcgatgcatgttagataacggacaacaactatcctctacacgactactttgttaataataatctcgtcgatgtaaacgtcgtaaggtttatcgtggaaaatatggacacgcggctgtaaatcacgtatcgaacaatggccgtctatgtatgtacggtctgatattatcgagatttaataattgcgggtatcactgttatgaaaccatactgatagatgtatttgatatactaagcaagtacatggatgatatagatatgatcgataactctactatattacgcggtcgatgtcaataatatacaatttgcaaagcggttattggaatatggagcgagtatcacgctcgataatcaatacggccatccagaaaagcagttacagaagagaaaacaaaacgaaatcgttgttctacaagatgtctctccctacgacgattactacgtaaaaaagatactagcctactgcctattaagggacgagtcattcgcggaactacatagtaaattctgtttaaacgaggactataaaagtgtatttatgaaaaatatatcattcgataagatagattccatcatcgtgacataagtcgcctcaaagagattcgaatctccgacaccgacctgtatacggtatcacagctatcttaaagccatacattcagacagtcacatttcatttcccatgtacgacgatctcatagaacagtgccatctatcgatggagcgtaaaagtaaactcgtcgacaaagcactcaataaattagagtctaccatcggtcaatctagactatcgtatttgcctccggaaattatgcgcaatatcatctaaacagtatgttgtacggaaagaaccattacaaatattatccatgatagaaagaaaatatctatatgattggagaagtaggaaacaggaacaagacaacgattactacattattaaatcatgaagtccgtattatactcgtatatattgtttctctcatgtataataataaacggaagagatatagcaccgcatgcaccatccgatggaaagtgtaaagacaacgaatacaaacgccataatttgtgtccgggaacatacgcttccagattatgcgatagcaagactaacacacgatgtacgccgtgtggttcgggtaccttcacatctcgcaataatcatttacccgcttgtctaagttgtaacggaagacgcgatcgtgtaacacgactcacaatagaatctgtgaatgctctcccggatattattgtcttctcaaaggatcatccggatgcaaggcatgtgtttcccaaacaaaatgtggaataggatacggagtatccggagacgtcatctgttctccgtgtggtctcggaacatattctcacaccgtctcttccgcagataaatgcgaacccgtacccagaaatacgtttaactatatcgatgtggaaattaacctgtatccagttaacgacacgtcgtgtactcggacgaccactaccggtctcagcgaatccatctcaacgtcggaactaactattactatgaatcataaagactgtaatcccgtatttcgtgatggatacttctccgttcttaataaggtagcgacttcaggtttctttacaggagaaaggtgtgcactctgaatttcgagattaaatgcaataacaaagattcttcctccaaacagttaacgaaagcaaagaatgatactatcatgccgcattcggagacagtaactctagtgggcgacatctatatactatatagtaataccaatactcaagactacgaaactgatacaatctcttatcatgtgggtaatgttctcgatgtcgatagccatatgcccggtagttgcgatatacataaactgatcactaattccaaacccacccactttttatagtaagtttttcacccataaataataaatacaataattaatttctcgtaaaagtagaaaatatattctaatttattgcacggtaaggaagtagaatcataaagaacagtactcaatcaatagcaattatgaaacaatatatcgtcctggcatgcatgtgcctggcggcagctgctatgcctgccagtcttcagcaatcatcctcatcctcctcctcgtgtacggaagaagaaaacaaacatcatatgggaatcgatgttattatcaaagtcacaaagcaagaccaaacaccgaccaatgataagatttgccaatccgtaacggaaattacagagtccgagtcagatccagatcccgaggtggaatcagaagatgattccacatcagtcgaggatgtagatcctcctaccacttattactccatcatcggtggaggtctgagaatgaactttggattcaccaaatgtcctcagattaaatccatctcagaatccgctgatggaaacacagtgaatgctagattgtccagcgtgtccccaggacaaggtaaggactctcccgcgatcactcatgaagaagctcttgctatgatcaaagactgtgaagtgtctatcgacatcagatgtagcgaagaagagaaagacagcgacatcaagacccatccagtactcgggtctaacatctctcataagaaagtgagttacgaagatatcatcggttcaacgatcgtcgatacaaaatgcgtcaagaatctagagtttagcgttcgtatcggagacatgtgcaaggaatcatctgaacttgaggtcaaggatggattcaagtatgtcgacggatcggcatctgaaggtgcaaccgatgatacttcactcatcgattcaacaaaactcaaagcgtgtgtctgaatcgataactctattcatctgaaattggatgagtagggttaatcgaacgattcaggcacaccacgaattaaaaaagtgtaccggacactatattccggtttgcaaaacaaaaatgttcttaactacattcacaaaaagttacctctcgcgacttcttctttttctgtctcaatagtgtgatacgattatgacactattcctattcctattcctatttcctttcagagtatcacaaaaatattaaacctctttctgatggtctcataaaaaaagttttacaaaaatatttttattctctttctctctttgatggtctcataaaaaaagttttacaaaaatatttttattctctttctctctttgatggtctcataaaaaaagttttacaaaaatatttttattctctttctctctttgatggtctcataaaaaaagttttacaaaaatatttttattctctttctctctttgatggtctcataaaaaaagttttacaaaaatatttttattctctttctctctttgatggtctcataaaaaaagttttacaaaaatatttttattctctttctctctttgatggtctcataaaaaaagttttacaaaaatatttttattctctttctctctttgatggtctcataaaaaaagttttacaaaaatatttttattctctttctctctttgatggtctcataaaaaaagttttacaaaaatatttttattctctttctctctttgatggtctcataaaaaaagttttacaaaaatatttttattctctttctctctttgatggtctcataaaaaaagttttacaaaaatatttttattctctttctctctttgatggtctcataaaaaaagttttacaaaaatatttttattctctttctctctttgatggtctcataaaaaagttttacaaaaatatttttattctctttctctctttgatggtctcataaaaaagttttacaaaaatatttttattctctttctctctttgatggtctcataaaaaaagttttacaaaaatatttttattctctttctctctttgatggtctcataa

SEQ ID NO: 67 - DNA, 197886 bp, Artificial Sequence
  GLV-1h322 (SE-Tyrp1-SE-mTyr)
ttatgagaccatcaaagagagaaagagaataaaaatatttttgtaaaactttttttatgagaccatcaaagagagaaagagaataaaaatatttttgtaaaacttttttatgagaccatcaaagagagaaagagaataaaaatatttttgtaaaacttttttatgagaccatcaaagagagaaagagaataaaaatatttttgtaaaactttttttatgagaccatcaaagagagaaagagaataaaaatatttttgtaaaactttttttatgagaccatcaaagagagaaagagaataaaaatatttttgtaaaactttttttatgagaccatcaaagagagaaagagaataaaaatatttttgtaaaactttttttatgagaccatcaaagagagaaagagaataaaaatatttttgtaaaactttttttatgagaccatcaaagagagaaagagaataaaaatatttttgtaaaactttttttatgagaccatcaaagagagaaagagaataaaaatatttttgtaaaactttttttatgagaccatcaaagagagaaagagaataaaaatatttttgtaaaactttttttatgagaccatcaaagagagaaagagaataaaaatatttttgtaaaactttttttatgagaccatcaaagagagaaagagaataaaaatatttttgtaaaactttttttatgagaccatcaaagagagaaagagaataaaaatatttttgtaaaactttttttatgagaccatcaaagagagaaagagaataaaaatatttttgtaaaactttttttatgagaccatcagaaagaggtttaatatttttgtgatactctgaaaggaaataggaataggaataggaatagtgtcataatcgtatcacactattgagacagaaaaagaagaagtcgcgagaggtaactttttgtgaatgtagttaagaacatttttgttttgcaaaccggaatatagtgtccggtacacttttttaattcgtggtgtgcctgaatcgttcgattaaccctactcatccaatttcagatgaatagagttatcgattcagacacacgctttgagttttgttgaatcgatgagtgaagtatcatcggttgcaccttcagatgccgatccgtcgacatacttgaatccatccttgacctcaagttcagatgattccttgcacatgtctccgatacgaacgctaaactctagattcttgacgcattttgtatcgacgatcgttgaaccgatgatatcttcgtaactcactttcttatgagagatgttagacccgagtactggatgggtcttgatgtcgctgtctttctcttcttcgctacatctgatgtcgatagacacttcacagtctttgatcatagcaagagcttcttcatgagtgatcgcgggagagtccttaccttgtcctggggacacgctggacaatctagcattcactgtgtttccatcagcggattctgagatggatttaatctgaggacatttggtgaatccaaagttcattctcagacctccaccgatgatggagtaataagtggtaggaggatctacatcctcgactgatgtggaatcatcttctgattccacctcgggatctggatctgactcggactctgtaatttccgttacggattggcaaatcttatcattggtcggtgtttggtcttgctttgtgactttgataataacatcgattcccatatgatgtttgttttcttcttccgtacacgaggaggaggatgaggatgattgctgaagactggcaggcatagcagctgccgccaggcacatgcatgccaggacgatatattgtttcataattgctattgattgagtactgttctttatgattctacttccttaccgtgcaataaattagaatatattttctacttttacgagaaattaattattgtatttattatttatgggtgaaaaacttactataaaaagtgggtgggtttggaattagtgatcagtttatgtatatcgcaactaccgggcatatggctatcgacatcgagaacattacccacatgataagagattgtatcagtttcgtagtcttgagtattggtattactatatagtatatagatgtcgcccactagagttactgtctccgaatgcggcatgatagtatcattctttgctttcgttaactgtttggaggaagaatctttgttattgcatttaatctcgaaattcagagtgcacacctttctcctgtaaagaaacctgaagtcgctaccttattaagaacggagaagtatccatcacgaaatacgggattacagtctttatgattcatagtaatagttagttccgacgttgagatggattcgctgagaccggtagtggtcgtccgagtacacgacgtgtcgttaactggatacaggttaatttccacatcgatatagttaaacgtatttctgggtacgggttcgcatttatctgcggaagagacggtgtgagaatatgttccgagaccacacggagaacagatgacgtctccggatactccgtatcctattccacattttgtttgggaaacacatgccttgcatccggatgatcctttgagaagacaataatatccgggagagcattcacagattctattgtgagtcgtgttacacgatcgcgtcttccgttacaacttagacaagcgggtaaatgattattgcgagatgtgaaggtacccgaaccacacggcgtacatcgtgtgttagtcttgctatcgcataatctggaagcgtatgttcccggacacaaattatggcgtttgtattcgttgtctttacactttccatcggatggtgcatgcggtgctatatctcttccgtttattattatacatgagagaaacaatatatacgagtataatacggacttcatgatttaataatgtagtaatcgttgtcttgttcctgtttcctacttctccaatcatatagatattttctttctatcatggataatatttgtaatggttctttccgtacaacatactgtttagatgatattgcgcataatttccggaggcaaatacgatagtctagattgaccgatggtagactctaatttattgagtgctttgtcgacgagtttacttttacgctccatcgatagatggcactgttctatgagatcgtcgtacatgggaaatgaaatgtgactgtctgaatgtatggctttaagatagctgtgataccgtatacaggtcggtgtcggagattcgaatctctttgaggcgacttatgtcacgatgatggaatctatcttatcgaatgatatatttttcataaatacacttttatagtcctcgtttaaacagaatttactatgtagttccgcgaatgactcgtcccttaataggcagtaggctagtatcttttttacgtagtaatcgtcgtagggagagacatcttgtagaacaacgatttcgttttgttttctcttctgtaactgcttttctggatggccgtattgattatcgagcgtgatactcgctccatattccaataaccgctttgcaaattgtatattattgacatcgaccgcgtaatatagtagagttatcgatcatatctatatcatccatgtacttgcttagtatatcaaatacatctatcagtatggtttcataacagtgatacccgcaattattaaatctcgataatatcagaccgtacatacatagacggccattgttcgatacgtgatttacagccgcgtgtccatattttccacgataaaccttacgacgtttacatcgacgagattattattaacaaagtagtcgtgtagaggatagttgttgtccgttatctaacatgcatcgaacgaccatatcgccgtaatgtaagtagtttatcagtatggcttgtacgatggattcatcctgttgtctaaatctctttagaatgttatcgatgatgtagtggttatattctctggaatcgtacgaagtaatactacgcattacgtcgacaagagtatgacgtctctcaataagaagattaacgatttccatgtctacattatatggggttactctaaatcgcttgtttagataatacgcctctaatatagggctgacgtcgtatactctacacgtgtccacatcctttattaataataatttaacaatctctatatctatggttgagaaagaccagtagtattggatgggtaaagatcctccttcgtctctgccatggatggaaacattgttatcgatcaaacatttaattacatccttggatagagattgagattctctatgagacgatatatagtaatgaagagagttcttacacatatcactgtcgtacatacaggtacgaaatacgtaaccggtgctgtaacattctgatttaagaagccatagcaatacttctggtctcggattaggcgtcgttacgtatatatccaccaatccgagaccattgattgcataattcgtattcttggacggacgtatccgtttatccacaattaggtattttagcagacgtaagtcgatattatccgaatacagatcgaaatcatttatattcgacttgagttcgttagaggaatttgaatagctggatatcagtagatgcacaatctgagattttacgtatctatgcttactgtatactcctagcggagttaatccttcgttgtttctacaaagtctctcgactccgcgagagaacaatcttaatgtctgtatcgcatttattggagacgtaacaatgtagcgcattgtttcctcgtctatctatatgttttgataagttgtgacacgtttcaatttctagttttatttttttgtacgtcacatcttcatccagtagacgacatagaatagtgcactctctaccacaataatccatagctattctggtgctaattattcctatttcacgaaggcaatcattcctcataagatgataaaaagtgtagtggagatttagtatttagcagtgcggatatgatccaagagggtgagatagtcgttctcgttcagaatctttcgcagcataagtagtatgtcgatatacttatcgttgaagactctttataaaagtctatttgtttatatttattgcggatagcagtatttccctataaaaagtatacgtcctgtggtgtctttaatcatgtacatgaatggatggtttatgtagaccttcgtacgatataccatcgaaaagttaatcgtaaatactcctgtaacggccgatgcttctgtatactcctcattaacatctataaacgtcgtatgtagaaatttttctacagtgatagtttcattacacatcttgctaaaatctgcataatatccgaatatattagtaagtcctaaattttctaaaatcggtaccagattatacggttctgtcatttccactttaaactttggcatatacaagtctatacttttagtagataacataccacaccattttttaaatttttcatctgttatatttttttctatgttatatataccttctatgtcgtccggtagtataattaccatactagagtttccctcgtatggaatatcgataatagagaatcctccgaataattcattaatatgtacatattgcaagttattctcggtacccaccatcatatcaacgctggtaactatattcttagaaatataaaacttgtctgtatatgtaagatgtttagaaaatggatatttccacattgctttaaaatggacggcgctaacaactgtcatacgagtattaatggatagcggactagtcaataaggaattaattttaccatttgtcattgtcttaacccattcgttgattagttcctttgtttggttagcattattaaagtttacagtttgaaaatcgtcttttattttttgtaggaaggaggcgtggaactcgatactatcgctaccgtatattttatttgcggtagctagtgtcgcacaatacggaatatctacctccatgtcatcattattgtcatcgggtgtattctcattcatattctctatatattttgatagttgttcagctgtagaaccagctgctccatgatttagaatagataaagtagataaaatggaaactggagaaatcaaaacattttcatcagggtgttttaagattagttctttaaagatatccatggtatagacctaacgataacgatatatatcataaataaataatgttaaatttcaatttatgtttgtaccccgtattcatacttaacaaattggtattgcgtacacaatcaatcatattacataccattaataatgcaagcataaaaaattgttagtagatgtttctaaatataggttccgtaagcaaagaatataagaatgaagcggtaatgataaaatcaatcgttatctaaaatgatcatactcatttattttattctattatattaacacatacatttttaacagcaacacattcaatattgtattgttatttttatattatttacacaattaacaatatattattagtttatattactgaattaataatataaaattcccaatcttgtcataaacacacactgagaaacagcataaacacagaatccatcaaaaatgttgataaattatctgatgttgttgttcgctgctatgataatcagatcattcgccgatagtggtaacgctatcgaaacgacattgccagaaattacaaacgctacaacagatattccagctatcagattatgcggtccagagggagatggatattgtttacacggtgactgtatccacgctagagatattgacggtatgtattgtagatgctctcatggttatacaggcattagatgtcagcatgtagtattagtagactatcaacgttcagaaaacccaaacactacaacgtcatatatcccatctcccggtattatgcttgtattagtaggcattattatgtgttgtctattatctgtttataggttcactcgacgaactaaactacctatacaagatatggttgtgccataatttttataaatttttttatgagtatttttacaaaaatgtataaagtgtatgtcttatgtatatttataaaaatgctaagtatgcgatgtatctatgttatttgtatttatctaaacaatacctctacctctagatattatacaaaaattttttatttcggcatattaaagtaaaatctagttaccttgaaaatgaatacagtgggtggttccgtatcaccagtaagaacataatagtcaaatacagtatccgattgagattttgcatacaatactagtctagaaagaaatttgtaatcatcttctgtgacgggagtccatatatctgtatcatcgtctagtttatcagtgtcccatgctatattcctgttatcatcattagttaatgaaaataactctcgtgcttcagaaaagtcaaatattgtatccatacatacatctccaaaactatcgcttatacgtttatctttaacgatacctatacctagatggttatttactaacagacattttccagatctattgactataactcctatagtttccacatcaaccaagtaatgatcatctattgttatataacaataacataactcttttccatttttatcagtatgtatatctatatcaacgtcgtcgttgtagtgaatagtagtcattgatctattatatgaaacggatatgtctagaacggcaattgttttacgtccagttaacactttcgttgatttaaagtctagagtctttgcaaacataatatccttatccgactttatatttcctgtagggtggtataattttattttgcctccacatatcggtgtttccaaatatattactagacaatattccatatagttattagttaagggtacccaattagaacacgtacgcttattatcatcatttggatcgtatttcataaaagttattgtgttatcgatgtcaacacattctacattttttaatcgtctatatagtatttttctgatattttctataatatcagaattgtcttccatcggaagttgtatactatcggaatcagttacatgtttaaataattctctgatgtcattccttatacaatcaaattcattattaaacagtttaatagtctgtagacctttatcgtcgtaaatatccattgtcttattagttacgcttatttttatgtgtttttacgttgctttattatattttataagaatgattgtttgacgaatcacgagaactattaagacacattattaggtatatattataaaaaagtttttgattacgatgttataagaggaaagaggacacattaacatcatacatcaattaactacattcttataacatcgtaatcaaaagaattgcaattttgatgtataacaactgtcaatgggttatggaattgtatattacatattatacggtatgttggtaacgacaaataccggtcggtaattgtctgccggtgtaatagaattatatatatctatctattacaccggccttgtatacataataataagttgtggtagtatgatctccatatttataatttaggactttgtattcagtatttttggaatcataaaaaataaaaaaaagttttactaatttaaaatttaaaaagtatttacatttttttcactgtttagtcgcggatatggaattcgatcctgccaaaatcaatacatcatctatagatcatgtaacaatattacaatacatagatgaaccaaatgatataagactaacagtatgcattatccgaaatattatatcaatatcacaaaaataaatacacatttggctaatcaatttcgggcttggaaaaaacgtatcgccggaagggactatatgactaacttatctagagatacaggaatacaacaatcaaaacttactgaaactatacgtaactgtcaaaaaaatagaaacatatatggtctatatatacactacaatttagttattaattggataaccgatgtgattatcaatcaatattaagagggttggtaaattggtacatagctaataatacctatactccaaatacacccaataatacaacaaccatttctgagttggatatcatcaaaatactaaataaatacgaggacgtgtatagagtaagtaaagaaaaagaatgtggaatttgctatgaagttgtttactcaaaacgatagatactttggtttattggattcgtgtactcatatattttgcataacatgcatcaatatatggcatagaacacgaagagaaaccggtgcgtcggataattgtcctatatgccgtacccgttttagaaacataacaatgagcaagttctataagctagttaactaataaataaaaagtttaatttgttgacgacgtatgtcgttattttttctcgtataaaagattaatttgattctaatataatctttagtattggataaatatcaattcaaattaattccattagattatatcataaataaaaatagtagcacacaactacttcagcaaacattctttttataaatgccatctagcgtagcgaggacacaagtgaacctataattatcaaatttattagtatcagtcacatgaaggactttacgtagagtgacgattccactatctgtggtacgaacggtttcatcttctttgatgccatcacccagatgttctataaacttggtatcctcgtccgatttcatatcctttgccaaccaatacatatagctaaactcaggcatatgttccacacatcctgaacaatgaaattctccagaagatgttacaatgtctagatttggacatttggtttcaaccgcgttaacatatgagtgaacacacccatacatgaaagcgatgagaaataggattctcatcttgccaaaatatcactagaaaaaatttatttatcagttttaaaggtataaaaaatacttattgttgctcgaatattttgtatttgatggtatacggaagattagaaatgtaggtattatcatcaactgattctatggttttatgtattctatcatgtttcactattgcgttggaaataatatcatatgcttccacatatattttattttgttttaactcataatactcacgtaattctggattattggcatatctatgaataattttagctccatgatcagtaaatattaatgagaacatagtattaccacctaccattatttttttcatctcattcaattcttaattgcaaagatctatataatcattatagcgttgacttatggactctggaatcttagacgatgtacagtcatctataatcatggcatatttaatacattgttttatagcatagtcgttatctacgatgttagatatttctctcaatgaatcaatcacacaatctaatgtaggtttatgacataatagcattttcagcagttcaatgtttttagattcgttgatggcaatggctatacatgtatatccgttatttgatctaatgttgacatctgaaccggattctagcagtaaagatactagagattgtttattatatctaacagccttgtgaagaagtgtttctcctcgtttgtcaatcatgttaatgtctttaagataaggtaggcaaatgtttatagtactaagaattgggcaagcataagacatgtcacaaagacccttttttgtatgtataagtgtaaaaattataacatccatagttggatttacataggtgtccaatcgggatctctccatcatcgagataattgatggcatctcccttccttttttagtagatatttcatcgtgtaagaatcaatattaatatttctaaagtatccgtgtatagcctctttatttaccacagctccatattccactagagggatatcgccgaatgtcatatactcaattagtatatgttggaggacatccgagttcattgttttcaatatcaaagagatggtttccttatcatttctccatagtggtacaatactacacattattccgtgcggctttccattttccaaaaacaatttgaccaaatctaaatctacatctttattgtatctataatcactatttagataatcagccataattcctcgagtgcaacatgttagatcgtctatatatgaataagcagtgttatctattcctttcattaacaatttaacgatgtctatatctatatgagatgacttaatataatattgaagagctgtacaatagtttttatctataaaagacggcttgattccgtgattaattagacatttaacaacttccggacgcacatatgctctcgtatccgactctgaatacagatgagagatgatatacagatgcaatacggtaccgcaatttcgtagttgataatcatcatacgcgtatcagtactcgtcctcataaagaacactgcagccattttctatgaacaaatcaataattttagaaacaggatcattgtcattacataattttctataactgaacgatggttttcacatttaacactcaagtcaaatccatgttctaccaacacctttatcaagtcaacgtctacatttttggatttcatatagctgaatatattaaagttatttatgttgctaaatccagtggcttctagtagagccatcgctatatccttattaactttaacatgtctactatttgtgtattcttctaatggggtaagctgtctccaatttttgcgtaatggattagtgccactgtctagtagtagtttgacgacctcgacattattacaatgctcattaaaaaggtatgcgtgtaaagcattattcttgaattggttcctggtatcattaggatctctgtctttcaacatctgtttaagttcatcaagagccacctcctcattttccaaatagtcaaacattttgactgaatgagctactgtgaactctatacacccacacaactaatgtcattaaatatcatgtcaaaaacttgtacaattattaataaaaataatttagtgtttaaattttaccagttccagattttacacctccgttaatacctccattaaccccactggacgatcctcctccccacattccaccgccaccagatgtataagttttagatcctttattactaccatcatgtccatggataaagacactccacatgccgccactaccccctttagaagacatattaataagacttaaggacaagtttaacaataaaattaatcacgagtaccctactaccaacctacactattatatgattatagtttctatttttacagtaccttgactaaagtttctagtcacaagagcaatactaccaacctacactattatatgattatagtttctatttttataggaacgcgtacgagaaaatcaaatgtctaatttctaacggtagtgttgataaacgattgttatccgcggatacctcctctatcatgtcgtctattttcttactttgttctattaacttattagcattatatattatttgattataaaacttatattgcttattagcccaatctgtaaatatcggattattaacatatcgtttctttgtaggtttatttaacatgtacatcactgtaagcatgtccttaccatttattttaatttgacgcatatccgcaatttctttttcgcagtcggttataaattctatatatgatggatacatgctacatgtgtacttataatcgactaatatgaagtacttgatacatattttcagtaacgatttattattaccacctatgaataagtacctgtgatcgtctaggtaatcaactgttttcttaatacattcgatggttggtaatttactcagaataatttccaatatcttaatatataattctgctatttctgggatatatttatctgccagtataacacaaatagtaatacatgtaaacccatattttgttattatattaatgtctgcgccattatctattaaccattctactaggctgacactatgcgactcaatacaatgataaagtatactacatccatgtttatctattttgtttatatcatcaatatacggcttacaaagttttagtatcgataacacatccaactcacgcatagagaaggtagggaataatggcataatatttattaggttatcatcattgtcattatctacaactaagtttccattttttaaaatatactcgacaactttaggatctctattgccaaatttttgaaaatatttatttatatgcttaaatctatataatgtagctccttcatcaatcatacatttaataacattgatgtatactgtatgataagatacatattctaacaatagatcttgtatagaatctgtatatcttttaagaattgtggatattaggatattattacataaactattacacaattctaaaatataaaacgtatcacggtcgaataatagttgatcaactatataattatcgattttgtgatttttcttcctaaactgtttacgtaaatagttagatagaatattcattagttcatgaccactatagttactatcgaataacgcgtcaaatatttcccgtttaatatcgcatttgtcaagataataatagagtgtggtatgttcacgataagtataataacgcatctctttttcgtgtgaaattaaatagtttattacgtccaaagatgtagcataaccatcttgtgacctagtaataatataataatagagaactgttttacccattctatcatcataatcagtggtgtagtcgtaatcgtaatcgtctaattcatcatcccaattataatattcaccagcacgtctaatctgttctattttgatcttgtatccatactgtatgttgctacatgtaggtattcctttatccaataatagtttaaacacatctacattgggatttgatgttgtagcgtatttttctacaatattaataccatttttgatactatttatttctatacctttcgaaattagtaatttcaataagtctatattgatgttatcagaacatagatattcgaatatatcaaaatcattgatatttttatagtcgactgacgacaataacaaaatcacaacatcgtttttgatattattatttttcttggtaacgtatgcctttaatggagtttcaccatcatactcatataatggatttgcaccactttctatcaatgattgtgcactgctggcatcgatgttaaatgttttacaactatcatagagtatcttatcgttaaccatgattggttgttgatgctatcgcattttttggtttctttcatttcagttatgtatggatttagcacgtttgggaagcatgagctcatatgatttcagtactgtagtgtcagtactattagtttcaataagatcaatctctagatctatagaatcaaaacacgataggtcagaagataatgaatatctgtaggcttcttgttgtactgtaacttctggttttgttagatggttgcatcgtgctttaacgtcaatggtacaaattttatcctcgctttgtgtatcatattcgtccctactataaaattgtatattcagattatcatgcgatgtgtatacgctaacggtatcaataaacggagcacaccatttagtcataaccgtaatccaaaaatttttaaagtatatcttaacgaaagaagttgtgtcattgtctacggtgtatggtactagatcctcataagtgtatatatctagagtaatgtttaatttattaaatggttgataatatggatcctcgtgacaatttccgaagatggaaataagacataaacacgcaataaatctaattgcggacatggttactccttaaaaaaatacgaataatcaccttggctatttagtaagtgtcatttaacactatactcatattaatccatggactcataatctctatacgggattaacggatgttctatatacggggatgagtagttctcttctttaactttatactttttactaatcatatttagactgatgtatgggtaatagtgtttgaagagctcgttctcatcatcagaataaatcaatatctctgtttttttgttatacagatgtattacagcctcatatattacgtaatagaacgtgtcatctaccttattaactttcaccgcatagttgtttgcaaatacggttaatcctttgacctcgtcgatttccgaccaatctgggcgtataatgaatctaaactttaattgcttgtaatcattcgaaataatttttagtttgcatccgtagttatcccctttatgtaactgtaaatttctcaacgcgatatctccattaataatgatgtcgaattcgtgctgtatacccatactgaatggatgaacgaataccgacggcgttaatagtaatttactttttcatctttacatattgggtactagttttactatcataagtttataaattccacaagctactatggaataagccaaccatcttagtataccacacatgtcttaaagtttattaattaattacatgttgttttatatatatcgctacgaatttaaagagaaattagtttaggaagaaaaattatctatctacatcatcacgtctctgtattctacgatagagtgctactttaagatgcgacagatccgtgtcatcaaatatatactccattaaaatgattattccggcagcgaacttgatattggatatatcacaacctttgttaatatctacgacaatagacagcagtcccatggttccataaacagtgagtttatctttctttgaagagatattttgtagagatcttataaaactgtcgaatgacatcgcatttatatctttagctaaatcgtatatgttaccatcgtaatatctaaccgcgtctatcttaaacgtttccatcgctttaaagacgtttccgatagatggtctcatttcatcagtcatactgagccaacaaatataatcgtgtataacatctttgatagaatcagactctaaagaaaacgaatcggctttattatacgcattcatgataaacttaatgaaaaatgtttttcgttgtttaagttggatgaatagtatgtcttaataattgttattatttcattaattaatatttagtaacgagtacactctataaaaacgagaatgacataactaatcataactagttatcaaagtgtctaggacgcgtaattttcatatggtatagatcctgtaagcattgtctgtattctggagctattttctctatcgcattagtgagttcagaatatgttataaatttaaatcgaataacgaacataactttagtaaagtcgtctatattaactcttttattttctagccatcgtaataccatgtttaagatagtatattctctagttactacgatctcatcgttgtctagaatatcacatactgaatctacatccaattttagaaattggtctgtgttacatatctcttctatattattgttgatgtattgtcgtagaaaactattacgtagaccattttctttataaaacgaatatatagtactccaattatctttaccgatatatttgcacacataatccattctctcaatcactacatctttaagattttcgttgttaagatatttggctaaactatataattctattagatcatcaacagaatcagtatatatttttctagatccaaagacgaactctttggcgtcctctataatattcccagaaaagatattttcgtgttttagtttatcgagatctgatctgttcatatacgccatgattgtacggtacgttatgataaccgcataaaataaaaatccattttcatttttaaccaatactattcataattgagattgatgtaatactttgttactttgaacgtaaagacagtacacggatccgtatctccaacaagcacgtagtaatcaaatttggtgttgttaaacttcgcaatattcatcaatttagatagaaacttatactcatcatctgttttaggaatccatgtattattaccactttccaacttatcattatcccaggctatgtttcgtccatcatcgttgcgcagagtgaataattcttttgtattcggtagttcaaatatatgatccatgcatagatcggcaaagctattgtagatgtgatttttcctaaatctaatataaaactcgtttactagcaaacactttcctgatttatcgaccaagacacatatggtttctaaatctatcaagtggtggggatccatagttatgacgcagtaacatatattattacattcttgactgtcgctaatatctaaatatttattgttatcgtattggattctgcatatagatggcttgtatgtcaaagatatagaacacataaccaatttatagtcgcgctttacattctcgaatctaaagttaagagatttagaaaacattatatcctcggatgatgttatcactgtttctggagtaggatatattaaagtctttacagatttcgtccgattcaaataaatcactaaataatatcccacattatcatctgttagagtagtatcattaaatctattatattttatgaaagatatatcactgctcacctctatatttcgtacatttttaaactgtttgtataatatctctctgatacaatcagatatatctattgtgtcggtagacgataccgttacatttgaattaatggtgttccattttacaacttttaacaagttgaccaattcatttctaatagtatcaaactctccatgattaaatattttaatagtatccattttatatcactacggacacaaagtagctgacataaaccattgtataatttttatgttttatgtttattagcgtacacattttggaagttccggcttccatgtatttcctggagagcaagtagatgatgaggaaccagatagtttatatccgtacttgcacttaaagtctacattgtcgttgtatgagtatgatcttttaaacccgctagacaagtatccgtttgatattgtaggatgtggacatttaacaatctgacacgtgggtggatcggaccattctcctcctgaacacaggacactagagttaccaatcaacgaatatccactattgcaactataagttacaacgctcccatcggtataaaaatcctcgtatccgttatgtcttccgttggatatagatggaggggattggcatttaacagattcacaaataggtgcctcgggattccataccatagatccagtagatcctaattcacaatacgatttagattcaccgatcaactgatatccgctattacaagagtacgttatactagagccaaagtctactccaccaatatcaagttggccattatcgatatctcgaggcgatgggcatctccgtttaatacattgattaaagagtgtccatccagtacctgtacatttagcatatataggtcccattttttgctttctgtatccaggtagacatagatattctatagtgtctcctatgttgtaattagcattagcatcagtctccacactattcttaaatttcatattaatgggtcgtgacggaatagtacagcatgatagaacgcatcctattcccaacaatgtcaggaacgtcacgctctccaccttcatatttatttatccgtaaaaatgttatcctggacatcgtacaaataataaaaagcccatatatgttcgctattgtagaaattgtttttcacagttgctcaaaaacgatggcagtgacttatgagttacgttacactttggagtctcatctttagtaaacatatcataatattcgatattacgagttgacatatcgaacaaattccaagtatttgattttggataatattcgtattttgcatctgctataattaagatataatcaccgcaagaacacacgaacatctttcctacatggttaaagtacatgtacaattctatccatttgtcttccttaactatatatttgtatagataattacgagtctcgtgagtaattccagtaattacatagatgtcgccgtcgtactctacagcataaactatactatgatgtctaggcatgggagacttttttatccaacgatttttagtgaaacattccacatcgtttaatactacatatttctcatacgtggtataaactccacccattacatatatatcatcgtttacgaataccgacgcgcctgaatatctaggagtaattaagtttggaagtcttatccatttcgaagtgccgtgtttcaaatattctgccacacccgttgaaatagaaaattctaatcctcctattacatataactttccatcgttaacacaagtactaacttctgattttaacgacgacatattagtaaccgttttccattttttcgttttaagatctacccgcgatacggaataaacatgtctattgttaatcatgccgccaataatgtatagacaattatgtaaaacatttgcattatagaattgtctatctgtattaccgactatcgtccaatattctgttctaggagagtaatgggttattgtggatatataatcagagtttttaatgactactatattatgttttataccatttcgtgtcactggctttgtagatttggatatagttaatcccaacaatgatatagcattgcgcatagtattagtcataaacttgggatgtaaaatgttgatgatatctacatcgtttggatttttatgtatccactttaataatatcatagctgtaacatcctcatgatttacgttaacgtcttcgtgggataagatagttgtcagttcatcctttgataattttccaaattctggatcggatgtcaccgcagtaatattgttgattatttctgacatcgacgcattatatagttttttaattccatatcttttagaaaagttaaacatccttatacaatttgtgaaattaatattatgaatcatagtttttacacatagatctactacaggcggaacatcaattattatggcagcaactagtatcatttctacattgtttatggtgatgtttatcttcttccagcgcatatagtctaatagcgattcaaacgcgtgatagtttataccattcaatataatcgcttcatcctttagatggtgatcctgaatgcgtttaaaaaaattatacggagacgccgtaataatttccttattcacttgtataatttccccattgatagaaaatattacgctttccattcttaaagtactataagtaattatagtataatgtaaacgtttatatattcaatatttttataaaaatcattttgacattaattcctttttaaatttccgtctatcatctatagaaacgtattctatgaatttataaaatgcttttacgtgtcctatcgtaggcgatagaaccgctaaaaagcctatcgaatttctacaaaagaatctgttatatggtatagggagagtataaaacattaaatgtccgtacttattaaagtattcagtagccaatcctaactctttcgaatacttattaatggctcttgttctgtacgaatctatttttttgaacaacggacctagtggtatatcttgttctatgtatctaaaataatgtctgactagatccgttagtttaatatccgcagtcatcttgtctagaatggcaaatctaactgcgggtttaggctttagtttagtttctatatctacatctatgtctttatctaacaccaaaaatataatagctaatattttattacaatcatccggatattcttctacgatctcactaactaatgtttctttggttatactagtatagtcactatcggacaaataaagaaaatcagatgatcgatgaataatacatttaaattcatcatctgtaagatttttgagatgtctcattagaatattattagggttagtactcattatcattcggcagctattacttattttattatttttcaccatatagatcaatcattagatcatcaaaatatgtttcaatcatcctaaagagtatggtgaatgactcttcccatctaatttctgaacgttcaccaatgtctctagccactttggcactaatagcgatcattcgcttagcgtcttctatattattaactggttgatttaatctatctagcaatggaccgtcggacagcgtcattctcatgttcttaatcaatgtacatacatcgccgtcatctaccaattcatccaacaacataagctttttaaaatcatcattataataggtttgatcgttgtcatttctccaaagaatatatctaataagtagagtcctcatgcttagttaacaactattttttatgttaaatcaattagtacaccgctatgtttaatacttattcatattttagtttttaggattgagaatcaatacaaaaattaatgcatcattaattttagaaatacttagtttccacgtagtcaatgaaacatttgaactcatcgtacaggacgttctcgtacaggacgtaactataaaccggtttatatttgttcaagatagatacaaatccgataactttttttacgaattctacgggatccactttaaaagtgtcataccgggttctttttatttttttaaacagatcaatggtgtgatgttgattaggtcttttacgaatttgatatagaatagcgtttacatattctccataatggtcaatcgccatttgttcgtatgtcataaattctttaattatatgacactgtgtattatttagttcatccttgttcattgttaggaatctatccaaaatggcaattatactagaactataggtgcgttgtatacacatattgatgtgtctgtttatacaatccatgatatttggatccatgctactaccttcgggtaaaattgtagcatcatataccatttctagtactttaggttcattattatccattgcagaggacgtcatgatcgaatcataaaaaaatatattatttttatgttattttgttaaaaataatcatcgaatacttcgtaagatactccttcatgaacataatcagttacaaaacgtttatatgaagtaaagtatctacgatttttacaaaagtccggatgcataagtacaaagtacgcgataaacggaataataatagatttatctagtctatctttttctatagctttcatagttagatacatggtctcagaagtaggattatgtaacatcagcttcgataaaatgactgggttatttagtcttacacattcgctcatacatgtatgaccgttaactacagagtctacactaaaatgattgaacaatagatagtctaccattgtttcgtattcagatagtacagcgtagtacatggcatcttcacaaattatatcattgtctaatagatatttgacgcatcttatggatcccacttcaacagccatcttaaaatcatattgctttcctttatcattaataatttctagaacatcatctctatcataaaagatacaaatattaactgtttgatccgtaataacattgctagtcaatagcaatttgttaataagatgcgctgggctcaatgtcttaataagaagtgtaagaggactatctccgaatttgttttgtttattaacatccgttgatggaagtaaaagatctataatgtctacattcttgactgttttagagcatacaatatggagaggtgtatttccatcatgatctggttttgagggactaattcctagtttcatcatccatgagattgtagaagcttttggattgtctgacataagatgtctatgaatatgatttttgccaaatttatccactatcctggcttcgaatccgatggacattatttttttaaacactctttctgaaggatctgtacacgccaacaacggaccacatccttcttcatcaaccgagttgttaatcttggctccatactgtaccaataaatttattctctctatgacttcatcatctgttcccgagagataatatagaggtgttttatgctgtttatcacacgcgtttggatctgcgccgtgcgtcagcagcatcgcgactattctattattattaattttagaagctatatgcaatggataatttccatcatcatccgtctcatttggagagtatcctctatgaagaagttcttcgacaaatcgttcatctagtcctttaattccacaatacgcatgtagaatgtgataattatttccagaaggttcgatagcttgtagcatattcctaaatacatctaaatttttactattatatttggcataaagagatagataatactcggccgacataatgttgtccattgtagtataaaaattaatatttctatttctatttctgtatatttgcaacaatttactctctataacaaatatcataacttagtttttttatgtcaagaaggcactggtttagttcatctataaatgtcacgccataactaccacgcatgccatactcagaattatgataaagatatttatccttggggtgtaggtaatggggattaatctttgttggatcagtctctaagttaacacatgtcacacatgatccatttatagttatatcacacgatgatgatttatgaattgattccggaagatcgctatcgtattttgtggttccacaattcatttccatacatgttattgtcacactaatattatgatgaactttatctagccgctgagtggtaaacaacagaacagatagtttattatctttaccaacaccctcagccgctgccacaaatctctgatccgtatccatgatggtcatgtttatttctagtccgtatccagtcaacactatgttagcatttctgtcgatatagctttcactcatatgacactcaccaataatagtagaattaatgtcgtaatttacaccaatagtgagttcggcggcaaagtaccaataccggtaatcttgtcgaggaggacatatagtattcttgtattctaccgaatacccgagagatgcgatacaaaagagcaagactaatttgtaaaccatcttactcaaaatatgtaacaatagtacgatgcaatgagtaagacaataggaaatctatcttatatacacataattattctatcaattttaccaattagttagtgtaatgttaacaaaaatgtgggagaatctaattagtttttctttacacaattgacgtacatgagtctgagttccttgtttttgctaattatttcatccaatttattattcttgacgatatcgagatcttttgtataggagtcaaacttgtattcaacatgcttttctataatcattttagctatttcggcatcatccaatagtacattttccagattagcagaatagatattaatgtcgtatttgaacagagcctgtaacatctcaatgtctttattatctatagccaatttaatgtccggaatgaagagaagggaattattggtgtttgtcgacgtcatatagtcgagcaagagaatcatcatatccacgtgtccattttttatagtgatgtgaatacaactaaggagaatagccagatcaaaagtagatggtatctctgaaagaaagtaggaaacaatacttacatcattaagcatgacggcatgataaaatgaagttttccatccagttttcccatagaacatcagtctccaatttttcttaacaaacagttttaccgtttgcatgttaccactatcaaccgcataatacaatgcggtgtttcccttgtcatcaaattgtgaatcatccagtccactgaatagcaaaatctttactattttggtatcttccaatgtggctgcctgatgtaatggaaattcattctctagaagatttttcaatgctccagcgttcaacaacgtacatactagacgcacgttattatcagctattgcataatacaaggcactatgtccatggacatccgccttaaatgtatctttactagagagaaagcttttcagctgcttagacttccaagtattaattcgtgacagatccatgtctgaaacgagacgctaattagtgtatattttttcattttttataattttgtcatattgcaccagaattaataatatctttaatagatctgattagtagatacatggctatcgcaaaacaacatatacacatttaataaaaataatatttattaagaaaattcagatttcacgtacccatcaatataaataaaataatgattccttacaccgtacccatattaaggagattccaccttacccataaacaatataaatccagtaatatcatgtctgatgatgaacacaaatggtgtattaaattccagtttttcaggagatgatctcgccgtagctaccataatagtagatgcctctgctacagttccttgttcgtcgacatctatctttgcattctgaaacattttataaatatataatgggtccctagtcatatgtttaaacgacgcattatctggattaaacatactaggagccatcatttcggctatcgacttaatatccctcttattttcgatagaaaatttagggagtttaagattgtacactttattccctaattgagacgaccaatagtctaattttgcagccgtgatagaatctgtgaaatgggtcatattatcacctattgccaggtacatactaatattagcatccttatacggaaggcgtaccatgtcatattctttgtcatcgattgtgattgtatttccttgcaatttagtaactacgttcatcatgggaaccgttttcgtaccgtacttattagtaaaactagcattgcgtgttttagtgatatcaaacggatattgccatatacctttaaaatatatagtattaatgattgcccatagagtattattgtcgagcatattagaatctactacattagacataccggatctacgttctactatagaattaattttattaaccgcatctcgtctaaagtttaatctatataggccgaatctatgatattgttgataatacgacggtttaatgcacacagtattatctacgaaactttgataagttagatcagtgtacgtatatttagatgttttcagcttagctaatcctgatattaattctgtaaatgctggacccagatctctttttctcaaatccatagtcttcaataattctattctagtattacctgatgcaggcaatagcgacataaacatagaaaacgaataaccaaacggtgagaagacaatattatcatcttgaatatttttatacgctactataccggcattggtaaatccttgtagacgataggcggacgctgaacacgctaacgatagtatcaataacgcaatcatgattttatggtattaataattaaccttatttttatgttcggtataaaaaaattattgatgtctacacatccttttgtaattgacatctatatatccttttgtataatcaactctaatcactttaacttttacagttttccctaccagtttatccctatattcaacatatctatccatatgcatcttaacactctctgccaagatagcttcagagtgaggatagtcaaaaagataaatatatagagcataatcattctcgtatactctgccctttattacatcacccgcattgggcaacgaataacaaaatgcaagcatcttgttaacgggctcgtaaattgggataaaaattatgtttttattgtcttatatctattttattcaagagaatattcaggaatttctttttccggttgtatctcgtcgcagtatatatcatttgtacattgtttcatattttttaatagtttacaccttttagtaggactagtatcgtacaattcatagctgtattttgaattccaatcacgcataaaaatatcttccaattgttgacgaagacctaatccatcatccggtgtaatattaatagatgctccacatgtatccgtaaagtaatttcctgtccaatttgaggtacctatataggccgttttatcggttaccatatatttggcatggtttaccctagaatacggaatgggaggatcagcatctggtacaataaatagctttacttctatatttatgtttttagattttagcatagcgatagatcttaaaaagtttctcatgataaacgaagatcgttgccagcaactaatcaatagcttaacggatacttgtctgtctatagcggatcttcttaattcatcttctatataaggccaaaacaaaattttacccgccttcgaataaataatagggataaagttcataacagatacataaacgaatttactcgcatttctaatacatgacaataaagcggttaaatcattggttctttccatagtacatagttgttgcggtgcagaagcaataaatacagagtgtggaacgccgcttacgttaatactaagaggatgatctgtattataatacgacggataaaagtttttccaattatatggtagattgttaactccaagataccagtatacctcaaaaatttgagtgagatccgctgccaagttcctattattgaagatcgcaatacccaattccttgacctgagttagtgatctccaatccatgttagcgcttcctaaataaatatgtgtattatcagatatccaaaattttgtatgaagaactcctcctaggatatttgtaatatctatgtatcgtacttcaactccggccatttgtagtctttcaacatcctttaatggtttgttagatttattaacggctactctaactcgtactcctcttttgggtaattgtacaatctcgtttaatattatcgtgccgaaattcgtacccacttcatccgataaactccaataaaaagatgatatatctagtgtttttgtggtattggatagaatttccctccacatgttaaatgtagacaaatatactttatcaaattgcatacctataggaatagtttctgtaatcactgcgattgtattatccggattcattttatttgttaaaagaataatcctatatcacttcactctattaaaaatccaagtttctatttctttcatgactgattttttaacttcatccgtttccttatgaagatgatgtttggcaccttcataaatttttatttctctattacaatttgcatgttgcatgaaataatatgcacctaaaacatcgctaatcttattgtttgttccctggagtatgagagtcggggggtgttaatcttggaaattatttttctaaccttgttggtagccttcaagacctgactagcaaatccagccttaattttttcatgattgactaatgggtcgtattggtatttataaactttatccatatctctagatactgattctggacatagctttccgactggcgcatttggtgtgatggttcccataagtttggcagctagcagattcagtcttgaaacagcatctgcattaactagaggagacattagaatcattgctgtaaacaagtttggattatcgtaagaggctagctcccatggaatgacccaataagtagatttaatagttaccacgtgctgtaccaaagtcatcaatcatcattttttcaccattacttcttccatgtccaatatgatcatgtgagaatactaaaattcctaacgatgatatgttttcagctagttcgtcataacgtccagaatgtttaccagctccatgacttatgaatactaatgccttaggatatgtaataggtttccaatatttacaatatatgtaatcattgtccagattgaacatacagtttgcactcatgattcacgttatataactatcaatattaacagttcgtttgatgatcatattatttttatgttttattgataattgtaaaaacatacaattaaatcaatatagaggaaggagacggctactgtcttttgtaagatagtcatggcgactaaattagattatgaggatgctgttttttactttgtggatgatgataaaatatgtagtcgcgactccatcatcgatctaatagatgaatatattacgtggagaaatcatgttatagtgtttaacaaagatattaccagttgtggaagactgtacaaggaattgatgaagttcgatgatgtcgctatacggtactatggtattgataaaattaatgagattgtcgaagctatgagcgaaggagaccactacatcaattttacaaaagtccatgatcaggaaagtttattcgctaccataggaatatgtgctaaaatcactgaacattggggatacaaaaagatttcagaatctagattccaatcattgggaaacattacagatttgatgaccgacgataatataaacatcttgatactttttctagaaaaaaaattgaattgatgatataggggtcttcataacgcataattattacgttagcattctatatccgtgttaaaaaaaattatcctatcatgtatttgagagttttatatgtagcaaacatgatagctgtgatgccaataagctttagatattcacgcgtgctagtgttagggatggtattatctggtggtgaaatgtccgttatataatctacaaaacaatcatcgcatatagtatgcgatagtagagtaaacatttttatagtttttactggattcatacatcgtctacccaattcggttataaatgaaattgtcgccaatcttacacccaaccccttgttatccattagcatagtattaacttcgttatttatgtcataaactgtaaatgattttgtagatgccatatcatacatgatattcatgtccctattataatcattactaactttatcacaatatatgttgataatatctatatatgatctagtctttgtgggcaactgtctatacaagtcgtctaaacgttgtttactcatatagtatcgaacagccatcattacatggtcccgttccgttgatagataatcgagtatgttagtggacttgtcaaatctatataccatattttctggaagtggatatacatagtcgtgatcaacattattgctagcctcatcttctatatcctgtactataccattatctatatcatctacataatctatgatattattacacataaacatcgacaacatactattgtttattatctaagtcctgttgatccaaacccttgatctcctctatttgtactatctagagattgtacttcttccagttctggataatatatacgttgatagattagctgagctattctatctccagtatttacattaaacgtacattttccattattaataagaatgactcctatgtttcccctataatcttcgtctattacaccacctcctatatcaatgccttttagtgacagaccagacctaggagctattctaccatagcagaacttaggcatggacatactaatatctgtcttaattaactgtctttctcctggagggatagtataatcgtaagcgctatacaaatcatatccggcagcacccggcgattgcctagtaggagatttagctctgttagtttccttaacaaatctaactggtgagttaatattcatgttgaacataaaactaatattttatttcaaaattatttaccatcccatatattccatgaataagtgtgatgattgtacacttctatagtatctatatacgatccacgataaaatcctcctatcaatagcagtttattatccactatgatcaattctggattatccctcggataaataggatcatctatcagagtccatgtattgctggattcacaataaaattccgcatttctaccaaccaagaataaccttctaccgaacactaacgcgcatgatttataatgaggataataagtggatggtccaaactgccactgatcatgattgggtagcaaatattctgtagttgtatcagtttcagaatgtcctcccattacgtatataacattgtttatggatgccactgctggattacatctaggtttcagaagactcggcatattaacccaagcagcatccccgtggaaccaacgctcaacagatgtgggatttggtagacctcctactacgtataatttattgttagcgggtatcccgctagcatacagtctggggctattcatcggaggaattggaatccaattgtttgatatataatttacagctatagcattgttatgtatttcattgttcatccatccaccgatgagatatactacttctccaacatgagtacttgtacacatatggaatatatctataatttgatccatgttcataggatactctatgaatggatacttgtatgatttgcgtggttgtttatcacaatgaaatattttggtacagtctagtatccattttacattatttatacctctgggagaaagataatttgacctgattacatttttgataaggagtagcagatttcctaatttatttcttcgcctcatataccacttaatgacaaaatcaactacataatcctcatctggaacatttagttcatcgctttctagaataagtttcatagatagataatcaaaattgtctatgatgtcatcttccagttccaaaaagtgtttggcaataaagtttttagtatgacataagagattggatagtccgtattctatacccatcatgtaacactcgacacaatattcctttctaaaatctcgtaagataaagtttatacaagtgtagatgataaattctacagaggttaatatagaagcacgtaataaattgacgacgttatgactatctatatatacctttccagtatatgagtaaataactatagaagttaaactgtgaatgtcaaggtctagacaaacccttgtaactggatctttatttttcgtgtatttttgacgtaaatgtgtgcgaaagtaaggagataactttttcaatatcgtagaattgactattatattgcctcctatggcatcaataattgttttgaatttcttagtcatagacaatgctaatatattcttacagtacacagtattgacaaatatcggcatttatgtttctttaaaagtcaacatctagagaaaaatgattatctttttgagacataactcccattttttggtattcacccacacgtttttcgaaaaaattagtttttccttccaatgatatattttccatgaaatcaaacggattggtaacattataaatttttttaaatcccaattcagaaatcaatctatccgcgacgaattctatatatgttttcatcatttcacaattcattcctataagtttaactggaagagccgcagtaagaaattcttgttcaatggatactgcatctgttataatagatctaacggtttcttcactcggtggatgcaataaatgtttaaacatcaaacatgcgaaatcgcagtgcagaccctcgtctctactaattagttcgttggaaaacgtgagtccgggcattaggccacgctttttaagccaaaatatggaagcgaatgatccagaaaagaaaattccttctactgcagcaaaggcaataagtctctctccataaccggcgctgtcatgtatccacttttgagcccaatcggccttcttttttacacaaggcatcgtttctatggcattaaagagatagtttttttcattactatctttaacataagtatcgatcaaaagactatacatttccgaatgaatgttttcaatggccatctgaaatccgtagaaacatctagcctcggtaatctgtacttctgtacaaaatcgttccgccaaattttcattcactattccgtcactggctgcaaaaaacgccaatacatgttttataaaatatttttcgtctggtgttagtttattccaatcattgatatctttagatatatctacttcttccactgtccaaaatgatgcctctgcctttttatacatgttccagatgtcatgatattggattgggaaaataacaaatctatttggatttggtgcaaggatgggttccataactaaattaacaataacaataaattttttttcagttatctatatgcctgtacttggattttttgtacatcgatatcgccgcaatcactacaataattacaagtattattgatagcattgttattagtactatcataattaaattatctacattcatgggtgctgaataatcgttattatcatcattatcattttgtaattgtgacatcatactagataaatcgtttgcgagattgttgtgggaagcgggcatggaggatgcattatcattattatttaacgccttccatttggattcacaaatgttacgcacattcaacattttatggaaactataattttgtgaaaacaaataacaagaaaactcgtcatcgttcaaatttttaacgatagtaaaccgattaaacgtcgagctaatttctaacgctagcgactctgttggatatgggtttccagatatatatcttttcagttcccctacgtatctataatcatctgtaggaaatggaagatatttccatttatctactgttcctaatatcatatgtggtggtgtagtagaaccattaagcgcgaaagatgttatttcgcatcgtattttaacttcgcaataatttctggttagataacgcactctaccagtcaagtcaatgatattagcctttacagatatattcatagtagtcgtaacgatgactccatcttttagatgcgatactcctttgtatgtaccagaatcttcgtacctcaaactcgatatatttaaacaagttaatgagatattaacgcgttttatgaatgatgatatataaccagaagttttatcctcggtggctagcgctataaccttatcattataataccaactagtgtgattaatatgtgacacgtcagtgtgggtacaaatatgtacattatcgtctacgtcgtattcgatacatccgcatacagccaacaaatataaaatgacaaatactctaacgccgttcgtacccatcttgatgcggtttaataaatgttttgatttcaatttattgtaaaaaaagattcggttttatactgttcgatattctcattgcttatattttcatctatcatctccacacagtcaaatccgtggttagcatgcacctcatcaaccggtaaaagactatcggactcttctatcattataactctagaatatttaatttggtcattattaatcaagtcaattatcttatttttaacaaacgtgagtattttactcattttttataaaaacttttagaaatatacagactctatcgtgtgtctatatcttctttttatatccaatgtatttatgtctgatttttcttcatttatcatatataatggtccaaattctacacgtgcttcggattcatccagatcattaaggttcttataattgtaacatccttctcttccctcttctacatcttccttcttattcttattcttagcgtcacagaatctaccacagcaggatcccatgacgagcgtcatattaaactaatccattttcaattataatatatgattagtaatgaccattaaaataaaaaatattcttcataaccggcaagaaagtgaaaagttcacattgaaactatgtcagtagtatacatcatgaaatgatgatatatatatactctattttggtggaggattatatgatataattcgtggataatcatttttaagacacatttctttattcgtaaatcttttcacgttaaatgagtgtccatattttgcaatttcttcatatgatggcggtgtacgtggacgaggctgctcctgttcttgttgtggtcgccgactgtcgtgtctgcgtttagatccctccattatcgcgattgcgtagatggagtactattttataccttgtaattaaatttttttattaattaaacgtataaaaacgttccgtatctgtatttaagagccagatttcgtctaatagaacaaatagctacagtaaaaataactagaataattgctacacccactagaaaccacggatcgtaatacggcaatcggttttcgataataggtggaacgtatattttatttaaggacttaacaattgtctgtaaaccacaatttgcttccgcggatcctgtattaactatctgtaaaagcatatgttgaccgggcggagccgaacattctccgatatctaatttctgtatatctataatattattaacctccgcatacgcattacagttcttttctagcttggataccgcactaggtacatcgtctagatctattcctatttcctcagcgatagctcttctatccttttccggaagcaatgaaatcacttcaataaatgattcaaccatgagtgtgaaactaagtcgagaattactcatgcatttgttagttattcggagcgcgcaatttttaaactgtcctataacctctcctatatgaatagcacaagtgacattagtagggatagaatgttgagctaatttttgtaaataactatctataaaaagattatacaaagttttaaactctttagtttccgccatttatccagtctgagaaaatgtctctcataataaatttttccaagaaactaattgggtgaagaatggaaacctttaatctatatttatcacagtctgttttggtacacatgatgaattcttccaatgccgtactaaattcgatatctttttcgatttctggatatgtttttaataaagtatgaacaaagaaatggaaatcgtaataccagttatgtttaactttgaaattgttttttattttcttgttaatgattccagccacttgggaaaagtcaaagtcgtttaatgccgatttaatacgttcattaaaaacaaactttttatcctttagatgaattattattggttcattggaatcaaaaagtaagatattatcgggtttaagatctgcgtgtaaaaagttgtcgcaacagggtagttcgtagattttaatgtataacagagccatctgtaaaaagataaactttatgtattgtaccaaagatttaaatcctaatttgatagctaactcggtatctactttatctgccgaatacagtgctaggggaaaaattataatgtttcctctttcatattcgtagttagttctcttttcatgttcgaaaaagtgaaacatgcggttaaaatagtttataacattaatattactgttaataactgccggataaaagtgggatagtaatttcacgaatttgatactgtcctttctctcgttaaacgcctttaaaaaaactttagaagaatatctcaatgagagttcctgaccatccatagtttgtatcaataatagcaacatatgaagaacacgtttatacagagtatgtaaaaatgttaatttatagtttaatcccatggcccacgcacacacgattaattttttttcatctccctttagattgttgtatagaaatttgggtactgtgaactccgccgtagtttccatgggactatataattttgtggcctcgaatacaaattttactacatagttatctatcttaaagactataccatatcctcctgtagatatgtgataaaaatcgtcgtttataggataaaatcgtttatccttttgttggaaaaaggatgaattaatgtaatcattctcttctatctttagtagtgtttccttattaaaattcttaaaataatttaacaatctaactgacggagcccaattttggtgtaaatctaattgggacattatattgttaaaatacaaacagtctcctaatataacagtatctgataatctatggggagacatccattgatattcaggggatgaatcattggcaacacccatttattgtacaaaaagccccaatttacaaacgaaagtccaggtttgatagagacaaacaattaactattttgtctctgtttttaacacctccacagtttttaatttctttagtaatgaaattattcacaatatcagtatcttctttatctaccagagattttactaacttgataaccttggctgtctcattcaatagggtagtaatatttgtatgtgtgatattgatatctttttgaattgtttcttttagaagtgattctttgatggtgccagcatacgaattacaataatgcagaaactcggttaacatgcaggaattatagtaagccaattccaattgttgcctgtgttgtattagagtgtcaatatgagcaatggtgtccttgcgtttctctgatagaatgcgagcagcgattttggcgttatcatttgacgatatttctggaatgacgaatcctgtttctactaactttttggtaggacaaagtgaaacaatcaagaagatagcttctcctcctatttgtggaagaaattgaactcctctagatgatctactgacgatagtatctccttgacagatattggaccgaattacagaagtacctggaatgtaaagccctgaaaccccctcattttttaagcagattgttgccgtaaatcctgcactatgcccaagatagagagctcctttggtgaatccatctctatgtttcagtttaaccaagaaacagtcagctggtctaaaatttccatctctatctaatacagcatctaacttgatgtcaggaactatgaccggtttaatgttatatgtaacattgagtaaatccttaagttcataatcatcactgtcatcagttatgtacgatccaaacaatgtttctaccggcatagtggatacgaagatgctatccatcagaatgtttccctgattagtattttctatatagctattcttctttaaacgattttccaaatcagtaactatgttcatttttttaggagtaggacgcctagccagtatggaagaggattttctagatcctctcttcaacatctttgatctcgatggaatgcaaaaccccatagtgaaacaaccaacgataaaaataatattgtttttcactttttataattttaccatctgactcatggattcattaatatctttataagagctactaacgtataattctttataactgaactgagatatatacaccggatctatggtttccataattgagtaaatgaatgctcggcaataactaatggcaaatgtatagaacaacgaaattatactagagttgttaaagttaatattttctatgagctgttccaataaattatttgttgtgactgcgttcaagtcataaatcatcttgatactatccagtaaaccgtttttaagttctggaatattatcatcccattgtaaagcccctaattcgactatcgaatatcctgctctgatagcagtttcaatatcgacggacgtcaatactgtaataaaggtggtagtattgtcatcatcgtgataaactacgggaatatggtcgttagtaggtacggtaactttacacaacgcgatatataactttccttttgtaccatttttaacgtagttgggacgtcctgcagggtattgttttgaagaaatgatatcgagaacagatttgatacgatatttgttggattcctgattattcactataatataatctagacagatagatgattcgataaatagagaaggtatatcgttggtaggataatacatccccattccagtattctcggatactctattgatgacactagttaagaacatgtcttctattctagaaaacgaaaacatcctacatggactcattaaaacttctaacgctcctgattgtgtctcgaatgcctcgtacaaggatttcaaggatgccatagattctttgaccaacgatttagaattgcgtttagcatctgatttttttattaaatcgaatggtcggctctctggtttgctaccccaatgataacaatagtcttgtaaagataaaccgcaagaaaatttatacgcatccatccaaataaccctagcaccatcggatgatattaatgtattattatagattttccatccacaattattgggccagtatactgttagcaacggtatatcgaatagattactcatgtaacctactagaatgatagttcgtgtactagtcataatatctttaatccaatctaaaaaatttaaaattagattttttacactgttaaagttaacaaaagtattacccgggtacgtggatatcatatatggcattggtccattatcagtaatagctccataaactgatacggcgatggtttttatatgtgtttgatctaacgaggaagaaattcgcgcccacaattcatctctagatatgtatttaatatcaaacggtaacacatcaatttcgggacgcgtatatgtttctaaatttttaatccaaatataatgatgacctatatgccctattatcatactgtcaactatagtacacctagggaacttacgatacatctgtttcctataatcgttaaattttacaaatctataacatgctaaaccttttgacgacagccattcattaatttctgatatggaatctgtattctcgataccgtatcgttctaaagccagtgctatatctccctgttcgtgggaacgctttcgtataatatcgatcaacggataatctgaagtttttggagaataatatgactcatgatctatttcgtccataaacaatctagacataggaattggaggcgatgatcttaattttgtgcaatgagtcgtcaatcctataacttctaatcttgtaatattcatcatcgacataatactatctatgttatcatcgtatattagtataccatgaccttcttcatttcgtgccaaaatgatatacagtcttaaatagttacgcaatatctcaatagtttcataattgttagctgttttcatcaaggtttgtatcctgtttaacatgatggcgttctataacgtctctattttctatttttaattttttaaatttttaacgatttactgtggctagatacccaatctctctcaaatatttttttagcctcgcttacaagctgtttatctatactattaaaactgacgaatccgtgattttggtaatgggttccgtcgaaatttgccgaagtgatatgaacatattcgtcgtcgactatcaacaattttgtattattctgaatagtgaaaaccttcacagatagatcattttgaacacacaacgcatctagacttttggcggttgccatagaatatacgtcgttcttatcccaattaccaactagaagtctgatcttaactcctctattaatggctgcttctataatggagttgtaaatgtcgggccaatagtagctattaccgtcgacacgtgtagtgggaactatggccaaatgttcaatatctatactagtcttagctgacctgagtttatcaataactacatcggtatctagatctctagaatatcccaataggtgttccggagaatcagtaaagaacactccacctataggattcttaatatgatacgcagtgctaactggcaaacaacaagccgcagagcataaattcaaccatgaattttttgcgctattaaaggctttaaaagtatcaaatcttctacgaagatctgtggccagcgggggataatcagaatatacacctaacgttttaatcgtatgtatagatcctccagtaaatgacgcgtttcctacataacatctttcatcatctgacacccaaaaacaaccgagtagtagtcccacattattttttttatctatattaacggttataaaatttatatccgggcagtgactttgtagctctcccagatttcttttccctcgttcatctagcaaaactattattttaatccctttttcagatgcctcttttagtttatcaaaaataagcgctcccctagtcgtactcagaggattacaacaaaaagatgctatgtatatatatttcttagctagagtgataatttcgttaaaacattcaaatgttgttaaatgatcggatctaaaatccatattttctggtagtgtttctaccagcctacattttgctcccgcaggtaccgatgcaaatggccacatttagttaacataaaaacttatacatcctgttctatcaacgattctagaatatcatcggctatatcgctaaaattttcatcaaagtcgacatcacaacctaactcagtcaatatattaagaagttccatgatgtcatcttcgtctatttctatatccgtatccattgtagattgttgaccgattatcgagtttaaatcattactaatactcaatccttcagaatacaatctgtgtttcattgtaaatttataggcggtgtatttaagttggtagattttcaattatgtattaatatagcaacagtagttcttgctcctccttgattctagcatcctcttcattattttcttctacgtacataaacatgtccaatacgttagacaacacaccgacgatggcggccgcagatctcgagttatgatctacttccttaccgtgcaataaattagaatatattttctacttttacgagaaattaattattgtatttattatttatgggtgaaaaacttactataaaaagcgggtgggtttggaattagtgaaagcttaaaaattgaaattttattttttttttttggaatataaataagctcgaagtcgacagatctaggcctggtaccaggaggaggaattcagcttaaagatgacttcgaaagtttatgatccagaacaaaggaaacggatgataactggtccgcagtggtgggccagatgtaaacaaatgaatgttcttgattcatttattaattattatgattcagaaaaacatgcagaaaatgctgttatttttttacatggtaacgcggcctcttcttatttatggcgacatgttgtgccacatattgagccagtagcgcggtgtattataccagatcttattggtatgggcaaatcaggcaaatctggtaatggttcttataggttacttgatcattacaaatatcttactgcatggtttgaacttcttaatttaccaaagaagatcatttttgtcggccatgattggggtgcttgtttggcatttcattatagctatgagcatcaagataagatcaaagcaatagttcacgctgaaagtgtagtagatgtgattgaatcatgggatgaatggcctgatattgaagaagatattgcgttgatcaaatctgaagaaggagaaaaaatggttttggagaataacttcttcgtggaaaccatgttgccatcaaaaatcatgagaaagttagaaccagaagaatttgcagcatatcttgaaccattcaaagagaaaggtgaagttcgtcgtccaacattatcatggcctcgtgaaatcccgttagtaaaaggtggtaaacctgacgttgtacaaattgttaggaattataatgcttatctacgtgcaagtgatgatttaccaaaaatgtttattgaatcggatccaggattcttttccaatgctattgttgaaggcgccaagaagtttcctaatactgaatttgtcaaagtaaaaggtcttcatttttcgcaagaagatgcacctgatgaaatgggaaaatatatcaaatcgttcgttgagcgagttctcaaaaatgaacaagcggccgccgccaccatgagcaagggcgaggaactgttcactggcgtggtcccaattctcgtggaactggatggcgatgtgaatgggcacaaattttctgtcagcggagagggtgaaggtgatgccacatacggaaagctcaccctgaaattcatctgcaccactggaaagctccctgtgccatggccaacactggtcactaccttcacctatggcgtgcagtgcttttccagatacccagaccatatgaagcagcatgactttttcaagagcgccatgcccgagggctatgtgcaggagagaaccatctttttcaaagatgacgggaactacaagacccgcgctgaagtcaagttcgaaggtgacaccctggtgaatagaatcgagctgaagggcattgactttaaggaggatggaaacattctcggccacaagctggaatacaactataactcccacaatgtgtacatcatggccgacaagcaaaagaatggcatcaaggtcaacttcaagatcagacacaacattgaggatggatccgtgcagctggccgaccattatcaacagaacactccaatcggcgacggccctgtgctcctcccagacaaccattacctgtccacccagtctgccctgtctaaagatcccaacgaaaagagagaccacatggtcctgctggagtttgtgaccgctgctgggatcacacatggcatggacgagctgtacaagtgagcggccgccctgctagcaagcttgctagcggccgctcgagatctgcggccgctacagacacgaatatgactaaaccgatgaccatttaaaaacccctctctagctttcacttaaactgtatcgatcattcttttagcacatgtataatataaaaacattattctatttcgaatttaggcttccaaaaatttttcatccgtaaaccgataataatatatatagacttgttaatagtcggaataaatagattaatgcttaaactatcatcatctccacgattagagatacaatatttacattctttttgctgtttcgaaactttatcaatacacgttaatacaaacccaggaaggagatattgaaactgaggctgttgaaaatgaaacggtgaatacaataattcagataatgtaaaatcatgattccgtattctgatgatattagaactgctaatggatgtcgatggtatgtatctaggagtatctattttaacaaagcatcgatttgctaatatacaattatccttttgattaattgttattttattcatattcttaaaaggtttcatatttatcaattcttctacattaaaaatttccatttttaatttatgtagccccgcaatactcctcattacgtttcattttttgtctataatatccattttgttcatctcggtacatagattatccaattgagaagcgcatttagtagttttgtacattttaagtttattgacgaatcgtcgaaaactagttatagttaacattttattatttgataccctgatattaatacccctgccgttactattatttataactgatgtaatccacgtaacattggaattaactatcgatagtaatgcatcgacgcttccaaaattgtctattataaactcaccgataatttttttattgcatgttttcatattcattaggattatcaaatctttaatcttattacgattgtatgcgttgatattacaagacgtcattctaaaagacggaggatctccatcaaatgccagacaatcacgtacaaagtacatggaaataggttttgttctattgcgcatcatagatttatatagaacacccgtagaaatactaatttgttttactctataaaatactaatgcatctatttcatcgttttgtataacgtctttccaagtgtcaaattccaaatttttttcattgatagtaccaaattcttctatctctttaactacttgcatagataggtaattacagtgatgcctacatgccgttttttgaaactgaatagatgcgtctagaagcgatgctacgctagtcacaatcaccactttcatatttagaatatatatatgtaaaaatatagtagaatttcattttgtttttttctatgctataaatgaattctcattttgcatctgctcatactccgttttatattaataccaaagaaggaagatatctggttctaaaagccgttaaagtatgcgatgttagaactgtagaatgcgaaggaagtaaagcttcctgcgtactcaaagtagataaaccctcatcgcccgcgtgtgagagaagaccttcgtccccgtccagatgcgagagaatgaataaccctggaaaacaagttccgtttatgaggacggacatgctacaaaatatgttcgcggctaatcgcgataatgtagcttctagacttttgtcctaaaatactattatatccttttcgatattaataaatccgtgtcgtccaggttttttatctctttcagtatgtgaatagataggtattttatctctattcatcatcgaatttaagagatccgataaacattgtttgtattctccagatgtcagcatctgatacaacaatatatgtgcacataaacctctggcacttatttcatgtaccttccccttatcactaaggagaatagtatttgagaaatatgtatacatgatattatcatgaattagatatacagaatttgtaacactctcgaaatcacacgatgtgtcggcgttaagatctaatatatcactcgataacacattttcatctagatacactagacattttttaaagctaaaatagtctttagtagtaacagtaactatgcgattattttcatcgatgatacatttcatcggcatattattacgcttaccatcaaagactataccatgtgtatatctaacgtattctagcatggttgccatacgcgcattaaacttttcaggatctttggatagatcttccaatctatctatttgagaaaacatttttatcatgttcaatagttgaaacgtcggatccactatatagatattatctataaagattttaggaactacgttcatggtatcctggcgaatattaaaactatcaatgatatgattatcgttttcatcttttatcaccatatagtttctaagatatgggattttacttaatataatattatttcccgtgataaattttattagaaaggccaaatctataagaaaagtcctagaattagtctgaagaatatctatatcgccgtatagtatatttggattaattagatatagagaatatgatccgtaacatatacaacttttattatggcgtctaagatattcttccatcaacttattaacatttttgactagggaagatacattatgacgtcccattacttttgccttgtctattactgcgacgttcatagaatttagcatatctcttgccaattcttccattgatgttacattataagaaattttagatgaaattacatttggagctttaatagtaagaactcctaatatgtccgtgtatgtggtcactaatacagattgtagttctataatcgtaaataatttacctatattatatgtttgagtctgtttagaaaagtagctaagtatacgatcttttatttctgatgcagatgtattaacatcggaaaaaaatctttttttattcttttttactaaagatacaaatatgtctttgttaaaaacagttattttctgaatatttctagcttgtaattttaacatatgatattcgttcacactaggtactctgcctaaataggtttctataatctttaatgtaatattaggaaaagtattctgatcaggattcctattcattttgaggatttaaaactctgattattgtctaatatggtctctacgcaaactttttcacagagcgatagagtttttgataactcgtttttcttaagaaatataaaactactgtctccagagctcgctctatcttttattttatctaattcgatacaaactcctgatactggttcagaaagtaattcattaattttcagtcctttatagaagatatttaatatagataatacaaaatcttcagtttttgatatcgatctgattgatcctagaactagatatattaataacgtgctcattaggcagtttatggcagcttgataattagatatagtatattccagttcatatttattagataccgcattgcccagattttgatattctatgaattcctctgaaaataaatccaaaataactagacattctattttttgtggattagtgtactctcttccctctatcatgttcactactggtgtccacgatgataaatatctagagggaatataatatagtccataggatgccaatctagcaatgtcgaataactgtaattttattcttcgctcttcattatgaattgattcttgaggtataaacctaacacaaattatattattagacttttcgtatgtaatgtctttcatgttataagtttttaatcctggaatagaatctattttaatgaggcttttaaacgcagagttctccaacgagtcaaagcataatactctgttgtttttcttatatacgatgttacgattttcttctttgaatggaataggtttttgaattagtttataattacaacataatagataaggaagtgtgcaaatagtacgcggaaaaaacataatagctcccctgttttcatccatggttttaagtaaatgatcactggcttctttagtcaatggatattcgaacattaaccgtttcatcatcattggacagaatccatatttcttaatgtaaagagtgatcaaatcattgtgtttattgtaccatcttgttgtaaatgtgtattcggttatcggatctgctcctttttctattaaagtatcgatgtcaatctcgtctaagaattcaactatatcgacatatttcatttgtatacacataaccattactaacgtagaatgtataggaagagatgtaacgggaacagggtttgttgattcgcaaactattctaatacataattcttctgttaatacgtcttgcacgtaatctattatagatgccaagatatctatataattattttgtaagatgatgttaactatgtgatctatataagtagtgtaataattcatgtattttgatatatgttccaactctgtctttgtgatgtctagtttcgtaatatctatagcatcctcaaaaaatatattcgcatatattcccaagtcttcagttctatcttctaaaaaatcttcaacgtatggaatataataatctattttacctcttctgatatcattaatgatatagtttttgacactatcttctgtcaattgattcttattcactatatctaagaaacggatagcgtccctaggacgaactactgccattaatatctctattatagcttctggacataattcatctattataccagaattaatgggaactattccgtatctatctaacatagttttaagaaagtcagaatctaagacttgatgttcatatattggttcatacatgaaatgatctctattgatgatagtgactatttcattctctgaaaattggtaactcattctatatatgctttccttgttgatgaaggatagaatatactcaatagaatttgtaccaacaaactgttctcttatgaatcgtatatcatcatctgaaataatcatgtaaggcatacatttaacaattagagacttgtctcctgttatcaatatactattcttgtgataatttatgtgtgaggcaaatttgtccacgttctttaattttgttatagtagatatcaaatccaatggagctacagttcttggcttaaacagatatagtttttctggaacaaattctacaacattattataaaggactttgggtagataagtgggatgaaatcctattttaattaatgcgatagccttgtcctcgtgcagatatccaaacgcttttgtgatagtatggcattcattgtctagaaacgctctacgaatatctgtgacagatatcatctttagagaatatactagtcgcgttaatagtactacaatttgtattttttaatctatctcaataaaaaaattaatatgtatgattcaatgtataactaaactactaactgttattgataactagaatcagaatctaatgatgacgtaaccaagaagtttatctactgccaatttagctgcattatttttagcatctcgtttagattttccatcggccttatcgaatactcttccgtcgatgtctacacaggcataaaatgtaggagagttactaggcccaactgattcaatacgaaaagaccaatctctcctagtaatttggcagtactcattaataacggtgacagggttagcatctttccaatcaataatttttttagccggaataacatcatcaaaagacttatgatcctctctcattgatttttcgcgggatacatcatctattatgacgtcagccatagcatcagcatccggcttatccgcctccgttgtcataaaccaacgaggaggaatatcgtcggagctgtacaccatagcactacgttgaagatcgtacagagctttattaacttctcgcttctccatattaagttgtctagttagttgtgcagcagtagctccttcgattccaatgtttttaatagccgcacacacaatctctgcgtcagaacgctcgtcaatatagatcttagacatttttagagagaactaacgcaaccagcaataaaactgaacctactttatcatttttttattcatcatcctctggtggttcgtcgttcctatcaaatgtagctctgattaacccgtcatctataggtgatgctggttctggagattctggaggagatggattattatctggaagaatctctgttatttccttgttttcatgtatcgattgcgttgtaacattaagattgcgaaatgctctaaatttgggaggcttaaagtgttgtttgcaatctctacacgcgtgtctaactagtggaggttcgtcagctgctctagtttgaatcatcatcggcgtagtattcctacttttacagttaggacacggtgtattgtatttctcgtcgagaacgttaaaataatcgttgtaactcacatcctttattttatctatattgtattctactcctttcttaatgcattttataccgaataagagatagcgaaggaattctttttcggtgccgctagtacccttaatcatatcacatagtgttttatattccaaatttgtggcaatagacggtttatttctatacgatagtttgtttctggaatcctttgagtattctataccaatattattctttgattcgaatttagtttcttcgatattagattttgtattacctatattcttgatgtagtactttgatgatttttccatggcccattctattaagtcttccaagttggcatcatccacatattgtgatagtaattctcggatatcagtagcggctaccgccattgatgtttgttcattggatgagtaactactaatgtatacattttccatttataacacttatgtattaactttgttcatttatattttttcattattatgttgatattaacaaaagtgaatatatatatgttaataattgtattgtggttatacggctacaattttataatgagtgaaagtcagtgtccgatgatcaatgacgatagctttactctgaaaagaaagtatcaaatcgatagtgcggagtcaacaataaaaatggataagaagaggataaagtttcagaatagagccaaaatggtaaaagaaataaatcagacaataagagcagcacaaactcattacgagacattgaaactaggatacataaaatttaagagaatgattatgactactactctagaagatatagcaccatctattccaaataatcagaaaacttataaactattctcggacatttcagccatcggcaaagcatcacagaatccgagtaagatggtatatgctctgctgctttacatgtttcccaatttgtttggagatgatcatagattcattcgttatagaatgcatccaatgagtaaaatcaaacacaagatcttctctcctttcaaacttaatcttattagaatattagtggaagaaagattctataataatgaatgcagatctaataaatggagaataattggaacacaagttgataaaatgttgatagctgaatctgataaatatacaatagatgcaaggtataacctaaaacccatgtatagaatcaagggagaatctgaagaagataccctctttatcaaacagatggtagaacaatgtgtgacatcccaggaattggtggaaaaagtgttgaagatactgtttagagatttgttcaagagtggagaatacaaagcgtacagatacgatgatgatgtagaaaatggatttattggattggatacactaaaattaaacattgttcatgatatagttgaaccatgtatgcctgttcgtaggccagtggctaagatactgtgtaaagaaatggtaaataaatactttgagaatccgctacatattattggtaaaaatcttcaagagtgcattgactttgttagtgaataggcatttcatctttctccaatactaattcaaattgttaaattaataatggatagtataaatagttattagttataagatagtaaaaataattattagaataagagtgtagtatcatagataactctcttctataaaaatggattttattcgtagaaagtatcttatatacacagtagaaaataatatagattttttaaaggatgatacattaagtaaagtaaacaattttaccctcaatcatgtactagctctcaagtatctagttagcaattttcctcaacacgttattactaaggatgtattagctaataccaatttttttgttttcatacatatggtacgatgttgtaaagtgtacgaagcggttttacgacacgcatttgatgcacccacgttgtacgttaaagcattgactaagaattatttatcgtttagtaacgcaatacaatcgtacaaggaaaccgtgcataaactaacacaagatgaaaaatttttagaggttgccgaatacatggacgaattaggagaacttataggcgtaaattatgacttagttcttaatccattatttcacggaggggaacccatcaaagatatggaaatcatttttttaaaactgtttaagaaaacagacttcaaagttgttaaaaaattaagtgttataagattacttatttgggcatacctaagcaagaaagatacaggcatagagtttgcggataatgatagacaaaatatatacactctatttcaacaaactggtagaatcgtccatagcaatctaacagaaacgtttagagattatatctttcccggagataagactagctattgggtgtggttaaacgaaagtatagctaatgatgcggatatcgttcttaatagacacgccattaccatgtatgataaaattcttagttatatatactctgagataaaacaaggacgcgttaataaaaacatgcttaagttagtttatatctttgagcctgaaaaagatatcagagaacttctgctagaaatcatatatgatattcctggagatatcctatctattattgatgcaaaaaacgacgattggaaaaaatattttattagtttttataaagctaattttattaacggtaatacatttattagtgatagaacgtttaacgaggacttattcagagttgttgttcaaatagatcccgaatatttcgataatgaacgaattatgtctttattctctacgagtgctgcggacattaaacgatttgatgagttagatattaataacagttatatatctaatataatttatgaggtgaacgatatcacattagatacaatggatgatatgaagaagtgtcaaatctttaacgaggatacgtcgtattatgttaaggaatacaatacatacctgtttttgcacgagtcggatcccatggtcatagagaacggaatactaaagaaactgtcatctataaaatccaagagtagacggctgaacttgtttagcaaaaacattttaaaatattatttagacggacaattggctcgtctaggtcttgtgttagatgattataaaggagacttgttagttaaaatgataaaccatcttaagtctgtggaggatgtatccgcattcgttcgattttctacagataaaaaccctagtattcttccatcgctaatcaaaactattttagctagttataatatttccatcatcgtcttatttcaaaggtttttgagagataatctatatcatgtagaagaattcttggataaaagcatccatctaaccaagacggataagaaatatatacttcaattgataagacacggtagatcatagaacagaccaaatatattattaataatttgtatatacatagatataattatcacacatttttgataaatgggaactgctgcaacaattcagactcccaccaaattaatgaataaagaaaatgcagaaatgattttggaaaaaattgttgatcatatagttatgtatattagtgacgaatcaagtgattcagaaaataatcctgaatatattgattttcgtaacagatacgaagactatagatctctcattataaaaagtgatcacgagtttgtaaagctatgtaaaaatcatgcggagaaaagttctccagaaacgcaacaaatgattatcaaacacatatacgaacaatatcttattccagtatctgaagtactattaaaacctataatgtccatgggtgacataattacatataacggatgtaaagacaatgaatggatgctagaacaactctctaccctaaactttaacaatctccgcacatggaactcatgtagcataggcaatgtaacgcgtctgttttatacattttttagttatctgatgaaagataaactaaatatataagtataatcccattctaatactttaacctgatgtattagcatcttattagaatattaacctaactaaaagacataacataaaaactcattacatagttgataaaaagcggtaggatataaatattatggctgccaccgttccgcgttttgacgacgtgtacaaaaatgcacaaagaagaattctagatcaagaaacattttttagtagaggtctaagtagaccgttaatgaaaaacacatatctatttgataattacgcgtatggatggataccagaaactgcaatttggagtagtagatacgcaaacctagatgctagtgactattatcccatttcgttgggattacttaaaaagttcgagtttctcatgtctctatataaaggtcctattcccgtatatgaagaaaaagtaaatactgaattcatagccaatggatcgttctctggtagatacgtatcatatcttcgaaagttttctgcccttccaacaaacgagtttattagttttttgttactgacttccattccaatctataatatcttgttctggtttaaaaacacacagtttgatattactaaacacacattattcagatacgtctatacagataatgccaaacacctggcgttggctaggtatatgcatcaaacaggagactataagcctttgtttagtcgtctcaaagagaattatatatttaccggtcccgttccaataagtatcaaagatatagatcaccctaatcttagtagagcaagaagtccatccgattatgagacattagctaatattagtactatattgtactttaccaagtatgatccggtattaatgtttttattgttttacgtacctgggtattcaattactacaaaaattactccagccgtagaatatctaatggataaactgaatctaacaaagagcgacgtacaactgttgtaaattattttatgcttcgtaaaatgtaggttttgaaccaaacattctttcaaagaatgagatgcataaaactttattatccaatagattgactatttcggacgtcaatcgtttaaagtaaacttcgtaaaatattctttgatcactgccgagtttaaaacttctatcgataattgtctcatatgttttaatatttacaagttttttggtccatggtacattagccggacaaatatatgcaaaataatatcgttctccaagttctatagtttctggattatttttattatattcagtaactaaatacatattagggttatctgcggatttataatttgagtgatgcattctactcaacataaataattctagaggagacgatctactatcaaattcggatcgtaaatctgtttctaaagaacggagaatatctatacatacctgattagaattcatccgtccttcagacaacatctcagacagtctggttttgtacatcttaatcatattcttatgaaacttggaaacatctcttctagtttcactagtacctttattaattctctcaggtacagattttgaattcgacgatgctgagtatttcatcgttgtatatttcttcttcgattgcataatcagattcttatataccgcctcaaactctattttaaaattattaaacaatactctattattaatcagtcgttctaactctttcgctatttctatagacttatctacatcttgactgtctatctctgtaaacacggagtcggtatctccatacacgctacgaaaacgaaatctgtaatctataggcaacgatgttttcacaatcggattaatatctctatcgtccatataaaatggattacttaatggattggcaaaccgtaacataccgttagataactctgctccatttagtaccgattctagatacaagatcattctacgtcctatggatgtgcaactcttagccgaagcgtatgagtatagagcactatttctaaatcccatcagaccatatactgagttggctactatcttgtacgtatattgcatggaatcatagatggccttttcagttgaactggtagcctgttttagcatctttttatatctggctctctctgccaaaaatgttcttaatagtctaggaatggttccttctatcgatctatcgaaaattgctatttcagagatgaggttcggtagtctaggttcacaatgaaccgtaatatatctaggaggtggatatttctgaagcaatagctgattatttatttcttcttccaatctattggtactaacaacgacaccgactaatgtttccggagatagatttccaaagatacacacattaggatacagactgttataatcaaagattaatacattattactaaacattttttgttttggagcaaataccttaccgccttcataaggaaacttttgttttgtttctgatctaactaagatagttttagtttccaacaatagctttaacagtggacccttgatgactgtactcgctctatattcgaataccatggattgaggaagcacatatgttgacgcacccgcgtctgtttttgtttctactccataatactcccacaaatactgacacaaacaagcatcatgaatacagtatctagccatatctaaagctatgtttagattataatccttatacatctgagctaaatcaacgtcatcctttccgaaagataatttatatgtatcattaggtaaagtaggacataatagtacgactttaaatccattttcccaaatatctttacgaattactttacatataatatcctcatcaacagtcacataattacctgtggttaaaacctttgcaaatgcagcggctttgcctttcgcgtctgtagtatcgtcaccgatgaacgtcatttctctaactcctctatttaatactttacccatgcaactgaacgcgttcttggatatagaatccaatttgtacgaatccaatttttcaaatttttgaatgaatgaatatagatcgaaaaatatagttccattattgttattaacgtgaaacgtagtattggccatgccgcctactcccttatgactagactgatttctctcataaatacagagatgtacagcttcctttttgtccggagatctaaagataattttctctcctgttaataactctagacgattagtaatatatctcagatcaaagttatgtccgttaaaggtaacgacgtagtcgaacgttagttccaacaattgtttagctattcgtaacaaaactatttcagaacatagaactagttctcgttcgtaatccatttccattagtgactgtatcctcaaacatcctctatcgacggcttcttgtatttcctgttccgttaacatctcttcattaatgagcgtaaacaataatcgtttaccacttaaatcgatataacagtaacttgtatgcgagattgggttaataaatacagaaggaaacttcttatcgaagtgacactctatatctagaaataagtacgatcttgggatatcgaatctaggtatttttttagcgaaacagttacgtggatcgtcacaatgataacatccattgttaatctttgtcaaatattgctcgtccaacgagtaacatccgtctggagatatcccgttagaaatataaaaccaactaatattgagaaattcatccatggtggcattttgtatgctgcgtttctttggctcttctatcaaccacatatctgcgacggagcattttctatctttaatatctagattataacttattgtctcgtcaatgtctatagttctcatctttcccaacggcctcgcattaaatggaggaggagacaatgactgatatatttcgtccgtcactacgtaataaaagtaatgaggaaatcgtataaatacggtctcgccatttcgacatctggatttcagatataaaaatctgttttcaccgtgactttcaaaccaattaatgcaccgaacatccatttatagaatttagaaatatattttcatttaaatgaatcccaaacattggggaagagccgtatggaccattatttttatagtactttcgcaagcgggtttagacggcaacatagaagcgtgtaaacgaaaactatatactatagttagcactcttccatgtcctgcatgtagacggcacgcgactatcgctatagaggacaataatgtcatgtctagcgatgatctgaattatatttattattttttcatcagattatttaacaatttggcatctgatcccaaatacgcgatcgatgtgacaaaggttaaccctttataaacttaacccattataaaacttatgattagtcacaactgaaataaccgcgtgattattttttggtataattctacacggcatggtttctgtgactatgaattcaacccccgttacattagtgaaatctttaacaaacagcaagggttcgtcaaagacataaaactcattgtttacaatcgaaatagaccccctatcacacttaaaataaaaaatatccttatcctttaccaccaaataaaattctgattggtcaatgtgaatgtattcacttaacagttccacaaatttatttattaactccgaggcacatacatcgtcggtattttttatggcaaactttactcttccagcatccgtttctaaaaaaatattaacgagttccatttatatcatccaatattattgaaatgacgttgatggacagatgatacaaataagaaggtacggtacctttgtccaccatctcctccaattcatgctctattttgtcattaactttaatgtatgaaaacagtacgccacatgcttccatgacagtgtgtaacactttggatacaaaatgtttgacattagtataattgtccaagactgtcaatctataatagatagtagctataatatattctatgatggtattgaagaagatgacaaccttggcatattgatcatttaacacagacatggtatcaacagatagcttgaatgaaagagaatcagtaattggaataagcgtcttctcgatagagtgtccgtataccaacatgtctgatattttgatgtattccattaaattatttagttttttctttttattctcgttaaacagcatttctgtcaacggaccccaacatcgttgaccgattaagttttgattgatttttccgtgtaaggcgtatctagtcagatcgtatagcctatccaataatccatcgtctgtgtgtagatcacatcgtacactttttaattctctatagaagagcgacagacatctggagcaattacagacagcaatttctttattctctacagatgtaagatacttgaagacattcctatgatgatgcagaattttggataacacggtattgatggtatctgttaccataattcctttgatggctgatagtgtcagagcacaagatttccaatctttgacaatttttagcaccattatctttgttttgatatctatatcagacagcatggtgcgtctgacaacacagggattaagacggaaagatgaaatgattctctcaacatcttcaatagataccttgctattttttctggcattatctatatgtgcgagaatatcctctagagaatcagtatcctttttgatgatagtggatctcaatgacatgggacgtttaaaccttcttattctatcaccagattgcatggtgatttgtcttctttcttttatcataatgtaatctctaaattcatcggcaaattgtctatatctaaaatcataatatgagatgtttacctctacaaatatctgttcgtccaatgttagagtatttacatcagttttgtattccaaattaaacatggcaacggatttaattttatattcctctattaagtcctcgtcgataataacagaatgtagataatcatttaatccgtcgtacatggttggaagatgcttgttgacaaaatctttaattgtcttgatgaaggtgggactatatctaacatcttgattaataaaatttataacattgtccataggatactttgtaactagttttatacacatctcttcatcggtaagtttagacagaatatcgtgaacaggtggtatattatattcatcagatatacgaagaacaatgtccaaatctatattgtttaatatattatatagatgtagcgtagctcctacaggaatatctttaactaagtcaatgatttcatcaaccgttagatctattttaaagttaatcatataggcattgatttttaaaaggtatgtagccttgactacattctcattaattaaccattccaagtcattgtgtgtaagaagattatattctatcataagcttgactacatttggtcccgataccattaaagaattcttatgatataaggaaacagattttaggtactcatctactctacaagaattttggagagccttaacgatatcagtgacgtttattatttcaggaggaaagaatctaacattgagaatatcggaattaatagcttccagatacagtgattttggcaatagtccgtgtaatccataatccagtaacacgagctggtgcttgctagacaccttttcaatgtttaatttttttgaaataagctttgataaagccttcctcgcaaattccggatacatgaacatgtcggcgacatgattaagtattgttttttcattatttttatattttctcaacaagttctcaataccccaatagatgatagaatatcacccaatgcgtccatgttgtctatttccaacaggtcgctatatccaccaatagaagtttttccaaaaaagattctaggaacagttctaccaccagtaatttgttcaaaataatcccgcaattcattttcgggtttaaattctttaatatcgacaatttcatacgctcctcttttgaaactaaacttatttagaatatccagtgcatttctacaaaaaggacatgtatacttgacaaaaattgtcactttgttattggccaacctttgttgtacaaattcctcggccattttaatatttaagtgatataaaactatctcgacttatttaactctttagtcgagatatatggacgcagatagctatatgatagccaactacagaaggcaaacgctataaaaaacataattacgacgagcatatttataaatatttttattcagcattacttgatatagtaatattaggcacagtcaaacattcaaccactctcgatacattaactctctcattttctttaacaaattctgcaatatcttcgtaaaaagattcttgaaactttttagaatatctatcgactctagatgaaatagcgttcgtcaacatactatgttttgtatacataaaggcgcccattttaacagtttctagtgacaaaatgctagcgatcctaggatcctttagaatcacatagattgacgattcgtctctcttagtaactctagtaaaataatcatacaatctagtacgcgaaataatattatccttgacttgaggagatctaaacaatctagttttgagaacatcgataagttcatcgggaatgacatacatactatctttaatagaactcttttcatccagttgaatggattcgtccttaaccaactgattaatgagatcttctattttatcattttccagatgatatgtatgtccattaaagttaaattgtgtagcgcttctttttagtctagcagccaatactttaacatcactaatatcgatatacaaaggagatgatttatctatggcattaagaattcgtttttcgacatccgtcaaaaccaattcctttttgcctgtatcatccagttttccatcctttgtaaagaaattattttctactagactattaataagactgataaggattcctccataattgcacaatccaaactttttaacaaaactagactttacgagatctacaggaatgcgtacttcaggttttttagcttgtgattttttcttttgcggacattttctagtaaccaactcatctaccatttcattgattttagcagtgaaataagctttcaatgcacgggcactgatactattgaaaacgagttgatcttcaaattccgccatttaagttcaccaaacaacttttaaatacaaatatatcaatagtagtagaataagaactataaaaaaaataataattaaccaaccccaacaaccggtattattagttgatgtggtagttttctcatcacttagaacagatttaacaatttctataaagtctgtcaaatcatcttccggagaccccataaatacaccaaatatagcggcgtacaacttatccatttatacattgaatattggcttttctttatcgctatcttcatcatattcatcatcaatatcaacaagtcccagattacgagccagatcttcttctacattttcagtcattgatacacgttcactatctccagagagtccgataacgttagccaccacttctctatcaatgattagtttcttgagcgcgaaagtaatttttgtttccgttccggatctatagaagacgataggtgtgataattgccttggccaattgtctttctcttttactgagtgattctagttcaccttctatagatctgagaatggatgattctccagtcgaaacatattctaccatggatccgtttaatttgttgatgaagatggattcatccttaaatgttttctctgtaatagtttccaccgaaagactatgcaaagaatttggaatgcgttccttgtgcttaatgtttccatagacggcttctagaagttgatacaacataggactagccgcggtaacttttatttttagaaagtatccatcgcttctatcttgtttagatttatttttataaagtttagtctctccttccaacataataaaagtggaagtcatttgactagataaactatcagtaagttttatagagatagacgaacaattagcgtattgagaagcatttagtgtaacgtattcgatacattttgcattagatttactaatcgattttgcatactctataacacccgcacaagtctgtagagaatcgctagatgcagtaggtcttggtgaagtttcaactctcttcttgattaccttactcatgattaaacctaaataattgtactttgtaatataatgatatatattttcactttatctcatttgagaataaaaatgtttttgtttaaccactgcatgatgtacagatttcggaatcgcaaaccaccagtggttttattttatccttgtccaatgtgaattgaatgggagcggatgcgggtttcgtacgtagatagtacattcccgtttttagaccgagactccatccgtaaaaatgcatactcgttagtttggaataactcggatctgctatatggatattcatagattgactttgatcgatgaaggctcccctgtctgcagccatttttatgatcgtcttttgtggaatttcccaaatagttttataaactcgcttaatatcttctggaaggtttgtattctgaatggatccaccatctgccataatcctattcttgatctcatcattccataattttctctcggttaaaactctaaggagatgcggattaactacttgaaattctccagacaatactctccgagtgtaaatattactggtatacggttccaccgactcattatttcccaaaatttgagcagttgatgcagtcggcataggtgccaccaataaactatttctaagaccgtatgttctgattttatcttttagaggttcccaattccaaagatccgacggtacaacattccaaagatcatattgtagaataccgttactggcgtacgatcctacatatgtatcgtatggtccttccttctcagctagttcacaactcgcctctaatgcaccgtaataaatggtttcgaagatcttcttatttagatcttgtgcttccaggctatcaaatggataatttaagagaataaacgcgtccgctaatccttgaacaccaataccgataggtctatgtctcttattagagatttcagcttctggaataggataataattaatatctataattttattgagatttctgacaattactttgaccacatccttcagtttgagaaaatcaaatcgcccatctattacaaacatgttcaaggcaacagatgccagattacaaacggctacctcattagcatccgcatattgtattatctcagtgcaaagattactacacttgatagttcctaaattttgttgattactctttttgttacacgcatccttataaagaatgaatggagtaccagtttcaatctgagattctataatcgctttccagacgactcgagcctttattatagatttgtatctcctttctctttcgtatagtgtatacaatcgttcgaactcgtctccccaaacattgtccaatccaggacattcatccggacacatcaacgaccactctccgtcatccttcactcgtttcataaagagatcaggaatccaaagagctataaatagatctctggttctatgttcctcgtttcctgtattctttttaagatcgaggaacgccataatatcagaatgccacggttccaagtatatggccataactccaggccgtttgtttcctccctgatctatgtatctagcggtgttattataaactctcaacattggaataataccgtttgatataccattggtaccggagatatagcttccactggcacgaatattactaattgatagacctattccccctgccattttagagattaatgcgcatcgttttaacgtgtcatagataccctctatgctatcatcgatcatgttaagtagaaaacagctagacatttggtgacgactagttcccgcattaaataaggtaggagaagcgtgcgtaaaccatttttcagaaagtagattgtacgtctcaatagctgagtctatatcccattgatgaattcctactgcgacacgcattaacatgtgctgaggtctttcaacgatcttgttgtttattttcaacaagtaggatttttccaaagttttaaaaccaaaatagttgtatgaaaagtctcgttcgtaaataataaccgagttgagtttatccttatatttgttaactatatccatggtgatacttgaaataatcggagaatgtttcccatttttaggattaacatagttgaataaatcctccatcacttcactaaatagtttttttgtttccttgtgtagatttgatacggctattctggcggctagaatggcataatccggatgttgtgtagtacaagtggctgctatttcggctgccagagtgtccaattctaccgttgttactccattatatattccttgaataaccttcatagctattttaataggatctatatgatccgtgtttaagccataacataattttctaatacgagacgtgattttatcaaacatgacattttccttgtatccatttcgtttaatgacaaacatttttgttggtgtaataaaaaaattatttaacttttcattaatagggatttgacgtatgtagcgtacaaaatgattgttcctggtatatagataaagagtcctatatatttgaaaatcgttacggctcgattaaactttaatgattgcatagtgaatatatcattaggatttaactccttgactatcatggcggcgccagaaattaccatcaaaagcattaatacagttataccgatcgcagttagaacggttatagcatccaccatttatatctaaaaattagatcaaagaatatgtgacaaagtcctagttgtatactgagaattgacgaaacaatgtttcttacatatttttttcttattagtaaccgacttaatagtaggaactggaaaactagacttgattattctataagtatagatacccttccaaataatattctctttgataaaagttccagaaaatgtagaattttttaaaaagttatcttttgctattaccaagattgtgtttagacgcttattattaatatgagtgatgaaatccacaccgcctctagatatcgcctttatttccacattagatggtaaatccaatagtgaaactatctttttaggaatgtatggactcgcgtttagaggagtaaacgtcttaggcgtcggaaaggatgattcatcaaacgaataaacaatttcacaaatggatgttaatgtattagtaggaaattttttgacgctattggaattgaagattctaatggatgatgttctacctatttcatccgataacatgttaatttccgacaccaacggttttaatatttcgatgatatacggtagtctctctttcggacttatatagcttattccacaatacgagtcattatatactccaaaaaacaaaataactagtataaaatctgtatcgaatgggaaaaacgaaattatcgacataggtatagaatccggaacattgaacgtattaatacttaattctttttctgtggtaagtaccgataggttattgacattgtatggttttaaatattctataacttgagacttgatagatattagtgatgaattgaaaattatttttatcaccacgtgtgtttcaggatcatcgtcgacgcccgtcaaccaaccgaacggagtaaaataaatatcattaatatatgctctagatattagtatttttatcaatcctttgattatcatcttctcgtaggcgaatgattccatgatcaagagtgatttaagaacatcctccggagtattaatgggcttagtaaacagtccatcgttgcaataataaaagttatccaagttaaaggatattatgcattcgtttaaagatatcacctcatctgacggagacaattttttggtaggttttagagactttgaagctacttgtttaacaaagttattcatcgtcgtctactattctatttaattttgtagttaatttatcacatatcacattaattgactttttggtccacttttccatacgtttatattcttttaatcctgcgttatccgtttccgttatatccagggatagatcttgcaagttaaatagaatgctcttaaataatgtcattttcttatccgctaaaaatttaaagaatgtataaacctttttcagagatttgaaactcttaggtggtgtcctagtacacaatatcataaacaaactaataaacattccacattcagattccaacagctgattaacttccacattaatacagcctattttcgctccaaatgtacattcgaaaaatctgaataaaacatcgatgtcacaatttgtattatccaatacagaatgtttgtgattcgtgttaaaaccatcggagaaggaatagaaataaaaattattatagtggtggaattcagttggaatattgcctccggagtcataaaaggatactaaacattgttttttatcataaattacacatttccaatgagacaaataacaaaatccaaacattacaaatctagaggtagaacttttaattttgtctttaagtatatacgataagatatgtttattcataaacgcgtcaaatttttcatgaatcgctaaggagtttaagaatctcatgtcaaattgtcctatataatccacttcggatccataagcaaactgagagactaagttcttaatacttcgattgctcatccaggctcctctctcaggctctattttcatcttgacgacctttggattttcaccagtatgtattcctttacgtgataaatcatcgattttcaaatccatttgtgagaagtctatcgccttagatactttttcccgtagtcgaggtttaaaaaaatacgctaacggtatactagtaggtaactcaaagacatcatatatagaatggtaacgcgtctttaactcgtcggttaactctttcttttgatcgagttcgtcgctactattgggtctgctcaggtgccccgactctactagttccaacatcataccgataggaatacaagacactttgccggcggttgtagatttatcatatttttccactacatatccgttacaatttgttaaaaatttagatacatctatattgctacataatccagctagtgaatatatatgacataataaattggtaaatcctagttctggtattttactaattactaaatctgtatatctttccatttatcatggaaaagaatttaccagatatcttcttttttccaaactgcgttaatgtattctcttacaaatattcacaagatgaattcagtaatatgagtaaaacggaacgtgatagtttctcattggccgtgtttccagttataaaacatagatggcataacgcacacgttgtaaaacataaaggaatatacaaagttagtacagaagcacgtggaaaaaaagtatctcctccatcactaggaaaacccgcacacataaacctaaccgcgaagcaatatatatacagtgaacacacaataagctttgaatgttatagttttctaaaatgtataacaaatacagaaatcaattcgttcgatgagtatatattaagaggactattagaagctggtaatagtttacagatattttccaattccgtaggtaaacgaacagatactataggtgtactagggaataagtatccatttagcaaaattccattggcctcattaactcctaaagcacaacgagagatattttcagcgtggatttctcatagacctgtagttttaactggaggaactggagtgggtaagacgtcacaggtacccaagttattgctttggtttaattatttatttggtggattctctactctagataaaatcactgactttcacgaaagaccagtcattctatctcttcctaggatagctttagttagattgcatagcaataccattttaaaatcattgggatttaaggtactagatggatctcctatttctttacggtacggatctataccggaagaattaataaacaaacaaccaaaaaaatatggaattgtattttctacccataagttatctctaacaaaactatttagttatggcactcttattatagacgaagttcatgagcatgatcaaataggagatattattatagcagtagcgagaaagcatcatacgaaaatagattctatgtttttaatgactgccacgttagaggatgacagggaacggctaaaagtatttttacctaatcccgcatttatacatattcctggagatacactgtttaaaattagcgaggtatttattcataataagataaatccatcttccagaatggcatacatagaagaagaaaagagaaatttagttactgctatacagatgtatactcctcctgatggatcatccggtatagtctttgtggcatccgttgcacagtgtcacgaatataaatcatatttagaaaaaagattaccgtatgatatgtatattattcatggtaaggtcttagatatagacgaaatattagaaaaagtgtattcatcacctaatgtatcgataattatttctactccttatttggaatccagcgttactatacgcaatgttacacacatttatgatatgggtagagtttttgtccccgctccttttggaggatcgcaacaatttatttctaaatctatgagagatcaacgaaaaggaagagtaggaagagttaatcctggtacatacgtctatttctatgatctgtcttatatgaagtctatacagcgaatagattcagaatttctacataattatatattgtacgctaataagtttaatctaacactccccgaagatttgtttataatccctacaaatttggatattctatggcgtacaaaggaatatatagactcgttcgatattagtacagaaacatggaataaattattatccaattattatatgaagatgatagagtatgctaaactttatgtactaagtcctattctcgctgaggagttggataactttgagaggacgggagaattaactagtattgtacgagaagccattttatctctaaatttacaaattaagattttaaattttaaacataaagatgatgatacgtatatacacttttgtaaaatattattcggtgtctataacggaacaaacgctactatatattatcatagacctctaacgggatatatgaatatgatttcagatactatatttgttcctgtagataataactaaaaatcaaactctaatgaccacatctttttttagagatgaaaaattttccacatctccttttgtagacacgactaaacattttgcagaaaaaagtttattagtgtttagataatcgtatacttcatcagtgtagatagtaaatgtgaacagataaaaggtattcttgctcaatagattggtaaattccatagaatatattaatcctttcttcttgagatcccacatcatttcaaccagagacgttttatccaatgatttacctcgtactataccacatacaaaactagattttgcagtgacgtcgtacctggtattcctaccaaacaaaattttacttttagttcttttagaaaattctaaggtagaatctctatttgccaatatgtcatctatggaattaccactagcaaaaaatgatagaaatatatattgatacatcgcagctggttttgatctactatactttaaaaacgaatcagattccataattgcctgtatatcatcagctgaaaaactatgttttacacgtattccttcggcatttctttttaatgatatatcttgtttagacaatgataaagttatcatgtccatgagagacgcgtctccgtatcgtataaatatttcattagatgttagacgcttcattaggggtatacttctataaggtttcttaatcagtccatcattggttgcgtcaagaactactatcggatgttgttgggtatctctagtgttacacatggccttactaaagtttgggtaaataactatgatatctctattaattatagatgcatatatttcattcgtcaaggatattagtatcgacttgctatcgtcattaatacgtgtaatgtaatcatataaatcatgcgatagccaaggaaaatttaaatagatgttcatcatataatcgtcgctataattcatattaatacgttgacattgactaatttgtaatatagcctcgccacgaagaaagctctcgtattcagtttcatcgataaaggataccgttaaatataactggttgccgatagtctcatagtctattaagtggtaagtttcgtacaaatacagaatccctaaaatattatctaatgttggattaatctttaccataactgtataaaatggagacggagtcataactattttaccgtttgtacttactggaatagatgaaggaataatctccggacatgctggtaaagacccaaatgtctgtttgaagaaatccaatgttccaggtcctaatctcttaacaaaaattacgatattcgatcccgatatcctttgcattctatttaccagcatatcacgaactatattaagattatctatcatgtctattctcccaccgttatataaatcgcctccgctaagaaacgttagtatatccatacaatggaatacttcatttctaaaatagtattcgttttctaattctttaatgtgaaatcgtatactagaaagggaaaaattatctttgagttttccgttagaaaagaaccacgaaactaatgttctgattgcgtccgattccgttgctgaattaatggatttacaccaaaaactcatataacttctagatgtagaagcattcgctaaaaaattagtagaatcaaaggatataagtagatgttccaacaagtgagcaattcccaagatttcatctatatcattctcgaatccgaaattagaaattcccaagtagatatcctttttcatccgatcgttgatgaaaatacgaactttattcggtaagacaatcatttactaaggagtaaaataggaagtaatgttcgtatgtcgttatcatcgtataaattaaaggtgtgttttttaccattaagtgacattataattttaccaatattggaattataatataggtgtatttgcgcactcgcgacggttgatgcatcggtaaatatagctgtatctaatgttctagtcggtatttcatcatttcgctgtctaataatagcgttttctctatctgtttccattacagctgcctgaagtttattggtcggataatatgtaaaataataagaaatacatacgaataacaaaaataaaataagatataataaagatgccatttagagatctaattttgtttaacttgtccaaattcctacttacagaagatgaggaatcgttggagatagtgtcttccttatgtagaggatttgaaatatcttataatgacttgataacttactttccagataggaaataccataaatatatttataaagtatttgaacatgtagatttatcggaggaattaagtatggaattccatgatacaactctgagagatttagtctatcttagattgtacaagtattccaagtgtatacggccgtgttataaattaggagataatctaaaaggcatagttgttataaaggacaggaatatttatattagggaagcaaatgatgacttgatagaatatctcctcaaggaatacactcctcagatttatacatattctaatgagcgcgtccccataactggttcaaaattaattctttgtggattttctcaagttacatttatggcgtatacaacgtcgcatataacaacaaataaaaaggtagatgttctcgtttccaaaaaatgtatagatgaactagtcgatccaataaattatcaaatacttcaaaatttatttgataaaggaagcggaacaataaacaaaatactcaggaagatattttattcggtaacaggtggccaaactccataggtagctttttctatttcggattttagaatttccaaattcaccagcgatttatcggttttggtgaaatccaaggatttattaatgtccacaaatgccatttgttttgtctgtggattgtatttgaaaatggaaacgatgtagttagatagatgcgctgcgaagtttcctattagggttccgcgcttcacgtcacccagcatacttgaatcaccatcctttaaaaaaaatgataagatatcaacatggagtatatcatactcgaattttaattcttctactgactcactgacattttcacaaatactacaatacggtttaccgaaaataatcagtacgttcttcatttatgggtatcaaaaacttaaaatcgttactgctggaaaataaatcactgacgatattagatgataatttatacaaagtatacaatggaatatttgtggatacaatgagtatttatatagccgtcgccaattgtgtcagaaacttagaagagttaactacggtattcataaaatacgtaaacggatgggtaaaaaagggagggcatgtaaccctttttatcgatagaggaagtataaaaattaaacaagacgttagagacaagagacgtaaatattctaaattaaccaaggacagaaaaatgttagaattagaaaagtgtacatccgaaatacaaaatgttaccggatttatggaagaagaaataaaggcagaaatgcaattaaaaatcgataaactcacatttcaaatatatttatctgattctgataacataaaaatatcattgaatgagatactaacacatttcaacaataatgagaatgttacattattttattgtgatgaacgagacgcagaattcgttatgtgtctcgaggctaaaacacatttctctaccacaggagaatggccgttgataataagtaccgatcaggatactatgctatttgcatctgctgataatcatcctaagatgataaaaaacttaactcaactgtttaaatttgttccctcggcagaggataactatttagcaaaattaacggcgttagtgaatggatgtgatttctttcctggactctatggggcatctataacacccaccaacttaaacaaaatacaattgtttagtgattttacaatcgataatatagtcactagtttggcaattaaaaattattatagaaagactaactctaccgtagacgtgcgtaatattgttacgtttataaacgattacgctaatttagacgatgtctactcgtatattcctccttgtcaatgcactgttcaagaatttatattttccgcattagatgaaaaatggaatgaatttaaatcatcttatttagaaagcgtgccgttaccctgccaattaatgtacgcgttagaaccacgcaaggagattgatgtttcagaagttaaaactttatcatcttatatagatttcgaaaatactaaatcagatatcgatgttataaaatctatatcctcgatcttcggatattctaacgaaaactgtaacacgatagtattcggcatctataaggataatttactactgagtataaataattcattttactttaacgatagtctgttaataaccaatactaaaagtgataatataataaatataggttactagattaaaaatggtgttccaactcgtgtgctctacatgcggtaaagatatttctcacgaacgatataaattgattatacgaaaaaaatcattaaaggatgtactcgtcagtgtaaagaacgaatgttgtaggttaaaattatctacacaaatagaacctcaacgtaacttaacagtgcaacctctattggatataaactaatatggatccggttaattttatcaagacatatgcgcctagaggttctattatttttattaattataccatgtcattaacaagtcatttgaatccatcgatagaaaaacatgtgggtatttattatggtacgttattatcggaacacttggtagttgaatctacctatagaaaaggagttcgaatagtcccattggatagtttttttgaaggatatcttagtgcaaaagtatacatgttagagaatattcaagttatgaaaatagcagctgatacgtcattaactttattgggtattccgtatggatttggtcatgatagaatgtattgttttaaattggtagctgactgttataaaaatgccggtattgatacatcgtctaaacgaatattgggcaaagatatttttctgagccaaaacttcacagacgataatagatggataaagatatatgattctaataatttaacattttggcaaattgattaccttaaagggtgagttaatatgcataactactcctccgttgttttttccctcgttctttttcttaacgttgtttgccatcactctcataatgtaaagatattctaaaatggtaaacttttgcatatcggacgcagaaattggtataaatgttgtaattgtattatttcccgtcaatggactagtcacagctccatcagttttatatcctttagagtatttctcactcgtgtctaacattctagagcattccatgatctgtttatcgttgatattggccggaaagatagattttttattttttattatattactattggcaattgtagatataacttctggtaaatatttttctaccttttcaatctcttctattttcaagccggctatatattctgctatattgttgctagtatcaataccttttctggctaagaagtcatatgtggtattcactatatcagttttaactggtagttccattagcctttccacttctgcagaataatcagaaattggttctttaccagaaaatccagctactataataggctcaccgatgatcattggcaaaatcctatattgtaccagattaatgagagcatatttcatttccaataattctgctagttcttgagacattgatttatttgatgaatctagttggttctctagatactctaccatttctgccgcatacaataacttgttagataaaatcagggttatcaaagtgtttagcgtggctagaatagtgggcttgcatgtattaaagaatgcggtagtatgagtaaaccgttttaacgaattatatagtctccagaaatctgtggcgttacatacatgagccgaatgacatcgaagattgtccaatatttttaatagctgctctttgtccattatttctatatttgactcgcaacaattgtagataccattaatcaccgattcctttttcgatgccggacaatagcacaattgtttagctttggactctatgtattcagaattaatagatatatctctcaatacagattgcactatacattttgaaactatgtcaaaaattgtagaacgacgctgttctgcagccatttaactttaaataatttacaaaaatttaaaatgagcatccgtataaaaatcgataaactgcgccaaattgtggcatatttttcagagttcagtgaagaagtgtctataaatgtagactcgacggatgagttaatgtatatttttgccgccttgggcggatctgtaaacatttgggcaattatacctctaagtgcatcagtgttttaccgaggagccgaaaatattgtgtttaatcttcctgtgtccaaggtaaaatcgtgtttgtgtagttttcacaatgatgccatcatagatatagaacctgatctggaaaataatctagtaaaactttctagttatcatgtagtaagtgtcgattgtaacaaggaactgatgcctattaggacagatactactatttgtctaagtatagatcaaaagaaatcttacgtgtttaattttcacaagtatgaagaaaaatgttgtggtagaaccgtcattcatctagaatggttgttgggctttatcaagtgtattagtcagcatcagcatctggctattatgtttaaagatgacaatattattatgaagactcctggtaatactgatgcgttttccagggaatattctatgactgaatgttctcaagaactacaaaagttttctttcaaaatagctatctcgtctctcaacaaactacgaggattcaaaaagagagtcaatgtttttgaaactagaatcgtaatggataatgacgataacattttaggaatgttgttttcggatagagttcaatcctttaagatcaacatctttatggcgtttttagattaatactttcaatgagataaatatgggtggcggagtaagtgttgagctccctaaacgggatccgcctccgggagtacccactgatgagatgttattaaacgtggataaaatgcatgacgtgatagctcccgctaagcttttagaatatgtgcatataggaccactagcaaaagataaagaggataaagtaaagaaaagatatccagagtttagattagtcaacacaggacccggtggtctttcggcattgttaagacaatcgtataatggaaccgcacccaattgctgtcgcacttttaatcgtactcattattggaagaaggatggaaagatatcagataagtatgaagagggtgcagtattagaatcgtgttggccagacgttcacgacactggaaaatgcgatgttgatttattcgactggtgtcagggggatacgttcgatagaaacatatgccatcagtggatcggttcagcctttaataggagtaatagaactgtagagggtcaacaatcgttaataaatctgtataataagatgcaaacattatgtagtaaagatgctagtgtaccaatatgcgaatcatttttgcattatttacgcgcacacaatacagaagatagcaaagagatgatcgattatattctaagacaacagtctgcggactttaaacagaaatatatgagatgtagttatcccactagagataagttagaagagtcattaaaatatgcggaacctcgagaatgttgggatccagagtgttcgaatgccaatgttaatttcttactaacacgtaattataataatttaggactttgcaatattgtacgatgtaataccagcgtgaacaacttacagatggataaaacttcctcattaagattgtcatgtggattaagcaatagtgatagattttctactgttcccgtcaatagagcaaaagtagttcaacataatattaaacactcgttcgacctaaaattgcatttgatcagtttattatctctcttggtaatatggatactaattgtagctatttaaatgggtgccgcggcaagcatacagacgacggtgaatacactcagcgaacgtatctcgtctaaattagaacaagaagcgaacgctagtgctcaaacaaaatgtgatatagaaatcggaaatttttatatccgacaaaaccatggatgtaacctcactgttaaaaatatgtgctctgcggacgcggatgctcagttggatgctgtgttatcagccgctacagaaacatatagtggattaacaccggaacaaaaagcatacgtgccagctatgtttactgctgcgttaaacattcagacgagtgtaaacactgttgttagagattttgaaaattatgtgaaacagacttgtaattctagcgcggtcgtcgataacaaattaaagatacaaaacgtaatcatagatgaatgttacggagccccaggatctccaacaaatttggaatttattaatacaggatctagcaaaggaaattgtgccattaaagcgttgatgcaattgacgactaaggccactactcaaatagcacctagacaagttgctggtacaggagttcagttttatatgattgttatcggtgttataatattggcagcgttgtttatgtactatgccaagcgtatgttgttcacatccaccaatgataaaatcaaacttattttagccaataaggaaaacgtccattggactacttacatggacacattctttagaacttctccgatggttattgctaccacggatatgcaaaactgaaaatatattgataatattttaatagattaacatggaagttatcgctgatcgtctagacgatatagtgaaacaaaatatagcggatgaaaaatttgtagattttgttatacacggtctagagcatcaatgtcctgctatacttcgaccattaattaggttgtttattgatatactattatttgttatagtaatttatatttttacggtacgtctagtaagtagaaattatcaaatgttgttggtggtgctagtcatcacattaactattttttattactttatactataatagtactagactgacttctaacaaacatctcacctgccataaataaatgcttgatattaaagtcttctatttctaacactattccatctgtggaaaataatactctgacattatcgctaattgacacatcggtgagtgatatgcctataaagtaataatcttctttgggcacatataccagtgtaccaggttctaacaacctatttactggtgctcctgtagcatactttttctttaccttgagaatatccatcgtttgcttggtcaatagcgatatgtgattttttatcaaccactcaaaaaagtaattggagtgttcatatcctctacgggctattgtctcatggccgtgtatgaaatttaagtaacacgactgtggtagatttgttctatagagccgattgccgcaaatagatagaactaccaatatgtctgtacaaatgttaaacattaattgattaacagaaaaaacaatgttcgttctgggaatagaaaccagatcaaaacaaaattcgttagaatatatgccacgtttatacatggaatataaaataactacagtttgaaaaataacagtatcatttaaacatttaacttgcggggttaatctcacaactttactgtttttgaactgttcaaaatatagcatcgatccgtgagaaatacgtttagccgcctttaatagaggaaatcccaccgcctttctggatctcaccaacgacgatagttctgaccagcaactcatttcttcatcatccacctgttttaacatataataggcaggagatagatatccgtcattgcaatattccttctcgtaggcacacaatctaatattgataaaatctccattctcttctctgcatttattatcttgtctcggtggctgattaggctgtggtcttggtttaggccttggtctatcgttgttgaatctattttggtcattaaatctttcatttcttcctggtatatttctatcacctcgtttggttggatttttgtctatattatcgtttgtaacatcggtacgggtattcatttatcacaaaaaaaacttctctaaatgagtctactgctagaaaacctcatcgaagaagataccatattttttgcaggaagtatatctgagtatgatgatttacaaatggttattgccggcgcaaaatccaaatttccaagatctatgctttctatttttaatatagtacctagaacgatgtcaaaatatgagttggagttgattcataacgaaaatatcacaggagcaatgtttaccacaatgtataatataagaaacaatttgggtctaggagatgataaactaactattgaagccattgaaaactatttcttggatcctaacaatgaagttatgcctcttattattaataatacggatatgactgccgtcattcctaaaaaaagtggtaggagaaagaataagaacatggttatcttccgtcaaggatcatcacctatcttgtgcattttcgaaactcgtaaaaagattaatatttataaagaaaatatggaatccgcgtcgactgagtatacacctatcggagacaacaaggctttgatatctaaatatgcgggaattaatgtcctgaatgtgtattctccttccacatccataagattgaatgccatttacggattcaccaataaaaataaactagagaaacttagtactaataaggaactagaatcgtatagttctagccctcttcaagaacccattaggttaaatgattttctgggactattggaatgtgttaaaaagaatattcctctaacagatattccgacaaaggattgattactataaatggagaatgttcctaatgtatactttaatcctgtgtttatagagcccacgtttaaacattctttattaagtgtttataaacacagattaatagttttatttgaagtattcgttgtattcattctaatatatgtattttttagatctgaattaaatatgttcttcatgcctaaacgaaaaatacccgatcctattgatagattacgacgtgctaatctagcgtgtgaagacgataaattaatgatctatggattaccatggatgacaactcaaacatctgcgttatcaataaatagtaaaccgatagtgtataaagattgtgcaaagcttttgcgatcaataaatggatcacaaccagtatctcttaacgatgttcttcgcagatgatgattcattttttaagtatttggctagtcaagatgatgaatcttcattatctgatatattgcaaatcactcaatatctagactttctgttattattattgatccaatcaaaaaataaattagaagctgtgggtcattgttatgaatctctttcagaggaatacagacaattgacaaaattcacagactttcaagattttaaaaaactgtttaacaaggtccctattgttacagatggaagggtcaaacttaataaaggatatttgttcgactttgtgattagtttgatgcgattcaaaaaagaatcctctctagctaccaccgcaatagatcctgttagatacatagatcctcgtcgcaatatcgcattttctaacgtgatggatatattaaagtcgaataaagtgaacaataattaattctttattgtcatcatgaacggcggacatattcagttgataatcggccccatgttttcaggtaaaagtacagaattaattagacgagttagacgttatcaaatagctcaatataaatgcgtgactataaaatattctaacgataatagatacggaacgggactatggacgcatgataagaataattttgaagcattggaagcaactaaactatgtgatgtcttggaatcaattacagatttctccgtgataggtatcgatgaaggacagttctttccagacattgtttaattctgtgagcgtatggcaaacggtaccgagctcaaaaattgaaaaactagcgtctttttttgctcgaagtcgaccaccatgagtgctcctaaactcctctctctgggctgtatcttcttccccttgctactttttcagcaggcccgggctcaattcccaagacagtgtgccactgttgaggctttgagaagtggtatgtgttgcccagacctgtcccctgtgtctgggcctgggacagaccgctgtggctcatcatcagggaggggcagatgtgaggcagtgactgcagactcccggccccacagccctcagtatccccatgatggcagagatgatcgggaggtctggcccttgcgcttcttcaataggacatgtcactgcaacggcaatttctcaggacacaactgtgggacgtgccgtcctggctggagaggagctgcctgtgaccagagggttctcatagtcaggagaaatcttctggacttaagtaaagaagaaaagaaccactttgtccgggccctggatatggcaaagcgcacaactcaccctttatttgtcattgccaccaggagatcagaagaaatactggggccagatggcaacacgccacaatttgagaacatttccatttataactactttgtttggacacactattactcagtcaaaaagactttccttggggtaggacaggaaagctttggtgaagtggatttctctcatgagggaccagcttttctcacatggcacaggtaccacctcctgcgtctggagaaagacatgcaggaaatgttgcaagagccttctttctcccttccttactggaattttgcaacggggaaaaatgtctgtgatatctgcacggatgacttgatgggatccagaagcaactttgattccactctaataagcccaaactctgtcttttctcaatggcgagtggtctgtgactccttggaagattatgataccctgggaacactttgtaacagcaccgaggatgggccaattaggagaaatccagctggaaatgtggccagaccaatggtgcaacgtcttcctgaaccacaggatgtcgctcagtgcttggaagttggtttatttgacacgcctcctttttattccaactctacaaacagtttccgaaacacagtggaaggttacagtgaccccacgggaaagtatgaccctgctgttcgaagtcttcacaatttggctcatctattcctgaatggaacagggggacaaacccatttgtctccaaatgatcctatttttgtcctcctgcacaccttcacagatgcagtctttgatgaatggctgaggagatacaatgctgatatatccacatttccattggaaaatgcccctattggacataatagacaatacaacatggtgccattctggcccccagtcaccaacacagaaatgtttgttactgctccagacaacctgggatacacttatgaaattcaatggccaagtcgggagtttagtgtacctgagataattgccatagcagtagttggcgctttgttactggttgcactcatttttgggactgcttcttatctgattcgtgccagacgcagtatggatgaagctaaccagcctctcctcactgatcagtatcaatgctatgctgaagaatatgaaaaactccagaatcctaatcagtctgtggtctaattaattaatttttatcgatctaattcaacaatgtctggagagctcaaaaattgaaaaactagcgtctttttttgctcgaagtcgaccaccatgttcttggctgttttgtattgccttctgtggagtttccagatctctgatggccattttcctcgagcctgtgcctcctctaagaacttgttggcaaaagaatgctgcccaccatggatgggtgatgggagtccctgcggccagctttcaggcagaggttcctgccaggatatccttctgtccagtgcaccatctggacctcagttccccttcaaaggggtggatgaccgtgagtcctggccctctgtgttttataataggacctgccagtgctcaggcaacttcatgggtttcaactgcggaaactgtaagtttggatttgggggcccaaattgtacagagaagcgagtcttgattagaagaaacatttttgatttgagtgtctccgaaaagaataagttcttttcttacctcactttagcaaaacatactatcagctcagtctatgtcatccccacaggcacctatggccaaatgaacaatgggtcaacacccatgtttaatgatatcaacatctacgacctctttgtatggatgcattactatgtgtcaagggacacactgcttgggggctctgaaatatggagggacattgattttgcccatgaagcaccagggtttctgccttggcacagacttttcttgttattgtgggaacaagaaattcgagaactaactggggatgagaacttcactgttccatactgggattggagagatgcagaaaactgtgacatttgcacagatgagtacttgggaggtcgtcaccctgaaaatcctaacttactcagcccagcatccttcttctcctcctggcagatcatttgtagcagatcagaagagtataatagccatcaggttttatgcgatggaacacctgagggaccactattacgtaatcctggaaaccatgacaaagccaaaacccccaggctcccatcttcagcagatgtggaattttgtctgagtttgacccagtatgaatctggatcaatggatagaactgccaatttcagctttagaaacacactggaaggatttgccagtccactcacagggatagcagatccttctcaaagtagcatgcacaatgccttacatatctttatgaatggaacaatgtcccaagtacagggatcggccaacgatcccatttttcttcttcaccatgcttttgtggacagtatttttgaacaatggctgcgaaggcaccgccctcttttggaagtttacccagaagccaatgcacctatcggccataacagagactcttacatggttcctttcataccgctctatagaaatggtgatttcttcataacatccaaggatctgggatatgactacagctacctccaagagtcagatccaggcttttacagaaattatattgagccttacttggaacaagccagtcgtatctggccatggcttcttggggcagcactggtgggagctgttattgctgcagctctctctgggcttagcagtaggctatgccttcagaagaagaagaagaagaagcaaccccaggaggaaaggcagccactcctcatggacaaagacgactaccacagcttgctgtatcagagccatctgtgattaattaatttttatcgatctaattcaacaatgtctggagagctcggatccttctgtgagcgtatggcaaacgaaggaaaaatagttatagtagccgcactcgatgggacatttcaacgtaaaccgtttaataatattttgaatcttattccattatctgaaatggtggtaaaactaactgctgtgtgtatgaaatgctttaaggaggcttccttttctaaacgattgggtgaggaaaccgagatagaaataataggaggtaatgatatgtatcaatcggtgtgtagaaagtgttacatcgactcataatattatattttttatctaaaaaactaaaaataaacattgattaaattttaatataatacttaaaaatggatgttgtgtcgttagataaaccgtttatgtattttgaggaaattgataatgagttagattacgaaccagaaagtgcaaatgaggtcgcaaaaaaactgccgtatcaaggacagttaaaactattactaggagaattattttttcttagtaagttacagcgacacggtatattagatggtgccaccgtagtgtatataggatctgctcccggtacacatatacgttatttgagagatcatttctataatttaggagtgatcatcaaatggatgctaattgacggccgccatcatgatcctattttaaatggattgcgtgatgtgactctagtgactcggttcgttgatgaggaatatctacgatccatcaaaaaacaactgcatccttctaagattattttaatttctgatgtgagatccaaacgaggaggaaatgaacctagtacggcggatttactaagtaattacgctctacaaaatgtcatgattagtattttaaaccccgtggcgtctagtcttaaatggagatgcccgtttccagatcaatggatcaaggacttttatatcccacacggtaataaaatgttacaaccttttgctccttcatattcagctgaaatgagattattaagtatttataccggtgagaacatgagactgactcgagttaccaaattagacgctgtaaattatgaaaaaaagatgtactaccttaataagatcgtccgtaacaaagtagttgttaactttgattatcctaatcaggaatatgactattttcacatgtactttatgctgaggaccgtgtactgcaataaaacatttcctactactaaagcaaaggtactatttctacaacaatctatatttcgtttcttaaatattccaacaacatcaactgaaaaagttagtcatgaaccaatacaacgtaaaatatctagcaaaaattctatgtctaaaaacagaaatagcaagagatccgtacgcggtaataaatagaaacgtactactgagatatactaccgatatagagtataatgatttagttactttaataaccgttagacataaaattgattctatgaaaactgtgtttcaggtatttaacgaatcatccataaattatactccggttgatgatgattatggagaaccaatcattataacatcgtatcttcaaaaaggtcataacaagtttcctgtaaattttctatacatagatgtggtaatatctgacttatttcctagctttgttagactagatactacagaaactaatatagttaatagtgtactacaaacaggcgatggtaaaaagactcttcgtcttcccaaaatgttagagacggaaatagttgtcaagattctctatcgccctaatataccattaaaaattgttagatttttccgcaataacatggtaactggagtagagatagccgatagatctgttatttcagtcgctgattaatcaattagtagagatgagataagaacattataataatcaataatatatcttatatcttatatcttatatcttatatcttgtttagaaaaatgctaatattaaaatagctaacgctagtaatccaatcggaagccatttgatatctataatagggtatctaatttcctgatttaaatagcggacagctatattctcggtagctactcgtttggaatcacaaacattatttacatctaatttactatctgtaatggaaacgtttcccaatgaaatggtacaatccgatacattgcattttgttatatttttttttaaagaggctggtaacaacgcatcgcttcgtttacatggctcgtaccaacaataatagggtaatcttgtatctattcctatccgtactatgcttttatcaggataaatacatttacatcgtatatcgtctttgttagcatcacagaatgcataaatttgttcgtccgtcatgataaaaatttaaagtgtaaatataactattatttttatagttgtaataaaaagggaaatttgattgtatactttcggttctttaaaagaaactgacttgataaaaatggctgtaatctctaaggttacgtatagtctatatgatcaaaaagagattaatgctacagatattatcattagtcatgttaaaaatgacgacgatatcggtaccgttaaagatggtagactaggtgctatggatggggcattatgtaagacttgtgggaaaacggaattggaatgtttcggtcactggggtaaagtaagtatttataaaactcatatagttaagcctgaatttatttcagaaattattcgtttactgaatcatatatgtattcactgcggattattgcgttcacgagaaccgtattccgacgatattaacctaaaagagttatcgggacacgctcttaggagattaaaggataaaatattatccaagaaaaagtcatgttggaacagtgaatgtatgcaaccgtatcaaaaaattactttttcaaagaaaaaggtttgtttcgtcaacaagttggatgatattaacgttcctaattctctcatctatcaaaagttaatttctattcatgaaaagttttggccattattagaaattcatcaatatccagctaacttattttatacagactactttcccatccctccgttgattattagaccggctattagtttttggatagatagtatacccaaagagaccaatgaattaacttacttattaggtatgatcgttaagaattgtaacttgaatgctgatgaacaggttatccagaaggcggtaatagaatacgatgatattaaaattatttctaataacactaccagtatcaatttatcatatattacatccggcaaaaataatatgattagaagttatatcgtcgcccgacgaaaagatcagaccgctagatctgtaattggtcccagtacatctatcaccgttaatgaggtaggaatgcccgcatatattagaaatacacttacagaaaagatatttgttaatgcctttacagtggataaagttaaacaactattagcgtcaaaccaagttaaattttactttaataaacgattaaaccaattaacaagaatacgccaaggaaagtttattaaaaataaaatacatttattgcctggtgattgggtagaagtagctgttcaagaatatacaagtattatttttggaagacagccgtctctacatagatacaacgtcatcgcttcatctatcagagctaccgaaggagatactatcaaaatatctcccggaattgccaactctcaaaatgctgatttcgacggggatgaggaatggatgatattagaacaaaatcctaaagctgtaattgaacaaagtattcttatgtatccgacgacgttactcaaacacgatattcatggagcccccgtttatggatctattcaagatgaaatcgtagcagcgtattcattgtttaggatacaagatctttgtttagatgaagtattgaacatcttggggaaatatggaagagagttcgatcctaaaggtaaatgtaaattcagcggtaaagatatctatacttacttgataggtgaaaagattaattatccgggtctcttaaaggatggtgaaattattgcaaacgacgtagatagtaattttgttgtggctatgaggcatctgtcattggctggactcttatccgatcataagtcgaacgtggaaggtatcaactttattatcaagtcatcttatgtttttaagagatatctatctatttacggttttggggtgacattcaaagatctgagaccaaattcgacgttcactaataaattggaggccatcaacgtagaaaaaatagaacttatcaaagaagcatacgccaaatatctcaacgatgtaagagacgggaaaatagttccattatctaaagctttagaggcggactatgtggaatccatgttatccaacttgacaaatcttaatatccgagagatagaagaacatatgagacaaacgctgatagatgatccagataataacctcctgaaaatggccaaagcgggttataaagtaaatcccacagaactaatgtatattctaggtacgtatggacaacaaaggattgatggtgaaccagcagagactcgagtattgggtagagttttaccttactatcttccagactctaaggatccagaaggaagaggttacattcttaattctttaacaaaaggattaacgggttctcaatattacttttcgatgctggttgccagatctcaatctactgatatcgtctgtgaaacatcacgtaccggaacactggctagaaaaatcattaaaaagatggaggatatggtggtcgacggatacggacaagtagttataggtaatacgctcatcaagtacgccgccaattataccaaaattctaggctcagtatgtaaacctgtagatcttatctatccagatgagtccatgacttggtatttggaaattagtgctctgtggaataaaataaaacagggattcgtttactctcagaaacagaaacttgcaaagaagacattggcgccgtttaatttcctagtattcgtcaaacccaccactgaggataatgctattaaggttaaggatctgtacgatatgattcataacgtcattgatgatgtgagagagaaatacttctttacggtatctaatatagattttatggagtatatattcttgacgcatcttaatccttctagaattagaattacaaaagaaacggctatcactatctttgaaaagttctatgaaaaactcaattatactctaggtggtggaactcctattggaattatttctgcacaggtattgtctgagaagtttacacaacaagccctgtccagttttcacactactgaaaaaagtggtgccgtcaaacaaaaacttggtttcaacgagtttaataacttgactaatttgagtaagaataagaccgaaattatcactctggtatccgatgatatctctaaacttcaatctgttaagattaatttcgaatttgtatgtttgggagaattaaatccaaacatcactcttcgaaaagaaacagataaatatgtagtagatataatagtcaatagattatacatcaagagagcagaaataaccgaattagtcgtcgaatatatgattgaacgatttatctcctttagcgtcattgtaaaggaatggggtatggagacattcattgaggacgaggataatattagatttactgtctacctaaatttcgttgaaccggaagaattgaatcttagtaagtttatgatggttcttccgggggcagccaacaagggaaagattagtaaattcaagattcctatctctgattatacgggatatgacgacttcaatcaaacaaaaaagctcaataagatgactgtagaactcatgaatctaaaagaattgggttctttcgatttggaaaacgtcaacgtgtatcctggagtatggaatacatacgatatcttcggtatcgaggccgctcgtgaatacttgtgcgaagccatgttaaacacctatggagaagggttcgattatctgtatcagccttgtgatcttctcgctagtttactatgtgctagttacgaaccagaatcagtgaataaattcaagttcggcgcagctagtactcttaagagagctacgttcggagacaataaagcattgttaaacgcggctcttcataaaaagtcagaacctattaacgataatagtagctgccacttttttagcaaggtccctaatataggaactggatattacaaatactttatcgacttgggtcttctcatgagaatggaaaggaaactatctgataagatatcttctcaaaagatcaaggaaatggaagaaacagaagacttttaattcttatcaataacatatttttctatgatctgtcttttaaacgatggattttccacaaatgcgcctctcaagtccctcatagaatgatacacgtataaaaaatatagcataggcaatgactccttatttttagacattagatatgccaaaatcatagccccgcttctatttactcccgcagcacaatgaaccaacacgggctcgtttcgttgatcacatttagataaaaaggcggttacgtcgtcaaaatatttactaatatcggtagttgtatcatctaccaacggtatatgaataatattaatattagagttaggtaatgtatatttatccatcgtcaaatttaaaacatatttgaacttaacttcagatgatggtgcatccatagcatttttataatttcccaaatacacattattggttacccttgtcattatagtgggagatttggctttgtgcatatctccagttgaacgtagtagtaagtatttatacaaacttttcttatccatttataacgtacaaatggataaaactactttatcggtaaacgcgtgtaatttagaatacgttagagaaaaggctatagtaggcgtacaagcagccaaaacatcaacacttatattctttgttattatattggcaattagtgcgctattactctggtttcagacgtctgataatccagtctttaatgaattaacgagatatatgcgaattaaaaatacggttaacgattggaaatcattaacggatagcaaaacaaaattagaaagtgatagaggtagacttctagccgctggtaaggatgatatatttgaattcaaatgtgtggatttcggcgcctattttatagctatgcgattggataagaaaacatatctgccgcaagctattaggcgaggtactggagacgcgtggatggttaaaaaggcggcaaaggtcgatccatctgctcaacaattttgtcagtatttgataaaacacaagtctaataatgttattacttgtggtaatgagatgttaaatgaattaggttatagcggttattttatgtcaccgcattggtgttccgattttagtaatatggaatagtgttagataaatgcggtaacgaatgttcctgtaaggaaccataacagcttagatttaacgttaaagatgagcataaacataataaacaaaattacaatcaaacttataacattaatatcaaacaatccaaaaaatgaaatcagtggagtagtaaacgcgtacataactcctggataacgtttagcagctgccgttcctattctagaccaaaaattcggtttcatgttttcgaaacggtattctgcaacaagtcgaggatcgtgttctacatatttggcggcattatccagtatctgcctattgatcttcatttcgttttcgattctggctatttcaaaataaaatcccgatgatagacctccagactttataatttcatctacgatgttcagcgccgtagtaactctaataatataggctgataagctaacatcataccctcctgtatatgtgaatatggcatgatttttgtccattacaagctcggttttaactttattgcctgtaataatttctctcatctgtaggatatctatttttttgtcatgcattgccttcaagacgggacgaagaaacgtaatatcctcaataacgttatcgttttctacaataactacatattctacctttttattttctaactcggtaaaaaaattagaatcccatagggctaaatgtctagcgatatttcttttcgtttcctctgtacacatagtgttacaaaaccctgaaaagaagtgagtatacttgtcatcatttctaatgtttcctccagtccactgtataaacgcataatccttgtaatgatctggatcatccttgactaccacaacatttcttttttctggcataacttcgttgtcctttacatcatcgaacttctgatcattaatatgctcatgaacattaggaaatgtttctgatggaggtctatcaataactggcacaacaataacaggagttttcaccgccgccatttagttattgaaattaatcatatacaactctttaatacgagttatattttcgtctatccattgtttcacattgacatatttcgacaaaaagatataaaatgcgtattccaatgcttctctgtttaatgaattactaaaatatacaaacacgtcactgtctggcaataaatgatatcttagaatattgtaacaatttattttgtattgcacatgttcgtgatctatgagttcttcttcgaatggcataggatctccgaatctgaaaacgtataaataggagttagaataataatatttgagagtattggtaatatataaactctttagcggtataattagtttttttctctcaatttctatttttagatgtgatggaaaaatgactaattttgtagcattagtatcatgaactctaatcaaaatcttaatatcttcgtcacacgttagctctttgaagtttttaagagatgcatcagttggttctacagatggagtaggtgcaacaattttttgttctacacatgtatgtactggagccattgttttaactataatggtgcttgtatcgaaaaactttaatgcagatagcggaagctcttcgccgcgactttctacgtcgtaattgggttctaacgccgatctctgaatggatactagttttctaagttctaatgtgattctctgaaaatgtaaatccaattcctccggcattatagatgtgtatacatcggtaaataaaactatagtatccaacgatcccttctcgcaaattctagtcttaaccaaaaaatcgtatataaccacggagatggcgtatttaagagtggattcttctaccgttttgttcttggatgtcatataggaaactataaagtccgcactactgttaagaatgattactaacgcaactatatagtttaaattaagcattttggaaacataaaataactctgtagacgatacttgactttcgaataagtttgcagacaaacgaagaaagaacagacctctcttaatttcagaagaaaactttttttcgtattcctgacgtctagagtttatatcaataagaaagttaagaattagtcggttaatgttgtatttcattacccaagtttgagatttcataatattatcaaaagacatgataatattaaagataaagcgctgactatgaacgaaatagctatatggttcgctcaagaatatagtcttgttaaacgtggaaacgataactgtatttttaatcacgtcagcggcatctaaattaaatataggtatatttattccacacactctacaatatgccacaccatcttcataataaataaattcgttagcaaaattattaattttagtgaaatagttagcgtcaactttcatagcttccttcaatctaatttgatgctcacacggtgcgaattccactctaacatcccttttccatgcctcaggttcatcgatctctataatatctagttttttgcgtttcacaaacacaggctcgtctctcgcgatgagatctgtatagtaactatgtaaatgataactagatagaaagatgtagctatatagatgacgatcctttaagagaggtataataactttaccccaatcagatagactgttgttatggtcttcggaaaaagaatttttataaatttttccagtattttccaaatatacgtacttaacatctaaaaaatccttaatgataataggaatggataatccgtctattttataaagaaatacatatcgcacattatacttttttttggaaatgggaataccgatgtgtctacataaatatgcaaagtctaaatattttttagagaatcttagttggtccaaattcttttccaagtacggtaatagatttttcatattgaacggtatcttcttaatctctggttctagttccgcattaaatgatgaaactaagtcactatttttataactaacgattacatcacctctaacatcatcatttaccagaatactgatcttcttttgtcgtaaatacatgtctaatgtgttaaaaaaaagatcatacaagttatacgtcatttcatctgtggtattcttgtcattgaaggataaactcgtactaatctcttctttaacagcctgttcaaatttatatcctatatacgaaaaaatagcaaccagtgtttgatcatccgcgtcaatattctgttctatcgtagtgtataacaatcgtatatcttcttctgtgatagtcgatacgttataaaggttgataacgaaaatatttttatttcgtgaaataaagtcatcgtaggattttggacttatattcgcgtctagtagatatgcttttatttttggaatgatctcaattagaatagtctctttagagtccatttaaagttacaaacaactaggaaattggtttatgatgtataatttttttagtttttatagattctttattctatacttaaaaaatgaaaataaatacaaaggttcttgagggttgtgttaaattgaaagcgagaaataatcataaattatttcattatcgcgatatccgttaagtttgtatcgtaatggcgtggtcaattacgaataaagcggatactagtagcttcacaaagatggctgaaatcagagctcatctaaaaaatagcgctgaaaataaagataaaaacgaggatattttcccggaagatgtaataattccatctactaagcccaaaaccaaacgagccactactcctcgtaaaccagcggctactaaaagatcaaccaaaaaggaggaagtggaagaagaagtagttatagaggaatatcatcaaacaactgaaaaaaattctccatctcctggagtcagcgacattgtagaaagcgtggccgctgtagagctcgatgatagcgacggggatgatgaacctatggtacaagttgaagctggtaaagtaaatcatagtgctagaagcgatctctctgacctaaaggtggctaccgacaatatcgttaaagatcttaagaaaattattactagaatctctgcagtatcgacggttctagaggatgttcaagcagctggtatctctagacaatttacttctatgactaaagctattacaacactatctgatctagtcaccgagggaaaatctaaagttgttcgtaaaaaagttaaaacttgtaagaagtaaatgcgtgcacttttttataaagatggtaaactctttaccgataataattttttaaatcctgtatcagacgataatccagcgtatgaggttttgcaacatgttaaaattcctactcatttaacagatgtagtagtatatgaacaaacgtgggaggaggcgttaactagattaatttttgtgggaagtgattcaaaaggacgtagacaatacttttacggaaaaatgcatgtacagaatcgcaacgctaaaagagatcgtatttttgttagagtatataacgttatgaaacgaattaattgttttataaacaaaaatataaagaaatcgtccacagattccaattatcagttggcggtttttatgttaatggaaactatgttttttattagatttggtaaaatgaaatatcttaaggagaatgaaacagtagggttattaacactaaaaaataaacacatagaaataagtcccgatgaaatagttatcaagtttgtaggaaaggacaaagtttcacatgaatttgttgttcataagtctaatagactatataaaccgctattgaaactgacggatgattctagtcccgaagaatttctgttcaacaaactaagtgaacgaaaggtatacgaatgtatcaaacagtttggtattagaatcaaggatctccgaacgtatggagtcaattatacgtttttatataatttttggacaaatgtaaagtccatatctcctcttccgtcaccaaaaaagttaatagcattaactatcaaacaaactgctgaagtggtaggtcatactccatcaatttcaaaaagagcttatatggcaacgactattttagaaatggtaaaggataaaaattttttagatgtagtatctaaaactacgttcgatgaattcctatctatagtcgtagatcacgttaaatcatctacggatggatgatatagatctttacacaaataattacaagaccgataaatggaaatggataagcgtatgaaatctctcgcaatgacagctttcttcggagagctaagcacattagatattatggcattgataatgtctatatttaaacgccatccaaacaataccattttttcagtggataaggatggtcagtttatgattgatttcgaatacgataattataaggcttctcaatatttggatctgaccctcactccgatatctggagatgaatgcaagactcacgcatcgagtatagccgaacaattggcgtgtgcggatattattaaagaggatattagcgaatatatcaaaactactccccgtcttaaacgatttataaaaaaataccgcaatagatcagatactcgtatcagtcgagatacagaaaagcttaaaatagctctagctaaaggcatagattacgaatatataaaagacgcttgttaataagtaaatgaaaaaaaactagtcgtttataataaaacacgatatggatgccaacgtagtatcattttctactattgcgacgtatatagacgctttagcgaagaatgcttcggaattagaacagaggtctaccgcatacgaaataaataatgaattggaactagtatttattaagccgccattgattactttgacaaatgtagtgaatatctctacgattcaggaatcgtttattcgatttaccgttactaataaggaaggtgttaaaattagaactaagattccattatctaaggtacatggtctagatgtaaaaaatgtacagttagtagatgctatagataacatagtttgggaaaagaaatcattagtgacggaaaatcgtcttcacaaagaatgcttgttgagactatcgacagaggaacgtcatatatttttggattacaagaaatatggatcctctatccgactagaattagtcaatcttattcaagcaaaaacaaaaaactttacgatagactttaagctaaaatattttctaggatccggtgcccagtctaaaagttctttgttgcacgctattaatcatccaaagtcaaggcctaatacatctctggaaatagaattcacacctagagacaatgaaacagttccatatgatgaactaataaaggaattgacgactctctcgcgtcatatatttatggcttctccagagaatgtaattctttctccgcctattaacgcgcctataaaaacctttatgttgcctaaacaagatatagtaggtttggatctggaaaatctatatgccgtaactaagactgacggcattcctataactatcagagttacatcaaacgggttgtattgttattttacacatcttggttatattattagatatcctgttaagagaataatagattccgaagtagtagtctttggtgaggcagttaaggataagaactggaccgtatatctcattaagctaatagagcctgtgaatgcaatcaatgatagactagaagaaagtaagtatgttgaatctaaactagtggatatttgtgatcggatagtattcaagtcaaagaaatacgaaggtccgtttactacaactagtgaagtcgtcgatatgttatctacatatttaccaaagcaaccagaaggtgttattctgttctattcaaagggacctaaatctaacattgattttaaaattaaaaaggaaaatactatagaccaaactgcaaatgtagtatttaggtacatgtccagtgaaccaattatctttggagaatcgtctatctttgtagagtataagaaatttagcaacgataaaggctttcctaaagaatatggttctggtaagattgtgttatataacggcgttaattatctaaataatatctattgtttggaatatattaatacacataatgaagtgggtattaagtccgtggttgtacctattaagtttatagcagaattcttagttaatggagaaatacttaaacctagaattgataaaaccatgaaatatattaactcagaagattattatggaaatcaacataatatcatagtcgaacatttaagagatcaaagcatcaaaataggagatatctttaacgaggataaactatcggatgtgggacatcaatacgccaataatgataaatttagattaaatccagaagttagttattttacgaataaacgaactagaggaccgttgggaattttatcaaactacgtcaagactcttcttatttctatgtattgttccaaaacatttttagacgattccaacaaacgaaaggtattggcgattgattttggaaacggtgctgacctggaaaaatacttttatggagagattgcgttattggtagcgacggatccggatgctgatgctatagctagaggaaatgaaagatacaacaaattaaactctggaattaaaaccaagtactacaaatttgactacattcaggaaactattcgatccgatacatttgtctctagtgtcagagaagtattctattttggaaagtttaatatcatcgactggcagtttgctatccattattcttttcatccgagacattatgctaccgtcatgaataacttatccgaactaactgcttctggaggcaaggtattaatcactaccatggacggagacaaattatcaaaattaacagataaaaagacttttataattcataagaatttacctagtagcgaaaactatatgtctgtagaaaaaatagctgatgatagaatagtggtatataatccatcaacaatgtctactccaatgactgaatacattatcaaaaagaacgatatagtcagagtgtttaacgaatacggatttgttcttgtagataacgttgatttcgctacaattatagaacgaagtaaaaagtttattaatggcgcatctacaatggaagatagaccgtctacaaaaaactttttcgaactaaatagaggagccattaaatgtgaaggtttagatgtcgaagacttacttagttactatgttgtttatgtcttttctaagcggtaaataataatatggtatgggttctgatctcccagttctaaatgcattaaataattccaatagagcgatttttgttcctataggaccttccaactgtggatactctgtattgttaatagatatattaatacttttgtcgggtaacagaggttctacgtcttctaaaaataaaagttttataacatctggcctgttcataaataaaaacttggcgattctatatatactcttattatcaaatctagccattgtcttatagatgtgagctactgtaggtgtaccatttgattttctttctaatactatatatttctctcgaagaagttcttgcacatcatctgggaataaaatactactgttgagtaaatcagttattttttttatatcgatattgatggacatttttatagttaaggataataagtatcccaaagtcgataacgacgataacgaagtatttatacttttaggaaatcacaatgactttatcagattaaaattaacaaaattaaaggagcatgtatttttttctgaatatattgtgactccagatacatatggatctttatgcgtcgaattaaatgggtctagttttcagcacggcggtagatatatagaggtggaggaatttatagatgctggaagacaagttagatggtgttctacatccaatcatatatctaaagatatacccgaagatatgcacactgataaatttgtcatttatgatatttatacgtttgattcgttcaagaataaacgattggtattcgtacaggtacctccgtcgttaggagatgatagtcatttgactaatccgttattgtcaccgtattatcgtaattcagtagccagacaaatggtcaatgatatgatttttaatcaagattcatttttaaaatatttattagaacatctgattagaagccactatagagtttctaaacatataacaatagttagatacaaggataccgaagaattaaatctaacgagaatatgttataatagagataagtttaaggcgtttgtattcgcttggtttaacggcgtttcggaaaatgaaaaggtactagatacgtataaaaaggtatctaatttgatataatgaattcagtgactgtatcacacgcgccatatactattacttatcacgatgattgggaaccagtaatgagtcaattggtagagttttataacgaagtagccagttggctgctacgagacgagacgtcgcctattcctgataagttctttatacagttgaaacaaccgcttagaaataaacgagtatgtgtgtgtggtatagatccgtatccgaaagatggaactggtgtaccgttcgaatcaccaaattttacaaaaaaatcaattaaggagatagcttcatctatatctagattaaccggagtaattgattataaaggttataaccttaatataatagacggggttataccctggaattattacttaagttgtaaattaggagaaacaaaaagtcacgcgatttactgggataagatttccaagttactgctgcagcatataactaaacacgttagtgttctttattgtttgggtaaaacagatttctcgaatatacgggccaagttagaatccccggtaactaccatagtcggatatcatccagcggctagagaccgccaattcgagaaagatagatcatttgaaattatcaacgttttactggaattagacaacaaggcacctataaattgggctcaagggtttatttattaatgctttagtgaaattttaacttgtgttctaaatggatgcggctattagaggtaatgatgttatctttgttcttaagactataggtgtcccgtcagcgtgcagacaaaatgaagatccaagatttgtagaagcatttaaatgcgacgagttagaaagatatattgagaataatccagaatgtacactattcgaaagtcttagggatgaggaagcatactctatagtcagaattttcatggatgtagatttagacgcgtgtctagacgaaatagattatttaacggccattcaagattttattatcgaggtgtcaaactgtgtagctagattcgcgtttacagaatgcggcgccattcatgaaaatgtaataaaatccatgagatctaatttttcattgactaagtctacaaatagagataaaacaagttttcatattatctttttagatacgtataccactatggatacattgatagctatgaaacgaacactattagaattaagtagatcatctgaaaatccactaaccagatcgatagacactgccgtatataggagaaaaacaactcttcgggttgtaggtactaggaaaaatccaaattgcgacactattcatgtaatgcaaccaccgcatgataatatagaagattacctattcacttacgtggatatgaacaacaatagttattacttttctctacaacaacgattggaggatttagttcctgataagttatgggaaccagggtttatttcattcgaagacgctataaaaagagtttcaaaaatattcattaattctataataaactttaatgatctcgatgaaaataattttacaacggtaccactggtcatagattacgtaacaccttgtgcattatgtaaaaaacgatcgcataaacatccgcatcaactatcgttggaaaatggtgctattagaatttacaaaactggtaatccacatagttgtaaagttaaaattgttccgttggatggtaataaactgtttaatattgcacaaagaattttagacactaactctgttttattaaccgaacgaggagaccatatagtttggattaataattcatggaaatttaacagcgaagaacccttgataacaaaactaattttgtcaataagacatcaactacctaaggaatattcaagcgaattactctgtccaagaaaacgaaagactgtagaagctaacatacgagacatgttagtagattcagtggagaccgatacctatccggataaacttccgtttaaaaatggtgtattggacctggtagacggaatgttttactctggagatgatgctaaaaaatatacgtgtactgtatcaaccggatttaaatttgacgatacaaagttcgtcgaagacagtccagaaatggaagagttaatgaatatcattaacgatatccaaccattaacggatgaaaataagaaaaatagagagctatatgaaaaaacattatctagttgtttatgcggtgctaccaaaggatgtttaacattcttttttggagaaactgcaactggaaagtcgacaaccaaacgtttgttaaagtctgctatcggtgacctgtttgttgagacgggtcaaacaattttaacagatgtattggataaaggacctaatccatttatcgctaacatgcatttgaaaagatctgtattctgtagcgaactacctgattttgcctgtagtggatcaaagaaaattagatctgacaatattaaaaagttgacagaaccttgtgtcattggaagaccgtgtttctccaataaaattaataatagaaaccatgcgacaatcattatcgatactaattacaaacctgtttttgataggatagataacgcattaatgagaagaattgccgtcgtgcgattcagaacacacttttctcaaccttctggtagagaggctgctgaaaataatgacgcgtacgataaagtcaaactattagacgaggggttagatggtaaaatacaaaataatatatatagatttgcatttctatacttgttggtgaaatggtacaaaaaatatcatgttcctattatgaaactatatcctacacccgaagagattcctgactttgcattctatctcaaaataggtactctgttggtatctagctctgtaaagcatattccattaatgacggacctctccaaaaagggatatatattgtacgataatgtggtcactcttccgttgactactttccaacagaaaatatccaagtattttaattctagactatttggacacgatatagagagcttcatcaatagacataagaaatttgccaatgttagtgatgaatatctgcaatatatattcatagaggatatttcatctccgtaaatatatgctcatatatttatagaagatatcacatatctaaatgaataccggaatcatagatttatttgataatcatgttgatagtataccaactatattacctcatcagttagctactctagattatctagttagaactatcatagatgagaacagaagcgtgttattgttccatattatgggatcaggtaaaacaataatcgctttgttgttcgccttggtagcttccagatttaaaaaggtttacattctagtgccgaacatcaacatcttaaaaattttcaattataatatgggtgtagctatgaacttgtttaatgacgaattcatagctgagaatatctttattcattccacaacaagtttttattctcttaattataacgataacgtcattaattataacggattatctcgctacaataactctatttttatcgttgatgaggcacataatatctttgggaataatactggagaacttatgaccgtgataaaaaataaaaacaagattccttttttactattgtctggatctcccattactaacacacctaatactctgggtcatattatagatttaatgtccgaagagacgatagattttggtgaaattattagtcgtggtaagaaagtaattcagacacttcttaacgaacgcggtgtgaatgtacttaaggatttgcttaaaggaagaatatcatattacgaaatgcctgataaagatctaccaacgataagatatcacggacgtaagtttctagatactagagtagtatattgtcacatgtctaaacttcaagagagagattatatgattactagacgacagctatgttatcatgaaatgtttgataaaaatatgtataacgtgtcaatggcagtattgggacaacttaatctgatgaataatttagatactttatttcaggaacaggataaggaattgtacccaaatctgaaaataaataatggcgtgttatacggagaagaattggtaacgttaaacattagttccaaatttaaatactttattaatcggatacagacactcaacggaaaacattttatatacttttctaattctacatatggcggattggtaattaaatatatcatgctcagtaatggatattctgaatataatggttctcagggaactaatccacatatgataaacggcaaaccaaaaacatttgctatcgttactagtaaaatgaaatcgtctttagaggatctattagatgtgtataattctcctgaaaacgatgatggtagtcaattgatgtttttgttttcatcaaacattatgtccgaatcctatactctaaaagaggtaaggcatatttggtttatgactatcccagatactttttctcaatacaaccaaattcttggacgatctattagaaaattctcttacgccgatatttctgaaccagttaatgtatatcttttagccgccgtatattccgatttcaatgacgaagtgacgtcattaaacgattacacacaggatgaattaattaatgttttaccatttgacatcaaaaagctgttgtatctaaaatttaagacgaaagaaacgaatagaatatactctattcttcaagagatgtctgaaacgtattctcttccaccacatccatcaattgtaaaagttttattgggagaattggtcagacaatttttttataataattctcgtattaagtataacgataccaagttacttaaaatggttacatcagttataaaaaataaagaagacgctaggaattacatagatgatattgtaaacggtcacttctttgtatcgaataaagtatttgataaatctcttttatacaaatacgaaaacgatattattacagtaccgtttagactttcctacgaaccatttgtttggggagttaactttcgtaaagaatataacgtggtatcttctccataaaactgatgagatatataaagaaataaatgtcgagctttgttaccaatggatacctttccgttacattggaaccacacgagctgacgttagacataaaaactaatattaggaatgccgtatataagacgtatctccatagagaaattagtggtaaaatggccaagaaaatagaaattcgtgaagacgtggaattacctctcggcgaaatagttaataattctgtagttataaacgttccgtgtgtaataacctacgcgtattatcacgttggggatatagtcagaggaacattaaacatcgaagatgaatcaaatgtaactattcaatgtggagatttaatctgtaaactaagtagagattcgggtactgtatcatttagcgattcaaagtactgcttttttcgaaatggtaatgcgtatgacaatggcagcgaagtcactgccgttctaatggaggctcaacaaggtatcgaatctagttttgtttttctcgcgaatatcgtcgactcataaaaaagagaatagcggtaagtataaacacgaatactatggcaataattgcgaatgttttattctcttcgatatatttttgataatatgaaaaacatgtctctctcaaatcggacaaccatctcataaaatagttctcgcgcgctggagaggtagttgccgctcgtataatctctccagaataatatacttgcgtgtcgtcgttcaatttatacggatttctatagttctctgttatataatgcggtttgccctcatgattagacgacgacaatagtgttctaaatttagatagttgatcagaatgaatgtttattggcgttggaaaaattatccatacagcgtctgcagagtggttgatagttgttcctagatatgtaaaataatccaacttactaggcagcaaattgtctagataaaatactgaatcaaacggtgcagacgtattggcggatctaatggaatccaattgattaactatcttttgaaaatatacatttttatgatccaatacttgtaagaatatagaaataatgataagtccatcatcgtgtttttttgcctcttcataagaactatattttttcttattccaatgaacaagattaatctctccagagtatttgtacacatctatcaagtgattggatccataatcgtcttcctttccccaatatatatgtagtgatgataacacatattcattggggagaaaccctccacttatatatcctcctttaaaattaatccttactagttttccagtgttctggatagtggttggtttcgactcattataatgtatgtctaacggcttcaatcgcgcgttagaaattgcttttttagtttctatattaataggagatagttgttgcggcatagtaaaaatgaaatgataactgtttaaaaatagctcttagtatgggaattacaatggatgaggaagtgatatttgaaactcctagagaattaatatctattaaacgaataaaagatattccaagatcaaaagacacgcatgtgtttgctgcgtgtataacaagtgacggatatccgttaataggagctagaagaacttcattcgcgttccaggcgatattatctcaacaaaattcagattctatctttagagtatccactaaactattacggtttatgtactacaatgaactaagagaaatctttagacggttgagaaaaggttctatcaacaatatcgatcctcactttgaagagttaatattattgggtggtaaactagataaaaaggaatctattaaagattgtttaagaagagaattaaaagaggaaagtgatgaacgtataacagtaaaagaatttggaaatgtaattctaaaacttacaacacgggataaattatttaataaagtatatataagttattgcatggcgtgttttattaatcaatcgttggaggatttatcgcatactagtatttacaatgtagaaattagaaagattaaatcattaaatgattgtattaacgacgataaatacgaatatctgtcttatatttataatatgctagttaatagtaaatgaacttttacagatctagtataattagtcagattattaagtataatagacgactagctaagtctattatttgcgaggatgactctcaaattattacactcacggcattcgttaaccaatgcctatggtgtcataaacgagtatccgtgtccgctattttattaactactgataacaaaatattagtatgtaacagacgagatagttttctctattctgaaataattagaactagaaacatgtttagaaagaaacgattatttctgaattattccaattatttgaacaaacaggaaagaagtatactatcgtcatttttttctctagatccagctactactgataatgatagaatagacgctatttatccgggtggcatacccaaaaggggtgagaatgttccagagtgtttatccagggaaattaaagaagaagttaatatagacaattcttttgtattcatagacactcggttttttattcatggcatcatagaagataccattattaataaattttttgaggtaatcttctttgtcggaagaatatctctaacgagtgatcaaatcattgatacatttaaaagtaatcatgaaatcaaggatctaatatttttagatccgaattcaggtaatggactccaatacgaaattgcaaaatatgctctagatactgcaaaacttaaatgttacggccatagaggatgttattatgaatcattaaaaaaattaactgaggatgattgattaaaaaatataaattaatttaccatcgtgtatttttataacgggattgtccggcatatcatgtagatagttaccgtctacatcgtatactcgaccatctacgcctttaaatcctctatttattgacattaatctattagaattggaataccaaatattagtaccctcaattagtttattggtaatattttttttagacgatagatcgatggctcttgaaaccaaggttttccaaccggactcattgtcgatcggtgagaagtctttttcattagcatgaatccattctaatgatgtatgtttaaacactctaaacaattggacaaattcttttgatttgctttgaatgatttcaaataggtcttcgtctacagtaggcataccattagataatctagccattataaagtgcacgtttacatatctacgttctggaggagtaagaacgtgactattgagacgaatggctcttcctactatctgacgaagagacgcctcgttccatgtcatatctaaaatgaagatatcattaattgagaaaaaactaataccctcgcctccactagaagagaatacgcatgttttaatgcattctccgttagtgtttgattcttggttaaactcagccaccgccttgattctagtatcttttgttctagatgagaactctatattagagataccaaagactttgaaatatagtaataagatttctattcctgactgattaacaaatggttcaaagactagacatttaccatgggatgctaatattcccaaacatacatctataaatttgacgcttttctcttttaattcagtaaatagagagatatcagccgcactagcatcccctttcaatagttctccctttttaaaggtatctaatgcggatttagaaaactctctatctcttaatgaatttttaaaatcattatatagtgttgctatctcttgcgcgtattcgcccggatcacgattttgtctttcaggaaagctatcgaacgtaaacgtagtagccatacgtctcagaattctaaatgatgatatacctgtttttatttcagcgagtttagccttttgataaatttcttcttgctttttcgacatattaacgtatcgcattaatactgttttcttagcgaatgatgcagacccttctacgtcatcaaaaatagaaaactcgttattaactatatacgaacatagtcctcctagtttggagactaattctttttcatcgactagacgtttattctcaaatagcgattggtgttgtaaggatcctggtcgtagtaagttaaccaacatggtgaattcttgcacactattgacgataggtgtagccgataaacaaatcatcttatggttttttaacgcaatggtcttagataaaaaattatatactgaacgagtaggacggatcttaccatcttctttgattaatgatttagaaatgaagttatgacattcatcaataatgacgcatattctactcttggaattaatagttttgatattagtaaaaaatttatttctaaaattttgatcatcgtaattaataaaaatacaatccttcgttatctctggagcgtatctgagtatagtgttcatccaaggatcttctatcaaagcctttttcaccaataagataatagcccaattcgtataaatatccttaagatgtttgagaatatatacagtagtcattgttttaccgacacccgtttcatggaacaataaaagagaatgcatactgtctaatcctaagaaaactcttgctacaaaatgttgataatccttgaggcgtactacgtccgaccccatcatttcaacgggcatattagtagttctgcgtaaggcataatcgatataggccgcgtgtgatttactcatttatgagtgataagtaataactatgttttaaaaatcacagcagtagtttaactagtcttctctgatgtttgttttcgatactttttgaatcagaagtcatactagaataaagcaacgagtgaacgtaatagagagcttcgtatactctattcgaaaactctaagaacttattaatgaattccgtatccactggattgtttaaaatactaaattgaacactgttcacatccttccaagaagaagacttagtgacggacttaacatgagacataaataaatccaaattttttttacaaacatcactagccaccataatggcgctatctttcaaccagctatcgcttacgcattttagcagtctaacatttttaaagagactacaatatattctcatagtatcgattacacctctaccgaataaagttggaagtttaataatacaatatttttcgtttacaaaatcaaataatggtcgaaacacgtcgaaggttaacatcttataatcgctaatgtatagattgttttcagtgagatgattattagatttaatagcatctcgttcacgtttgaacagtttattgcgtgcgctgaggtcggcaactacggcgtccgctttagtactcctcccataatactttacgctattaatctttaaaatttcatagactttatctagatcgctttctggtaacatgatatcatgtgtaaaaagttttaacatgtcggtcggcattctatttagatcattaactctagaaatctgaagaaagtaattagctccgtattccagactaggtaatgggcttttacctagagacagattaagttctggcaatgtttcataaaatggaagaaggacatgcgttccctcccggatattttttacaatttcatccatttacaactctatagtttgttttcattattattagttattatctcccataatcttggtaatacttaccccttgatcgtaagataccttatacaggtcattacatacaactaccaattgtttttgtacataatagattggatggttgacatccatggtggaataaactactcgaacagatagtttatctttccccctagatacattagccgtaatagttgtcggcctaaagaatatctttggtgtaaagttaaaagttagggttcttgttccattattgctttttgtcagtagttcattataaattctcgagatgggtccgttctctgaatatagaacatcatttccaaatctaacttctagtctagaaataatatcggtcttattcttaaaatctattcccttgatgaagggatcgttaatgaacaaatccttggcctttgattcggctgatctattatctccgttatagacgttacgttgactagtccaaagacttacaggaatagatgtatcgatgatgttgatactatgtgatatgtgagcaaagattgttctcttagtggcatcactatatgttccagtaatggcggaaaactttttagaaatgttatatataaaagaattttttcgtgttccaaacattagcagattagtatgaagataaacactcatattatcaggaacattatcaatttttacatacacatcagcatcttgaatagaaacgataccatcttctggaacctctacgatctcggcagactccggataaccagtcggtgggccatcgctaacaataactagatcatccaacaatctactcacatatgcatctatataatctttttcatcttgtgagtaccctggatacgaaataaatttattatccgtatttccataataaggtttagtataaacagagagagatgttgccgcatgaacttcagttacagtcgccgttggttggtttatttgacctattactctcctaggtttctctataaacgatggtttaatttgtacattcttaaccatatatccaataaagctcaattcaggaacataaacaaattctttgttgaacgtttcaaagtcgaacgaagagtcacgaataacgatatcggatactggattgaaggttaccgttacggtaatttttgaatcggatagtttaagactgctgaatgtatcttccacatcaaacggagttttaatataaacgtatactgtagatggttctttaatagtgtcattaggagttaggccaatagaaatatcattaagttcactagaatatccagagtgtttcaaagcaattgtattattgatacaattattatataattcttcgccctcaatttcccaaataacaccgttacacgaagagatagatacgtgattaatacatttatatccaacatatggtacgtaactgaatcttcccatacctttaacttctggaagttccaaactcagaaccaaatgattaagcgcagtaatatactgatccctaatttcgaagctagcgatagcctgattgtctggaccatcgtttgtcataactccggatagagaaatatattgcggcatatacaaagttggaatttgactatcgactgcgaagacattagaccgtttaatagagtcatccccaccgatcaaagaattaatgatagtattattcattttctatttaaaatggaaaaagcttacaataaactccgtagagaaatatctataatttgtgagttttccttaaagtaacagcttccgtaaacgccgtctttatctcttagtaggtttattgtatttatgaccttttccttatcttcatagaatactaaaggcaacaaagaaatttttggttcttctctaagagctacgtgagacttaaccatagaagccaacgaatccctacatattttagaacagaaataccctacttcaccacccttgtatgtctcaatactaataggtctaaaaaccaaatcttgattacaaaaccaacacttatcaattacactatttgtcttaatagacacatctgccatagatttataatactttggtagtatacaagcgagtgcttcttctttagcgggcttaaagactgctttaggtgctgaaataaccacatctggaaggcttactcgcttagccatttaattacggaactatttttttatacttctaatgagcaagtagaaaacctctcatctacaaaaacgtactcgtgtccataatcctctaccatagttacacgttttttagatctcatatgtgctaaaaagttttcccatactaattggttactattatttttcgtataatttttaacagtttgaggttttagatttttagttacagaagtgatatcgaatattttatccaaaaagaatgaataattaattgtcttagaaggagtgttttcttggcaaaagaataccaagtgcttaaatatttctactacttcattaatcttttctgtactcagattcagtttctcatcttttacttgattgattatttcaaagactaacttataatcctttttatttattctctcgttagccttaagaaaactagatacaaaatttgcatctacatcatccgtggatatttgatttttttccatgatatccaagagttccgagataatttctccagaacattgatgagacaataatctccgcaatacatttctcaaatgaataagtttattagacacgtggaagtttgactttttttgtacctttgtacatttttgaaataccgactcgcaaaaaatacaatattcatatccttgttcagatactataccgttatgtctacaaccgctacataatcgtagattcatgttaacactctacgtatctcgtcgtccaatattttatataaaaacattttatttctagacgttgccagaaaatcctgtaatatttttagttttttgggctgtgaataaagtatcgccctaatattgttaccgtcttccgccaatatagtagttaaattatccgcacatgcagaagaacaccgcttaggcggattcagtacaatgttatatttttcgtaccaactcatttaaatatcataatctaaaatagttctgtaatatgtctagcgctaatatattgatcataatcctgtgcataaattaagatacaacaatgtctcgaaatcatcgacatggcttcttccatagttagaagatcgtcgtcaaagttagcaacgtgattcatcaacatttgctgttttgaggcagcaaatactgaaccgtcgccattcaaccattcataaaaaccatcgtctgaatccattgataatttcttgtactggtttttgagagctcgcatcaatctagcatttctagctcccggattgaaaacagaaagaggatcgtacatccagggtccattttctgtaaatagaatcgtataatgtcccttcaagaagatatcagacgatccacaatcaaagaattggtctccgagtttgtaacaaactgcggactttaacctatacatgataccgtttagcataatttctggtgatacgtcaatcggagtatcatctattagagatctaaagccggtgtaacattctccaccaaacatattcttattctgacgtcgttctacataaaacatcattgctccattaacgataacaggggaatgaacagcactacccatcacattagttcccaatggatcaatgtgtgtaactccagaacatcttccatagcctatgttaggaggagcgaacaccactcttccactattgccatcgaatgccatagaataaatatccttggaattgatagaaatcggactgtcggatgttgtgatcatcttcataggattaacaactatgtatggtgccgcctgaagtttcatatcgtaactgatgccgtttataggtctagccacagaaaccaacgtaggtctaaatccaactatagacaaaatagaagccaatatctgttcctcatctgtcataacttgagagcatccagtatgaataatcttcattagatggggatctaccgcatcatcatcgttacaataaaaaattcccattctaatgttcataattgcttttctaatcatggtatgcatgtttgctctctgaatctctgtggaaattagatctgatacacctgtaatcactatcggattatcctccgtaagacgattaaccaacaacatataattataagactttacttttctaaattcataaagttgctggattaggctataggtgtctccatgtacatacgcgttctcgagcgcaggaagtttaataccgaatagtgccatcagaataggatgaatatagtaattagtttctggttttctataaataaaagacaaatcttgtgaactagacatatcggtaaaatgcatggattggaatcgtgtagtcgacagaagaatatgatgattagatggagagtatattttatctaactctttgagttggtcaccgattctaggactagctcgagaatgaataagtactaaaggatgagtacatttcacagaaacactagcattgttcaatgtgctctttacatgggtaaggagttgaaatagctcgtttctatttgttctgacaatatttagtttattcataatgttaagcatatcctgaatagtaaagttagatgtgtcatacttgttagtagttagatatttagcaattgcattcccatcatttctcaatctcgtactccaatcatgcgtggatgctacttcgtcgatggaaaccatacaatcctttttgataggctgttgagattgatcatttcctgcacgtttaggtttggtacgttgatttctagcccctgcggatataaagtcatcgtctacaatttgggacaatgaattgcatacactacaagacaaagatttatcagaagtgtgaatatgatcttcatctaccaaagaaagagtttgattagtataactagattttagtcctgcgttagatgttaaaaaaacatcgctattgaccacggcttccattatttatattcgtagtttttactcgaaagcgtgattttaatatccaatcttattacttttggaatcgttcaaaacctttgactagttgtagaatttgatctattgccctacgcgtatactcccttgcatcatatacgttcgtcaccagatcgtttgtttcggcctgaagttggtgcatatctctttcaacattcgacatgagatccttaagggccatatcgtctagattttgttgagatgctgctcctggatttggattttgttgtgctgttgtacatactgtaccaccagtaggtgtaggagtacatacagtggccacaataggaggttgagaaagtgtaaccgttggagtagtacaagaaatacttccatccgattgttgtgtacatgtagttgttggtaacgtctgagaaggttgggtagatggcggcgtcgtcgttttttgatctttattaaatttagagataatatcctgaacagcattgctcggcgtcaacgctggaaggagtgaactcgccggcgcatcagtatcttcagacagccaatcaaaaagattagacatatcagatgatgtattagtttgttgtcgtggttttggtgtaggagcagtactactaggtagaagaataggagccgatgtagctgttggaaccggctgtggagttatatgaatagttggttgtagcggttggataggctgtctgctggcggccatcatattatctctagctagttgttctcgcaactgtctttgataatacgactcttgagactttagtcctatttcaatcgcttcatcctttttcgtatccggatccttttcttcagaataatagattgacgactttggtgtagaggattctgccagcctctgtgagaacttgttaaagaagtccatttaaggctttaaaattgaattgcgattataagattaaatggcagacacagacgatattatcgactatgaatccgatgatctcaccgaatacgaggatgatgaagaagaggaagaagatggagagtcactagaaactagtgatatagatcccaaatcttcttataagattgtagaatcagcatccactcatatagaagatgcgcattccaatcttaaacatatagggaatcatatatctgctcttaaacgacgctatactagacgtataagtctatttgaaatagcgggtataatagcagaaagctataacttgcttcaacgaggaagattacctctagtttcagaattttctgacgaaacgatgaagcaaaatatgctacatgtaattatacaagagatagaggagggttcttgtcctatagtcatcgaaaagaacggagaattgttgtcggtaaacgattttgacaaagatggtctaaaattccatctagactatattatcaaaatttggaaacttcaaaaacgatattagaatttatacgaatatcgttctctaaatgtcacaatcaagtctcgcatgttcagcaatttattgtcgtactttatatcgtgttcattaacgatatcttgcaaaatagtaatgattctatcttccttcgatagatattcttcagagattattgtcttatattctttcttgttatcagatatgaatttgataagactttgaacattattgatacccgtctgtttaattttttctacagatattttagttttggcagattctatcgtatctgtcaatagacatccaacatcgacattcgacgtcaattgtctataaatcaacgtataaattttagaaataacattagcgaattgttgtgcgttgatgtcgttattctgaaacagtatgattttaggtagcattttcttaacaaagagaacgtatttattgttactcagttgaacagatgatatatccagattactaacgcatctgattccgtataccaaactttcagaagaaatggtatacaattgtttgtattcattcaatgtctctttttcagaaattagtttagagtcgaatactgcaataattttcaagagatagttttcatcagataagattttatttagtgtagatatgataaaactattgttttgttggagaacttgatacgccgcgttctctgtagtcgacgctctcaaatgggaaacaatctccattatttttttggaatcggatactatatcttcggtatcttgacgcagtctagtatacatagagttaagagagattagagtttgtacattaagcaacatgtctctaaatgtggctacaaacttttcctttttcacatcatctagtttattatataccgatttcacaacggcaccagatttaaggaaccagaatgaaaaactctgataactacaatatttcatcatagttacgattttatcatcttctatagttggtgtaatagcgcatacctttttctccaagactggaaccaacgtcataaaaatgtttaaatcaaaatccatatcaacatctgatgcgctaagaccagtctcgcgttcaagattatctttactaatggtgacgaactcatcgtataaaactctaagtttgtccattatttatttacagatttagttgtttaatttatttgtgctcttccagagttgggatagtatttttctaacgtcggtattatattattaggatctacgttcatatgtatcataatattaatcatccacgttttgataaatctatctttagcttctgaaataacgtatttaaacaaaggagaaaaatatttagctacggcatcagacgcaataacattttttgtaaatgtaacgtatttagacgacagatcttcgttaaaaagttttccatctatgtagaatccatcggttgttaacaccattcccgcgtcagattgaataggagtttgaatagtttgttttggaaatagatccttcaataacttatagttgggtgggaaaaaatcgattttatcactagactctttcttttttactatcattacctcatgaactatttcttgaatgagtatatgtattttctttcctatatcggacgcgttcattggaaaatataccatgtcgttaactataagaatatttttatcctcgtttacaaactgaataatatcagatgtagttcgtaaacgaactatatcatcaccagcacaacatctaactatatgatatccactagtttcctttagccgtttattatcttgttccatattagcagtcattccatcatttaagaaggcgtcaaaaataatagggagaaatgacattttggattctgttacaactttaccaaaattaaggatatacggacttactatctttttctcaacgtcaatttgatgaacacacgatgaaaatgtgcttctatgagattgatcatgtagaaaacaacaagggatacaatatttccgcatatcatgaaatatattaagaaatcccaccttattatatttccccaaaggatccatgcacgtaaacattatgccgttatcattaataaagacttctttctcatcggatctgtaaaagttgttactgatttttttcattccaggatctagataattaataatgatgggttttctattcttattctttgtattttggcatatcctagaccagtaaacagtttccactttggtaaaatcagcagacttttgaacgctattaaacatggcattaatggcaataactaaaaatgtaaaatatttttctatgttaggaatatggtttttcactttaatagatatatggtttttggccaaaatgatagatatttttttatccgaggatagtaaaatattattagtcgccgtctctataaaaatgaagctagtctcgatatccaattttattctagaattgataggagtcgccaaatgtaccttatacgttatatctcccttgatgcgttccatttgtgtatctatatcggacacaagatctgtaaatagttttacgttattaatcatcacggtatcgccgtcgctagataacgctaatgtaccatccaagtcccaaatggagagatttaactgttcatcgtttagaataaaatgattaccggtcatattaataaagtgttcatcgtatctagataacaacgacttataattaatgtccaagtcttgaactcgctgaatgatcttttttaacccagttagttttagattggtacgaaatatattgttaaactttgattctacagtaatgtccaaatctagttgtggaaatacttccatcaacattgtttcaaacttgataatattattatctacatcttcgtacgatccaaattccggaatagatgtatcgcacgctctggccacccagataaccaaaaagtcacacgctccaggatatacattgtataaaaagctatcgttttttagtagggtttttttctgcgtgtatacgaagggattaaaaatagtattatcaacgtaactatattccaaattattcttatgagaatagataataatatcgtccttaatatctaacaaatttcctaaatatccctttaattgagtcattcgaagcgtcaatagaatatgtctcttaactatttccggctgttgtatatttaaatgacttcgtaaaaaataatatatgggcgacttctcatctatgtaatcatatggagtgagatatagggctcgttctacctcctgccccttacccacctgtaataccaattgcggacttactatatatcgcatatttatatcgtggggtaaagtgaaaatctactaccgatgatgtaagtcttacaatgttcgaaccagtaccagatcttaatttggaggcctccgtagaactaggggaggtaaatatagatcaaacaacacctatgataaaggagaatagcggttttatatcccgcagtagacgtctattcgcccatagatctaaggatgatgagagaaaactagcactacgattctttttacaaagactttattttttagatcatagagagattcattatttgttcagatgcgttgacgctgtaaaagacgtcactattaccaaaaaaaataacattatcgtggcgccttatatagcacttttaactatcgcatcaaaaggatgcaaacttacagaaacaatgattgaagcattctttccagaactatataatgaacatagtaagaaatttaaattcaactctcaagtatccatcatccaagaaaaactcggataccagtttggaaactatcacgtttatgattttgaaccgtattactctacagtagctctggctattcgagatgaacattcatctggcatttttaatatccgtcaagagagttatctggtaagttcattatctgaaataacatatagattttatctaattaatctaaaatctgatcttgttcaatggagtgctagtacgggcgctgtaattaatcaaatggtaaatactgtattgattacagtgtatgaaaagttacaactggtcatagaaaatgattcacaatttacatgttcattggctgtggaatcaaaacttccaataaaattacttaaagatagaaatgaattatttacaaaattcattaacgagttaaaaaagaccagttcattcaagataagcaaacgcgataaggatacgctactaaaatattttacttaggactggagttagaatttatagacgactcatttcgtttatcattgttactattattactattactatcattattagtgttggcattattagtattcttcttgtcatcttgttcagaaatatacagcaatgctatacctaatactaaatacattatcatgctcgcaatggctctaacaacaacgaaccaaaatgaatttggtcgtagcttttgttcacaaaaatacataaagaaatgtctacataaatctatggcgccattggctacttgaaatagcgccagtcctcctacagattttaatatagctgtataacatgacatttattcatcatcaaaagagacagagtcaccatctgtcatatttagattttttttcatgtgttcaaagtatcctctactcatttcattataatagtttatcatacttagaattttaggacggatcaatgagtaagacttgactagatcgtcagtagtaatttgtgcatcgtctattctgcatccgcttcgtcgaataatgtatagcatcgctttgagattctccatagctatcaagtctttatacaatgacatggaaatatctgtgaatactttatacttctccaacatcgatgccttaacatcatcgcctactttagcattgaaaatacgttctattgtgtagatggatgtagcaagatttttaaacaacaatgccatcttacacgatgattgcctcaagtctccaatcgtttgtttagaacgattagctacagagtccaatgcttggctgactagcatattattatctttagaaattgtattcttcaatgaggcgtttatcatatctgtgatttcgttagtcatattacagtctgactgggttgtaatgttatccaacatatcacctatggatacggtacacgtaccagcatttgtaataatcctatctaagatgttgtatggcattgcgcagaaaatatcttctcctgtaatatctccactctcgataaatctactcagattattcttaaatgccttattctctggagaaaagatatcagtgtccatcatttcattaatagtatacgcagaaaagataccacgagtatcaattctatccaagatacttatcggttccgagtcacagataatggtttcctctccttcgggagatcctgcatagaaatatctaggacaatagtttctatactgtctgtaactctgataatctctaaagtcactaactgataccatgaaattgagaagatcaaacgctgaagtaattaatttttctgcctcgtttttactacaactagttttcatcaatgtagtgacgatgtattgtttagttacttttggtctaatactgatgatagagatattattgcttcccataatggatcttctagtagtcaccttaaagcccattgatgcgaatagcagatagataaagtcttggtatgactcctttctaatatagtacggactacctttgtcacccaactttatacccacataagccataacaacctctttaatagccgtttcatgaggtttatcagccatgagcctgagtagttggaagaatctcatgaatcccgtctcagaaagtcctatatgcatgatagatttatctttcctgggaaactctcgtatagtcatagatgaaatactctttaaagtttctgaaataagattagtaacagtcttacctccgactactctaggtaacaaacaaactctaataggtgttttctctgcggagataatatcagaaaggatagagcaataagtagtattattgtgattataaagaccgaatacataacaggtagaatttataaacatcatgtcctgaaggtttttagacttgtattcctcgtaatccataccgtcccaaaacatggatttggtaactttgatagccgtagatctttgttccttcgccaacaggttaaagaaattaataaagaatttgttgtttctatttatgtccacaaattgcacgtttggaagcgccacggttacattcactgcagcattttgaggatcgcgagtatgaagtacgatgttattgtttactggtatatctggaaagaaatctaccagtctaggaataagagattgatatcgcatagaaatagtaaagtttataatctcatcatcgaagagcattttgttaccattgtaataaatatccactctgtcatatgtataaatgaagtactgttcaaacatgatgagatgtttatatgttggcatagtagtgagatcgacgtttggtaatggcaatgtattaagattaactccataatgtctagcagcatctgcgatgttataagcgtcgtcaaagcggggtcgatcttgtattgttatatattgtctaacacctataagattatcaaaatcttgtctgcttaatacaccgttaacaatttttgccttgaattcttttattggtgcattaataacatccttatagaggatgttaaacaaataagtgttatcaaagttaagatctggatatttcttttctgctagaacatccattgagtcggagccatctggtttaatataaccaccgataaatctagctctgtattctgtatccgtcaatctaatattaagaaggtgttgagtgaaaggtggaagatcgtaaaagctgtgagtattaatgataggattagtttccgaactaatgttaattggggtattaataatatctatatttccagcgttaagtgtaacattaaacagttttaattcacgtgacgtggtatcaattaaataattaatgcccaatttggatatagcagcctgaagctcatcttgtttagttacggatcctaatgagttattaagcaatatatcgaacggatgaacgaaggttgttttaagttggtcacatactttgtaatctagacatagatgcggaagaacggtagaaactatacgaaataaatattcagagtcctctaattgatcaagagtaactattgacttaataggcatcatttatttagtattaaatgacgaccgtaccagtgacggatatacaaaacgatttaattacagagttttcagaagataattatccatctaacaaaaattatgaaataactcttcgtcaaatgtctattctaactcacgttaacaacgtggtagatagagaacataatgccgccgtagtgtcatctccagaggaaatatcctcacaacttaatgaagatctatttccagatgatgattcaccggccactattatcgaacgagtacaacctcatactactattattgacgatactccacctcctacgtttcgtagagagttattaatatcggaacaacgtcaacaacgagaaaaaagatttaatattacagtatcgaaaaatgctgaagcaataatggaatctagatctatgataacttctatgccaacacaaacaccatccttgggagtagtttatgataaagataaaagaattcagatgttagaggatgaagtggttaatcttagaaatcaacgatctaatacaaaatcatctgataatttagataattttaccaaaatactatttggtaagactccgtacaaatcaacagaagttaataagcgtatagccatcgttaattatgcaaatttgaacgggtcccccttatcagtcgaggacttggatgtttgttcggaggatgaaatagatagaatctataaaacgattaaacaatatcacgaaagtagaaaacgaaaaattatcgtcactaacgtgattattattgtcataaacattatcgagcaggcattgctaaaactcggatttgaagaaatcaaaggactgagtaccgatatcacttcagaaattatcgatgtggagatcggagatgactgcgatgctgtagcatctaaactaggaatcggtaacagtccggttcttaatattgtattgtttatactcaagatattcgttaaacgaattaaaattatttaatttaatacattcccatatccagacaacaatcgtctggattaatctgttcctgtcgtctcataccggacgacatattaatctttttattagtgggcatctttttagatggtttctttttcccagcattaactgagtcgatacctagaagatcgtgattgatctctccgaccattccacgaacttctaattggccgtctctgacggtaccataaactattttaccagcattagtaacagcttggacaatctgaccatccatcgcattgtacgatgtagtagtaactgttgttctacgtctaggagcaccagaagtatttttggagcccttggatgttgatgtagaagaagacgaggattttgattttggtttacatgtaatacattttgaactctttgattttgtatcacatgcgccggcagtcacatctgtttgagaattaagattattgttgcctcctttgacggctgcatctccaccgatttgcgctagtagatttttaagctgtggtgtaatcttattaactgtttcgatataatcatcgtaactgcttctaacggctaaattttttttatccgccatttagaagctaaaaatatttttatttatgcagaagatttaactagattatacaatgaactaatatgatccttttccagattatttacaaacttggtattttttggttctggaggaggcgaatttaaattcggacttggattcggattttgtaagttcttgatcttattatacatcgagtataggatggcgacagtaactgctacacaaataccgatcaaaagaagaataccaatcatttattgacaataacttcactattgatcaagtatgcaatatatcatcttttcactaaataagtagtaataatgattcaacaatgtcgagatatatggacgataataatttagttcatggaaatatcgctatgattggtgtgaatgactccgctaactctgtggggtgcgcagtgctttccccacatagaataaattagcattccgactgtgataataataccaagtataaacgccataatactcaatactttccatgtacgagtgggactggtagacttactaaagtcaataaaggcgaagatacacgaaagaatcaaaagaatgattccagcgattagcacgccggaaaaataatttccaatcataagcatcatgtccatttaactaataaaaattttaaatcgccgaatgaacaaagtggaatataaaccatataaaaacaatagtttgtactgcaaaaataatatctatttttgttttcgaagatatggtaaaattaaatagtagtacacagcatgttataactaacagcagcaacggctcgtaattacttatcatttactagacgaaaaggtggtgggatattttcttgctcaaataatacgaatatatcacccatccattttatgcgatgtttatatactctaatctttaatagatctatagacgacgggtttaccaacaatatagattttatcgattcatctaatttaaacccttccttaaacgtgaatgatctattatctggcataacgatgaccctacctgatgaatcggacaatgtactgggccatgtagaataaattatcaacgaattatcgtctacgaacatttatatcatttgttttaattttaggacgcgaataaatggatataaaatagaaaataacagatattacaaccagtgttatggccgcgcccaaccaggtaggcagttttattttatcttttactacaggttctcctggatgtacgtcaccaacggcggacgtagttctagtacaattagacgtaagttccgcttgggaattttttaacgctaaagagttaacgttaatcgtgcacccaacgtatttacatctagttcgttgaacatcttgattataatataaccattttctatctctagattcgtcagtgcactcatgtaaccaacataccctaggtcctaaatatttatctccggaattagattttggataattcgcgcaccaacaatttctatttcctttatgatcgttacaaaagacgtataatgccgtatccccaaaagtaaaataatcaggacgaataattctaataaactcagaacaatatctcgcatccatatgtttggagcaaatatcggaataagtagacatagccggtttccgttttgcacgtaaccattctaaacaattggggtttccaggatcgtttctacaaaatccagtcatgaaatcgtcacaatgttctgtcttgtaattattattaaatatttttggacagtgtttggtatttgtcttagaacaacattttgccacgctatcactatcgcccaggagataatccttttttataaaatgacatcgttgcccggatgctatataatcagtagcgtgttttaaatccttaatatattcaggagttacctcgttctgataatagattaatgatccaggacgaaatttgaaagaactacatggttctccatgaattaatacatattgtttagcaaattcaggaactataaaactactacaatgatctatcgacataccatctatcaaacaaaacttgggtttaatttctcccggagatgtttcataatagtacgtataactttcttctgcaaacttaacagctctattatattcaggataattaaaacctaattccatatatttgtctcgtatatctgctattcctggtgctattttgattctattaagagtaacagctgcccccattcttaataatcgtcagtatttaaactgttaaatgttggtatatcaacatctaccttatttcccgcagtataaggtttgttgcaggtatactgttcaggaatggttacatttatacttcttctatagtcctgtctttcgatgttcatcacatatgcaaagaacagaataaacaaaataatgtaagaaataatattaaatatctgtgaattcgtaaatacattgattgccataataattacagcagctacaatacacacaatagacattcccacagtgttgccattacctccacgatacatttgagttactaagcaataggtaataactaagctagtaagaggcaatagaaaagatgagataaatatcatcaatatagagattagaggagggctatatagagccaagacgaacaaaatcaaaccgagtaacgttctaacatcattatttttgaagattcccaaataatcattcattcctccataatcgttttgcatcatacctccatctttaggcataaacgattgctgctgttcctctgtaaataaatctttatcaagcactccagcacccgcagagaagtcgtcaagcatattgtaatatcttaaataactcatttatatattaaaaaatgtcactattaaagatggagtataatctttatgccgaactaaaaaaaatgacttgtggtcaacccctaagtctttttaacgaagacggggatttcgtagaagttgaaccgggatcatcctttaagtttctgatacctaagggattttacgcctctccttccgtaaagacgagtctagtattcgagacattaacaacgaccgataataaaatcactagtatcaatccaacaaatgcgccaaagttatatcctcttcaacgcaaagtcgtatctgaagtagtttctaatatgaggaaaatgatcgaatcaaaacgtcctctatacatcactcttcacttggcgtgtggatttggtaagactattaccacgtgttatcttatggctacacacggtagaaaaaccgtcatttgcgtacccaataaaatgttaatacatcaatggaagacacaggtagaggcagtcggattggaacataagatatccatagatggagtaagtagtctattaaaggaactaaagactcaaagtccggatgtattaatagtagtcagtagacatctgacaaacgatgccttttgtaaatatatcaataagcattatgatttgttcatcttggatgaatcacatacgtataatctgatgaacaatacagcagttacaagatttttagcgtattatcctccgatgatgtgttattttttaactgctacacctagaccatctaaccgaatttattgtaacagtattattaatattgccaagttatccaatctaaaaaaaactatctatgcagtagatagtttttttgagccatattccacagataatattagacatatggtaaaacgactagatggaccatctaataaatatcatatatataccgagaagttattatctgtagacgagcctagaaatcaacttattcttgataccctggtagaagaattcaagtcaggaactattaatcgcattttagttattactaaactacgtgaacatatggtattattctacaaacgattattagattttttcggaccagaggttgtatttataggagacgcccaaaatagacgtactccagatatggtcaaatcaatcaaggaactaaatagatttatattcgtatccaccttattttattccggtactggtttagatattcctagtttggattcgttgttcatttgctcggcagtaatcaacaatatgcaaatagagcaattactagggagggtatgtcgagaaacagaactattagataggacggtatatgtatttcctaacacatccatcaaagaaataaagtacatgataggaaatttcatgcaacgaattattagtctgtctgtagataaactaggatttaaacaaaaaagttatcggaaacatcaagaatccgatcccacttctgcatgtacaacatcatccagagaagaacgtgtattaaatagaatatttaactcgcaaaatcgttaagaagtttaagcgacgatccgcatgctgcgcaggccagtgtattacccctcatagtattaatataatccaatgatacttttgtgatgtcggaaatcttaaccaatttagactgacaggcagaacacgtcatgcaatcatcatcgtcatcgataactgtagtcttgggcttctttttgcgactcttcattccggaacgcacattggtgctatccatttaggtagtaaaaaataagtcagaatatgccctataacacgatcgtgcaaaacctggtatatcgtctctatctttatcacaatatagtgtatcgacatttttattattattgacctcgtttatcttggaacatggaatgggaacatttttgttatcaacggccatctttgccttaattccagatgttgtaaaattataactaaacagtctatcatcgacacaaatgaaattcttgtttagacgtttgtagtttacgtatgcggctcgttcgcgtctcattttttcagatattgcaggtactataatattaaaaataagaatgaaataacataggattaaaaataaagttatcatgacttctagcgctgatttaactaacttaaaagaattacttagtctgtacaaaagtttgagattttcagattctgcggctatagaaaagtataattctttggtagaatggggaacatctacttactggaaaataggcgtgcaaaaggtagctaatgtcgagacgtcaatatctgattattatgatgaggtaaaaaataaaccgtttaatattgatccgggctattacattttcttaccggtatattttgggagcgtctttatttattcgaagggtaaaaatatggtagaacttggatctggaaactcttttcaaataccagatgatatgcgaagtgcgtgtaacaaagtattagacagcgataacggaatagactttctgagatttgttttgttaaacaatagatggataatggaagatgctatatcaaaatatcagtctccagttaatatatttaaactagctagtgagtacggattaaacatacccaaatatttagaaattgaaatagaggaagacacattatttgacgacgagttatactctattatagaacgctctttcgatgataaatttccaaaaatatccatatcgtatattaagttgggagaacttagacggcaagttgtagactttttcaaattctcattcatgtatattgagtccatcaaggtagatcgtataggagataatatttttattcctagcgttataacaaaatcaggaaaaaagatattagtaaaagatgtagaccatttaatacgatccaaggttagagaacatacatttgtaaaagtaaaaaagaaaaacacattttccattttatacgactatgatggaaacggaacagaaactagaggagaagtaataaaacgaattatagacactataggacgagactattatgttaacggaaagtatttctctaaggttggtagtgcaggcttaaagcaattgactaataaattagatattaatgagtgcgcaactgtcgatgagttagttgatgagattaataaatccggaactgtaaaacgaaaaataaaaaaccaatcagcatttgatttaagcagagaatgtttgggatatccagaagcggattttataacgttagttaataacatgcggttcaaaatagaaaattgtaaggttgtaaatttcaatattgaaaatactaattgtttaaataacccgagtattgaaactatatatggaaactttaaccagttcgtctcaatctttaatgtcgtcaccgatgtcaaaaaaagattattcgagtgaaataatatgcgcctttgatataggtgcaaaaaatcctgccagaactgttttagaagtcaaggataactccgttagggtattggatatatcaaaattagactggagttctgattgggaaaggcgcatagctaaagatttgtcacaatatgaatacactacagttcttctagaacgtcagcctagaaggtcgccgtatgttaaatttatctattttattaaaggctttttatatcatacatcggctgccaaagttatttgcgtctcgcctgtcatgtctggtaattcatatagagatcgaaaaaagagatcggtcgaagcatttcttgattggatggacacattcggattgcgagactccgttccggatagacgcaaattagacgatgtagcggatagtttcaatttggctatgagatacgtattagataaatggaatactaattatacaccttataataggtgtaaatctagaaattacataaaaaaaatgtaataacgttagtaacgccattatggataatctatttacctttctacatgaaatagaagatagatatgccagaactatttttaactttcatctaataagttgcgatgaaataggagatatatatggtcttatgaaagaacgcatttcctcagaggatatgtttgataatatagtgtataataaagatatacatcctgccattaagaaactagtgtattgcgacatccaacttactaaacacattattaatcagaatacgtatccggtatttaacgattcttcacaagtgaaatgttgtcattatttcgacataaactcagataatagcaatattagctctcgtacagtagagatatttgagagggaaaagtcatctcttgtatcatatattaaaactaccaataagaagagaaaggtcaattacggcgaaataaagaaaactgttcatggaggcactaatgcaaattacttttccggtaaaaagtctgacgagtatctgagtactacagttagatccaacattaatcaaccttggatcaaaaccatctctaagaggatgagagttgatatcattaatcactctatagtaacgcgtggaaaaagctctatattacaaactatagaaattatttttactaatagaacatgtgtgaaaatattcaaggattctactatgcacattattctatccaaggacaaggatgaaaaggggtgtatacacatgattgacaaattattctatgtctattataatttatttctgttgttcgaagatatcatccaaaacgagtactttaaagaagtagctaatgttgtaaaccacgtactcacggctacggcattagatgagaaattattcctaattaagaaaatggctgaacacgatgtttatggagttagcaatttcaaaatagggatgtttaacctgacatttattaagtcgttggatcataccgttttcccctctctgttagatgaggatagcaaaataaagttttttaaggggaaaaagctcaatattgtagcattacgatctctggaggattgtataaattacgtgactaaatccgagaatatgatagaaatgatgaaggaaagatcgactattttaaatagcatagatatagaaacggaatcggtagatcgtctaaaagaattgcttctaaaatgaaaaaaaacactaattcagaaatggatcaacgactagggtataagtttttggtgcctgatcctaaagccggagttttttatagaccgttacatttccaatatgtatcgtattctaattttatattgcatcgattgcatgaaatcttgaccgtcaagcggccactcttatcgtttaagaataatacagaacgaattatgatagaaattagcaatgttaaagtgactcctccagattactcacctataatcgcgagtattaaaggtaagagttatgacgcattagccacgttcactgtaaatatctttaaagaggtaatgaccaaagagggtatatccatcactaaaataagtagttatgagggaaaagattctcatttgataaaaattccgctactaataggatacgggaataaaaatccacttgatacagccaagtatcttgttcctaatgtcataggtggagtctttatcaataaacaatctgtcgaaaaagtaggaattaatctagtagaaaagattacaacatggccaaaatttagggttgttaagccaaactcattcactttctcgttttcctccgtatcccctcctaatgtattaccgacaagatatcgccattacaagatatctctggatatatcacaattggaagcgttgaatatatcatcgacaaagacatttataacggtcaatattgttttgctgtctcaatatttatctagagtgagtctagaattcattagacgtagtttatcatacgatatgcctccagaagttgtctatctagtaaacgcgataatagatagtgctaaacgaattactgaatctattactgactttaatattgatacatacattaatgacctggtggaagctgaacacattaaacaaaaatctcagttaacgatcaacgagttcaaatatgaaatgctgcataactttttacctcatatgaactatacacccgatcaactaaagggattttatatgatatctttactaagaaagtttctctactgtatcttccacacttctagatatccagatagagattcgatggtttgtcatcgcatcctaacgtacggcaaatattttgagacgttggcacatgatgaattagagaattacataggcaacatccgaaacgatatcatgaacaatcacaagaacagaggcacttacgcggtaaacattcatgtactaacaactcccggacttaatcacgcgttttctagcttattgagtggaaagttcaaaaagtcagacggtagttatcgaacacatcctcactattcatggatgcagaatatttctattcctaggagtgttggattttatccggatcaagtaaagatttcaaagatgttttctgtcagaaaataccatccaagtcaatatctttacttttgttcatcagacgttccggaaagaggtcctcaggtaggtttagtatctcaattgtctgtcttgagttccattacaaatatactaacgtctgagtatttggatttggaaaagaaaatttgtgagtatatcagatcatattataaagatgatataagttactttgaaacaggatttccaatcactatagaaaatgctctagtcgcatctcttaatccaaatatgatatgtgattttgtaactgactttagacgtagaaaacggatgggattcttcggtaacttggaggtaggtattactttagttagggatcacatgaatgaaattcgcattaatattggagcgggaagattagtcagaccattcttggttgtggataacggagagctcatgatggatgtgtgtccggagttagaaagcagattagacgacatgacattctctgacattcagaaagagtttccgcatgtcatcgaaatggtagatatagaacaatttacttttagtaacgtatgtgaatcggttcaaaaatttagaatgatgtcaaaggatgaaagaaagcaatacgatttatgtgactttcctgccgaatttagagatggatatgtagcatcttcattagtgggaatcaatcacaattctggacccagagctattcttggatgtgctcaagctaaacaagctatctcttgtctgagctcggatatacgaaataaaatagacaatggaattcatttgatgtatccagagaggccaatcgtgattagtaaggctttagaaacttcaaagattgcggctaattgcttcggccaacatgttactatagcattaatgtcgtacaaaggtatcaatcaagaggatggaattatcatcaaaaaacaatttattcagagaggcggtctcgatattgttacagccaagaaacatcaagtagaaattccattggaaaactttaataacaaagaaagagataggtctaacgcctattcaaaattagaaagtaatggattagttagactgaatgctttcttggaatccggagacgctatggcacgaaatatctcatcaagaactcttgaagatgattttgctagagataatcagattagcttcgatgtttccgagaaatataccgatatgtacaaatctcgcgttgaacgagtacaagtagaacttactgacaaagttaaggtacgagtattaaccatgaaagaaagaagacccattctaggagacaaatttaccactagaacgagtcaaaagggaacagtcgcgtatgtcgcggatgaaacggaacttccatacgacgaaaatggtatcacaccagatgtcattattaattctacatccatcttctctagaaaaactatatctatgttgatagaagttattttaacagccgcatattctgctaagccgtacaacaataagggagaaaaccgacctgtctgttttcctagtagtaacgaaacatccatcgatacatatatgcaattcgctaaacaatgttatgagcattcaaatccgaaattgtccgatgaagaattatcggataaaatcttttgtgaaaagattctctatgatcctgaaacggataagccttatgcatccaaagtattttttggaccaatttattacttgcgtctgaggcatttaactcaggacaaggcaaccgttagatgtagaggtaaaaagacgaagctcattagacaggcgaatgagggacgaaaacgtggaggaggtatcaagttcggagaaatggagagagactgtttaatagcgcatggtgcagccaatactattacagaagttttgaaagattcggaagaagattatcaagatgtgtatgtttgtgaaaattgtggagacatagcagcacaaatcaagggtattaatacatgtcttagatgttcaaaacttaatctctctcctctcttaacaaaaattgataccacgcacgtatctaaagtatttcttactcaaatgaacgccagaggcgtaaaagtcaaattagatttcgaacgaaggcctccttcgttttataaaccattagataaagttgatctcaagccgtcttttctggtgtaatattctagtttggtagtagatacatatcaatatcatcaaattcgagatccgaattataaaatgggcgtggattgttaactatagaatcggacgtctgatattcgaaaatctgtggagtttcaggttttggtggaggtgtaactgctacttgggatactgaagtctgatattcagaaagctgtggatgttctggttcggcatccaccgatggtgtcacatcactaatcggttcggtaacgtctgtggatggaggtgctacttctacagaacctgtagcctcagttgtcaacggagatacatttttaatgcgagaaaatgtataatttggtaatggtttcttatgtggatctgaagaagaggtaagatatctactagaaagataccgatcacgttctagttctcttttgtagaacttaactttttctttctccgcatctagttgatattccaacctcttcacgttactacgttcagattccaattcacgttcgcatgggttacctccgcagtttttacgagcgatttcacgttcagccttcatgcgtctctccctctctctatcgagtttatcagagcagtctttctgaaggcgatcgaactccataaatttctccaacgctttgattgtttccatagatttccgaagttcagcttttaggactgtgattctttttctttcgaattcacagctggatgtacaaccgtttccattaccgccatctctaagtttcttttctagatcggcaacatttcatccccatgccttttacattcctcgagtctactgtcgtcgaaatatcgttccagctccttttcgacatcaataactttagcacgttgtctctcaagctctcttttgtagttatctgattccctggcacgtttaagatcttcatgcaattgagtcagctcttaacttcctctcttgcttcttcgtcatagtacgcgcaatcactgtgagatccattgttaccacgtctacactcggcgagctcgcgtttaagagattcaatttcccgtttgtattggtccatgtttccattgctaccaccattagatttacaggctgctagttgtcgttcgagatcagaaatacgggttttcttggaattgatttcgtcgatgtacttggcatcgaaacacttattaagttctttttccaattctacgattttatttctttcgcgagtcaattccctcctgtagtaactatctgttttgtcagattcacgctctctacgtagactttcttgcaagttactaatttgttccctagcacgtccgagtttagttttatatgctgaatagagttctgattcatcctttgagcagatctctagcgatcgtttaagattcctaattctagtctttagcctatttacctcctcagaagatgttccgttaccgttgcgtttacactcgttaagctgtctatcaagatccatgattctatctctaagacgttgcatctctctttccatatcagcattgctttcattattacgtctgcagtcactcaactgtctttcaatatctgagattctatctctaagacgtcgcatctctctctgtttcggcattggtttcattattacgtttacagtcgttcaactgtctttcaagatctgatattctagattggagtctgctaatctctgtagcattttcacggcattcactcagttgtctttcaagatctgaaattttagattggagtctgctaatctctgtaagatttcctcctccgctctcgatgcagtcggtcaacttattctctagttctctaatacgcgaacgcagtgcatcaacttcttgcgtgtcttcctggttgcgtgtacattcatcgagatctctaacgcgtcgtcgttcttcctcaagttctctgcgtactacagaaagcgtgtccctatcttgttgatatttagcaatttctgattctagagtactgattttgcttacgtagttactaatagttgtcttggccttatcaagatcctccttgtatttgtcgcattccttgatatccctacgaagtctggacagttcccattcgacattacgacgtttatcgatttcagctcggagatcgtcatcgcgttgttttagccacatacgactgagttcaagttctcgttgacaagatccatctacttttccattcctaatagtatccagttccttttctagttctgaacgcatttctcgttccctatcaagcgattctctcaattctcggatagtcttcttatcaatttctaataaatctgaaccatcatctgtcccattttgaatatccctgtgttctttgatctcttttgtaagtcggtcgattctttcggttttataaacagaatccctttccaaagtcctaatcttactgagtttatcactaagttctgcattcaattcggtgagttttctcttggcttcttccaactctgttttaaactctccactatttccgcattcttcctcgcatttatctaaccattcaattagtttattaataactagttggtaatcagcgattcctatagccgttcttgtaattgtgggaacataattaggatcttctaatggattgtatggcttgatagcatcatctttatcattattagggggatggacaaccttaattggttggtcctcatctcctccagtagcgtgtggttcttcaataccagtgttagtaataggcttaggcaaatgcttgtcgtacgcgggcacttcctcatccatcaagtatttataatcgggttctacttcagaatattcttttctaagagacgcgacttcgggagttagtagaagaactctgtttctgtatctatcaacgctggaatcaatactcaagttaaggatagcgaatacctcatcgtcatcatccgtatcttctgaaacaccatcatatgacatttcatgaagtctaacgtattgataaatagaatcagatttagtattaaacagatccttaacctttttagtaaacgcatatgtatattttagatctccagatttcataatatgatcacatgccttaaatgtcagtgcttccatgatataatctggaacactaatgggtgacgaaaaagatacagcaccatatgctacgttgataaataaatctgaaccactaagtagataatgattaatgttaagaaagaggaaatattcagtgtataggtatgtcttggcgtcatatcttgtactaaacacgctaaacagtttgttaatgtgatcaatttccaatagattaattagagcagcgggaataccaacaaacatattaccacatccgtattttctatgaatatcacatatcatgttaaaaaatcttgatagaagagcgaatatctcgtctgacttaatgagtcgtagttcagcagcaacataagtcataactgtaaatagaacatactttcctgtagtgttgattctagactccacatcaacaccattattaaaaatagttttatatacatctttaatctgctctccgttaatcgtcgaacgttctagtatacggaaacactttgatttcttatctgtagttaatgacttagtgatatcacgaagaatattacgaattacatttcttgtttttcttgagagacctgattcagaactcaactcatcgttccatagtttttctacctcagtggcgaaatctttggagtgcttggtacatttttcaataaggttcgtgacctccatttattataaaaaatttattcaaaacttaactacaatcgggtaattataagatcgtagatctcccatgtggcggaatactaccatctatcgcatgtggatggacagtaggtaatggccatgggaacagtaatgtttgcatatttatctttcttgctagtattactgcatattgtcccaatgtttcgatgtgatgttctaacctatcaactgccgctgtatcacaacaatagtgtccgatgaaattaagattatgatccaatgtgtttaatatatgattatcaagtcttatacgatccgcgtcttttttgacaggatcaggttcttctacaggaagaagtttcggcctcttatgatattcatgtctgggaaacggtggtctagggtgaggctccggtatcggagtgggttttggattataatcatcatcgtctatgacatcatcttcgacttcgatatttattttgctatcttgatgatgtcctgtatcagttgcattttcagcactcgactgaatattagcgcattcattgtctattattaccatatttctaaacccaaaatgtatgtgttgaacatcagtactatcgttgatgagtcttatagcatgaattcgcttatcgttatcgggtttatcttctgtcaccttagcaattccttttttattaaactctacataatcatatccatttctattgtttgttctaatataaacgagtatagcatcattgctaaatttttcaatagtatcaaaaacagaatatcctaaaccatataatatatattcaggaacactcaaactaaatgtccaggattctcctaaatacgtaaactttaatagtgcgaaatcattcaaaaatctaccacttatagatagatagtacataaatgcgtatagtagtctacctatctctttattatgaaaaccggcattacgatcatatatgtcgtgatatacctgtgatccgtttacgttaaaccataaatacatgggtgatcctataaacatgaatttatttctaattctcagagctatagttaattgaccgtgtaatatttgcttacatgcatacttgatacgcttattaataagatttttatcattgctcgttatttcagaatcgtatatataaggagtaccatcgtgattcttaccagatattatacaaaatactatatataaaatatattgacccacgttagtaatcatataaatgtttaacgttttaaattttgtattcaatgatccattatcatacgctatcatggtcttgtaatattcattctttaaaatataatattgtgttagccattgcattggagctcctaatggagattttctattctcatccattttaggataggctttcataaagtccctaataacttcgtgaataatgtttctatgttttctactgatgcatgtatttgcttcgatttttttatcccatgtttcatctatcatagatttaaacgcagtaatgctcgcaacattaacatcttgaaccgttggtacaattccgttccataaatttataatgttcgccatttatataactcattttttgaatatacttttaattaacaaaagagttaagttactcatatggacgccgtccagtctgaacatcaatctttttagccagagatatcatagccgctcttagagtttcagcgtgattttccaacctaaatagaacttcatcgttgcgtttacaacacttttctatttgttcaaactttgttgttacattagtaatctttttttccaaattagttagccgttgtttgagagtttcctcattgtcgtcttcatcggctttaacaattgcttcgcgtttagcctctggctttttagcagcctttgtagaaaaaaattcagttgctggaattgcaagatcgtcatctccggggaaaagagttccgtccatttaaagtacagattttagaaactgacactctgcgttatttatatttggtacaacacatggattataaatattgatgttaataacatcagaaaatgtaaagtctatacattgttgcatcgtgttaaattttctaatggatctagtattattgggtccaacttctgcctgaaatccaaatatggaagcggatacaaaaccgtttcctggataaaccacacatctccacttttgctttacatcagaaattgtgtcgttgacatcttgaactctcctatctaatgccggtgttccacctatagattttgaatattcgaatgctgcatgagtagcattaaattccttaatattgccataattttcatatattgagtaaccctggataaaaagtaaacacaccgcagccgtcgctaccacaataaaaaaaattgatagagagttcatttataatctattagaagctgacaaaatttttttacacgcatcagacaatgctttaataaatagttcaacatctacttttgtcatatcgaaccgatggtatgattctaacctagaattacatccgaaaaagttgactatgttcatagtcattaagtcattaacaaacaacattccagactctggattataagacgatactgtttcgtcacaattacctaccttaatcatgtgattatgaatattggctattagagcaccttctaagaaatctataatatctttgaaacacgatttaaaatcaaaccacgaatatacttctacgaagaaagttagtttacccataggagaaataactataaatggagatctaaatacaaaatccggatctatgatagttttaacattattatattctctattaaatacctccacatctaaaaatgttaattttgaaactatgtcttcgtttattaccgtacctgaactaaacgctataagctctattgtttgagaactctttaaacgatattcttgaaatacatgtaacaaagtttcctttaactcggtcggtttatctaccatagttacagaatttgtatccttatctataatataataatcaaaatcgtataaagttatataattatcgcgttcagattgtgatcttttcaaatagactaaaaaccccatttctctagtaagtatcttatgtatatgtttgtaaaatatcttcatggtgggaatatgctctaccgcagttagccattcctcattgacagcggtagatgtattagacaaaactattccaatgtttaacaagggccattttacgagattattaaatccttgtttgataaatgtagccaatgagggttcgagttcaacgacgattgaattctcttcccgcggatgctgcatgatgaacgacgggatgttgttcgattgatttggaattctttttcgactttttgtttatattaaatattttaaaatttatagcggatagcaattcatgtaccacggataatgtagacgcgtattgcgcatcgatatctttattattagataaatttatcaataaatgtgagaagtttgcctcgttaaggtcttccatttaaatattatataaacatttgtgtttgtatcttattcgtcttttatggaatagttttttactagtaaagctgcaattacacactttgtccgtaaaacataaatataaacaccagcttttatcaatcgttccaaaaagtcgacggcggacatttttaacatggcatctattttaaatacacttaggtttttggaaaaaacatcattttataattgtaacgattcaataactaaagaaaagattaagattaaacataagggaatgtcatttgtattttataagccaaagcattctaccgttgttaaatacttgtctggaggaggtatatatcatgatgatttggttgtattggggaaggtaacaattaataatctaaagatgatgctattttacatggatttatcatatcatggagtgacaagtagtggagcaatttacaaattgggatcgtctatcgatagactttctctaaataggactattgttacaaaagttaataattatgatgatacattttttgacgacgatgattgatcgctattgcacaattttgtttttgtactttctaatatagtgtttaggttctttttcatatgagaatattgatttactaaaatatctatgtttaacttttgttctatgacgtccttatcggcggtatcggtacatatacgtaattcaccttcacaaaatacggagtcttcgataataatagccaatcgattattggatctagctgtctgtatcatattcaacatgtttaatatatcctttcgtttcccctttacaggcatcgatcgtagcatattttccgcgtctgatatggaaatgttaaaactacaaaaatgcgtaatgttagcccgtcctaatattggtacgtgtctataagtttggcatagtagaataatagacgtgtttaaatgccttccaaagtttaagaattctattagagtattgcattttgatagtttatcgcctacatcatcaaaaataagtaaaaagtgtgctgattttttatgattttgtgcgacagcaatacatttttctatgttacttttagttcgtatcagattatattctagagattcctgactactaacgaaattaatatgatttggccaaatgtatccatcataatctgggttataaacgggtgtaaacaagaatatatgtttatattttttaactagtgtagaaaacagagatagtaaatagatagtttttccagatccagatcctcctgttaaaaccattctaaacggcatttttaataaattttctcttgaaaattgtttttcttggaaacaattcataattatatttacagttactaaattaatttgataataaatcaaaatatggaaaactaaggttgttagtagggaggagaacaaagaaggcacatcgtgatataaataacatttattatcatgatgacaccagaaaacgacgaagagcagacatctgtgttctccgctactgtttacggagacaaaattcagggaaagaataaacgcaaacgcgtgattggtctatgtattagaatatctatggttatttcactactatctatgattaccatgtccgcgtttctcatagtgcgcctaaatcaatgcatgtctgctaacgaggctgctattactgacgccgctgttgccgttgctgctgcatcatctactcatagaaaggttgcgtctagcactacacaatatgatcacaaagaaagctgtaatggtttatattaccagggttcttgttatatattacattcagactaccagttattctcggatgctaaagcaaattgcactgcggaatcatcaacactacccaataaatccgatgtcttgactacctggctcattgattatgttgaggatacatggggatctgatggtaatccaattacaaaaactacatccgattatcaagattctgatgtatcacaagaagttagaaagtatttttgtgttaaaacaatgaactaatatttatttttgtacattaataaatgaaatcgcttaatagacaaactgtaagtaggtttaagaagttgtcggtgccggccgctataatgatgatactctcaaccattattagtggcataggaacatttctgcattacaaagaagaactgatgcctagtgcttgcgccaatggatggatacaatacgataaacattgttatttagatactaacattaaaatgtctacagataatgcggtttatcagtgtcgtaaattacgagctagattgcctagacctgatactagacatctgagagtattgtttagtattttttataaagattattgggtaagtttaaaaaagaccaatgataaatggttagatattaataatgataaagatatagatattagtaaattaacaaattttaaacaactaaacagtacgacggatgctgaagcgtgttatatatacaagtctggaaaactggttaaaacagtatgtaaaagtactcaatctgtactatgtgttaaaaaattctacaagtgacaacaaaaaatgaattaataataagtcgttaacgtacgccgccatggacgccgcgtttgttattactccaatgggtgtgttgactataacagatacattgtatgatgatctcgatatctcaatcatggactttataggaccatacattataggtaacataaaaactgtccaaatagatgtacgggatataaaatattccgacatgcaaaaatgctactttagctataagggtaaaatagttcctcaggattctaatgatttggctagattcaacatttatagcatttgtgccgcatacagatcaaaaaataccatcatcatagcatgcgactatgatatcatgttagatatagaagataaacatcagccattttatctattcccatctattgatgtttttaacgctacaatcatagaagcgtataacctgtatacagctggagattatcatctaatcatcaatccttcagataatctgaaaatgaaattgtcgtttaattcttcattctgcatatcagacggcaatggatggatcataattgatgggaaatgcaatagtaattttttatcataaaagttgtaaagtaaataataaaacaataaatattgaactagtagtacgtatattgagcaatcagaaatgatgctggtacctcttatcacggtgaccgtagttgcgggaacaatattagtatgttatatattatatatttgtaggaaaaagatacgtactgtctataatgacaataaaattatcatgacaaaattaaaaaagataaagagttctaattccagcaaatctagtaaatcaactgatagcgaatcagactgggaggatcactgtagtgctatggaacaaaacaatgacgtagataatatttctaggaatgagatattggacgatgatagcttcgctggtagtttaatatgggataacgaatccaatgttatggcgcctagcacagaacacatttacgatagtgttgctggaagcacgctgctaataaataatgatcgtaatgaacagactatttatcagaacactacagtagtaattaatgaaacggagactgttgaagtacttaatgaagataccaaacagaatcctaactattcatccaatcctttcgtaaattataataaaaccagtatttgtagcaagtcaaatccgtttattacagaacttaacaataaatttagtgagaataatccgtttagacgagcacatagcgatgattatcttaataagcaagaacaagatcatgaacacgatgatatagaatcatcggtcgtatcattggtgtgattagtttcctttttataaaattgaagtaatatttagtattattgctgccgtcacgttgtacaaatggagatattccctgtattcggcatttctaaaattagcaattttattgctaataatgactgtagatattatatagatacagaacatcaaaaaattatatctgatgagatcaatagacagatggatgaaacggtacttcttaccaacatcttaagcgtagaagttgtaaatgacaatgagatgtaccatcttattcctcatagattatcgacgattatactctgtattagttctgtcggaggatgtgttatctctatagataatgacatcaatggcaaaaatattctaacctttcccattgatcatgctgtaatcatatccccactgagtaaatgtgtcgtagttagcaagggtcctacaaccatattggttgttaaagcggatatacctagcaaacgattggtaacatcgtttacaaacgacatactatatgtaaacaatctgtcactgattaattatttgccgttgtctgtattcattattagacgagtcaccgactatttggatagacacatatgcgatcagatatttgctaataataagtggtattcccttataaccatcgacgataagcaatatcctattccatcaaactgtataggtatgtcctctgccaagtacataaattctagcatcgagcaagatactttaatccatgtttgtaacctcgagcatccgttcgactcagtatacaaaaaaatgcagtcgtacaattctctacctatcaaggaacaaatattgtacggtagaattgataatataaatatgagcattagtatttctgtggattaatagatttctagtatggggatcattaatcatctctaatctctaaatacctcataaaacgaaaaaaaagctattatcaaatactgtacggaatggattcattctcttctctttttatgaaactctgttgtatatctactgataaaactggaagcaaaaaatctgatagaaagaataagaataagatcaaggattatatggaacacgattattataaaataacaatagttcctggttcctcttccacgtctactagctcgtggtattatacacatgcctagtaatagtctctttgcgttgacggaaagcagactagaaataacaggctaaaatgttcagacaccataatagttcccaacccagataataacagagttccatcaacacattcctttaaactcaatcccaaacccaaaaccgttaaaatgtatccggccaattgatagtagataatgaggtgtacagcgcatgataatttacacagtaaccaaaatgaaaatactttagtaattataagaaatatagacggtaatgtcatcatcaacaatccgataatatgcctgagagtaaacattgacggataaaacaaaaatgctccgcataactctatcatggcaataacacaaccaaatacttgtaagattcctaaattagtagaaaatacaacgaatatcgatgtataagtgatctcgagaaataataagaataaagtaatgcccgtaaagataaacatcaacattgtttggtaatcattaaaccaattagtatgaagttgaactaatttcacagtagattttattccagtgttatcctcgcatgtataagtacctggtaagatatctttatattccataatcaatgagacatcactatctgataacgaatgaagtctagcactagtatgccatttacttaatattgtcgtcttggaagttttattataagttaaaatatcatggttatccaatttccatctaatatactttgtcggattatctatagtacacggaataatgatggtatcattacatgctgtatactctatggtctttgtagttgttataacaaccaacgtatagaggtatatcaacgatattctaactcttgacattttttatttatttaaaatgatacctttgttatttattttattctattttgctaacggtattgaatggcataagtttgaaacgagtgaagaaataatttctacttacttattagacgacgtattatacacgggtgttaatggggcggtatacacattttcaaataataaactaaacaaaactggtttaactaataataattatataacaacatctataaaagtagaggatgcggataaggatacattagtatgcggaaccaataacggaaatcccaaatgttggaaaatagacggttcagacgacccaaaacatagaggtagaggatacgctccttatcaaaatagcaaagtaacgataatcagtcacaacggatgtgtactatctgacataaacatatcaaaagaaggaattaaacgatggagaagatttgacggaccatgtggttatgatttattcacggcggataacgtaattccaaaagatggtttacgaggagcattcgtcgataaagacggtacttatgacaaagtttacattcttttcactgatactatcggctcaaagagaattgtcaaaattccgtatatagcacaaatgtgcctaaacgacgaaggtggtccatcatcattgtctagtcatagatggtcgacgtttctcaaagtcgaattagaatgtgatatcgacggaagaagttatagacaaattattcattctagaactataaaaacagataatgatacgatactatatgtattcttcgatagtccttattccaagtccgcattatgtacctattctatgaataccattaaacaatctttttctacgtcaaaattggaaggatatacaaagcaattgccgtctccagctcctggtatatgtttaccagctggaaaagttgttccacataccacgtttgaagtcatagaacaatataatgtactagatgatattataaagcctttatctaaccaacctatcttcgaaggaccgtctggtgttaaatggttcgatataaaggagaaggaaaatgaacatcgggaatatagaatatacttcataaaagaaaattctatatattcgttcgatacaaaatctaaacaaactcgtagctcgcaagtcgatgcgcgactattttcagtaatggtaactgcgaaaccgttatttatagcagatatagggataggagtaggaatgccacaaatgaaaaaaatacttaaaatgtaatcttaatcgagtacaccacacgacaatgaacaaacataagacagattatgctggttatgcttgctgcgtaatatgcggtctaattgtcggaattatttttacagcgacactattaaaagttgtagaacgtaaattagttcatacaccattaatagataaaacgataaaagatgcatatattagagaagattgtcctactgactggataagctataataataaatgtatccatttatctactgatcgaaaaacctgggaggaaggacgtaatgcatgcaaagctctaaattcaaattcggatctaattaagatagagactccaaacgagttaagttttttaagaagccttagacgaggctattgggtaggagaatccgaaatattaaaccagacaaccccatataattttatagctaagaatgccacgaagaatggaactaaaaaacggaaatatatttgtagcacaacgaatactcccaaactgcattcgtgttacactatataacaattacactacatttttatcataccactacttcggttagatgttttagaaaaaaataaatatcgccgtaccgttcttgtttttataaaaataacaattaacaattatcaaattttttctttaatattttacgtggttgaccattcttggtggtaaaataatctcttagtgttggaatggaatgctgtttaatgtttccacactcatcgtatattttgacgtatgtagtcacatcgtttacgcaatagtcagactgtagttctatcatgcttcctacatcagaaggaggaacagttttaaagtctcttggttttaatctattaccgttagttttcatgaaatcctttgttttatccacttcacattttaaataaatgtccactatacattcttttgttaattttactagatcgtcatgggtcatagaatttataggttccgtagtccatggatccaaactagcaaacttcgcgtatacggtatcgcgattagtgtatacaccaactgtatgaaaattaagaaaacagtttaataaatcaacagaaatatttaatcctccgtttgatacagatgcgccatatttatggatttcggattcacacgttgtttgtctgaggtgttcgtctagtgttgcttctacgtaaacttcgattcccatatattctttattgtcagaatcgcataccgatttatcatcatacactgtttgaaaactaaatggtatacacatcaaaataataaataataacgagtacattctgcaatattgttatcgtaattggaaaaatagtgttcgagtgagttggattatgtgagtattggattgtatattttattttatattttgtaataagaataaaatgctaatgtcaagtttattccaatagatgtcttattaaaaacatatataataaataacaatggctgaatggcataaaattatcgaggatatctcaaaaaataataagttcgaggatgccgccatcgttgattacaagactacaaagaatgttctagctgctattcctaacagaacatttgccaagattaatccgggtgaaattattcctctcatcactaatcgtaatattctaaaacctcttattggtcagaaatattgtattgtatatactaactctctaatggatgagaacacgtatgctatggagttgcttactgggtacgcccctgtatctccgatcgttatagcgagaactcataccgcacttatatttttgatgggtaagccaacaacatccagacgtgacgtgtatagaacgtgtagagatcacgctacccgtgtacgtgcaactggtaattaaaataaaaagtaatattcatatgtagtgtcaattttaaatgatgatgatgaaatggataatatccatattgacgatgtcaataatgccggtattggcatacagttcatcgatttttagatttcattcagaggatgtggaattatgttatgggcatttgtattttgataggatctataatgtagtaaatataaaatataatccgcatattccatatagatataattttattaatcgcacgttaaccgtagatgaactagacgataatgtcttttttacacatggttattttttaaaacacaaatatggttcacttaatcctagtttgattgtctcattatcaggaaacttaaaatataatgatatacaatgctcagtaaatgtatcgtgtctcattaaaaatttggcaacgagtacatctactatattaacatctaaacataagacttattctctacatcggtccacgtgtattactataataggatacgattctattatatggtataaagatataaatgacaagtataatgacatctatgattttactgcaatatgtatgctaatagcgtctacattgatagtgaccatatacgtgtttaaaaaaataaaaatgaactcttaattatgctatgctattagaaatggataaaatcaaaattacggttgattcaaaaattggtaatgttgttaccatatcgtataacttggaaaagataactattgatgtcacacctaaaaagaaaaaagaaaaggatgtattattagcgcaatcagttgctgtcgaagaggcaaaagatgtcaaggtagaagaaaaaaatattatcgatattgaagatgacgatgatatggatgtagaaagcgcgtaatacgatctataaaaataagtatataaatactttttatttactgtactcttactgtgtagtggtgataccctactcgattatttttttaaaaaaaaaatacttattctgattcttctagccatttccgtgttcgtttgaatgccacatcgacgtcaaagataggggagtagttgaaatctagttctgcattgttggtacgcacctcaaatgtagtgttggatatcttcaacgtatagttgttgagtagtgatggttttctaaatagaattctcttcatatcattcttgcacgcgtacatttttagcatccatcttggaatcctagatccttgttctattcccaatggtttcatcaatagaagattaaacatatcgtacgaacacgatggagagtaatcgtagcaaaagtaagcatttcctttaatcttagatcccggatactggatatattttgcagccaacacgtgcatccatgcagcatttcctacatatacccggctatgcaccgcgtcatcatcgactgtacgatacataatgttaccgtgttgcttacattgctcgtaaaagactttcatcaatttgtctccttctccgtaaattccagtgggtcttaggcaacaagtatacaattttgctccattcatgattacggaattattggctttcataaccagttgctcggccatacgtttactttttgcgtatacatgtcctggtgatatatcataaagggtatgctcatggccgatgaatggatcaccgtgtttattgggtcctattgcttccatgctactagtatagatcaaatacttgattcctaggtccacacaagctgccaaaatagtctgtgttccataatagtttactttcatgatttcattatcggtgtattttccaaatacatccactagagcagccgtatgaataatcagatttaccccatctagcgcttctctcaccttatcaaagtcgtttatatcacattgtatatagtttataaccttaactttcgaggttattggttgtggatcttctacaatatctatgactctgatttcttgaacatcatctgcactaattaacagttttactatatacctgcctagaaatccggcaccaccagtaaccgcgtacacggccattgctgccactcataatatcagactacttattctattttactaaataatggctgtttgtataatagaccacgataatatcagaggagttatttactttgaaccagtccatggaaaagataaagttttaggatcagttattggattaaaatccggaacgtatagtttgataattcatcgttacggagatattagtcaaggatgtgattccataggcagtccagaaatatttatcggtaacatctttgtaaacagatatggtgtagcatatgtttatttagatacagatgtaaatatatttacaattattggaaaggcgttatctatttcaaaaaatgatcagagattagcgtgtggagttattggtatttcttacataaatgaaaagataatacattttcttacaattaacgagaatggcgtttgatatatcagttaatgcgtctaaaacaataaatgcattagtttacttttctactcagcaaaataaattagtcatacgtaatgaagttaatgatacacactacactgtcgaatttgatagggacaaagtagttgacacgtttatttcatataatagacataatgacaccatagagataagaggggtgcttccagaggaaactaatattggttgcgcggttagtatgacttacttgtataataagtatagttttaaactgattttagcagaatatataagacacagaaatactatatccggcaatatttattcggcattgatgacactagatgatttggctattaaacagtatggagacattgatctattatttaatgagaaacttaaagtagactccgattcgggactatttgactttgtcaactttgtaaaggatatgatatgttgtgattctagaatagtagtagctctatctagtctagtatctaaacattgggaattgacaaataaaaaatataggtgtatggcattagccgaacatatatctgatagtattccaatatctgagctatctagactacgatacaatctatgtaagtatctacgcggacacactgagagcatagaggataaatttgattattttgaagacgatgattcgtctacatgttctgccgtaaccgacagggaaacggatgtataattttttttatagcgtgaaggatatgataaaaaatataattgttgtatttatcccattccaatcaccttatatgattctgtaacacaataaaggagtcttatagatgtatagaggtcagatactggtttgataaactgtttattccacataagtatgtttgactttatggttagacccgcatactttaacaaatcactgaaaattggagttaggtattgacctctcagaatcagttgccgttctggaacattaaatgtattttttatgatatactccaacgcatttatgtgggcatacaacaagtcattactaatggaatattccaagagttttagttgtctagtatttaacaagagaagagatttcaacagactgtttatgaactcgaatgccgcctcattgtcgcttatattgatgatgtcgaattctcccaatatcatcaccgatgagtagctcatcttgttatcgggatccaagttttctaaagatgtcattaaaccctcgatcatgaatggatttatcatcatcgtttttatgttggacatgagcttagtccgtttgtccacatctatagaagatgatttctgaattatttcatatatctctctctttaactccaggaacttgtcaggatggtctactttaatatgttctcgtctaagagatgaaaatctttggatggttgcacgcgacttttctctaaaggatgacgttgcccaagatcctctcttaaatgaatccatcttatccttggacaagatggacagtctattttccttagatggtttaatatttttgttacccatgatctataaaggtagacctaatcgtctcggatgaccatatatttattttcagttttattatacgcataaattgtaaaaaatatgttaggtttacgaaaatgtctcgtggggcattaatcgtttttgaaggattggacaaatctggaaaaacaacacaatgtatgaacatcatggaatcaataccttcaaacacaataaaataccttaactttcctcagagatccactgtcactggaaagatgatagatgactatctaactcgtaaaaaaacctataatgatcatatagttaatctattattttgtgcaaatagatgggagtttgcatcttttatacaagaacaactagaacagggaattactttaatagttgatagatacgcattttctggagtagcgtatgccgccgctaaaggcgcgtcaatgactctcagtaagagttatgaatctggattgcctaaacccgacttagttatattcttggaatctggtagcaaagaaattaatagaaacgtcggtgaggaaatttatgaagatgttacattccaacaaaaggtattacaagaatataaaaaaatgattgaagaaggagatattcattggcaaattatttcttctgaattcgaggaagatgtaaagaaggagttgattaagaatatagttatagaggctatacacacggttactggaccagtggggcaactgtggatgtaatagtgaaattacattttttataaatagatgttagtacagtgttataaatggatgaagcatattactctggcaacttggaatcagtactcggatacgtgtccgatatgcataccgaactcgcatcaatatctcaattagttattgccaagatagaaactatagataatgatatattaaacaaggacattgtaaattttatcatgtgtagatcaaacttggataatccatttatctctttcctagatactgtatatactattatagatcaagagaactatcagactgagttgattaattcattagacgacaatgaaattatcgattgtatagttaataagtttatgagcttttataaggataacctagaaaatatagtagatgctatcattactctaaaatatataatgaataatccagattttaaaactacgtatgccgaagtactcggttccagaatagccgatatagatattaaacaagtgatacgtaagaatatactacaattgtctaataatatccgcgaacgatatttgtgaaaatattaaaaaaaaatactttttttattaaatgacgtcttttcgtgaatttagaaaattatgctgtgctatatatcacgcatcaggatataaagaaaaatctaaattaattagagactttataacagatagggatgataaatatttgatcattaagctattgcttcccggattagacgatagaatttataacatgaacgataaacaaattataaaattatatagtataatatttaaacaatctcaggaagatatgctacaagatttaggatacggatatataggagacactattaggactttcttcaaagagaacacagaaatccgtccacgagataaaagcattttaactttagaagaagtggatagttttttaactacgttatcatccgtaactaaagaatcgcatcaaataaaattattgactgatgtagcatctgtttgtacatgtaatgatttaaaatgtgtagtcatgcttattgataaagatctaaaaattaaagcgggtcctcggtacgtacttaacgctattagtcctaatgcctatgatgtgtttagaaaatctaataacttgaaagagataatagaaaattcatctaaacaaaatctagactctatatctatttctgttatgactccaattaatcccatgttagcggaatcgtgtgattctgtcaataaggcgtttaaaaaatttccatcaggaatgtttgcggaagtcaaatacgatggtgaaagagtacaagttcataaaaataataacgagtttgccttctttagtagaaacatgaaaccagtactctctcataaagtggattatctcaaagaatacataccgaaagcatttaaaaaagctacgtctatcgtattggattctgaaattgttcttgtagacgaacataatgtaccgctcccgtttggaagtttaggtatacacaaaaagaaagaatataaaaactctaacatgtgtttgttcgtgtttgactgtttgtactttgatggattcgatatgacggacattccattgtacgaacgaagatcttttctcaaagatgttatggttgaaatacccaatagaatagtattctcagagttgacgaatattagtaacgagtctcagttaactgacgtattggatgatgcactaacgagaaaattagaaggattggtcttaaaagatattaatggagtatacgaaccgggaaagagaagatggttaaaaataaagcgagactatttgaacgagggttccatggcagattctgccgatttagtagtactaggtgcctactatggtaaaggagcaaagggtggtatcatggcagtctttctaatgggttgttacgacgatgaatccggtaaatggaagacggttaccaagtgttcaggacacgatgataatacgttaagggagttgcaagaccaattaaagatgattaaaattaacaaggatcccaaaaaaattccagagtggttagtagttaataaaatctatattcccgattttgtagtagaggatccgaaacaatctcagatatgggaaatttcaggagcagagtttacatcttccaagtcccataccgcaaatggaatatccattagatttcctagatttactaggataagagaggataaaacgtggaaagaatctactcatctaaacgatttagtaaacttgactaaatcttaatagttacatacaaactgaaaattaaaataacactatttagttggtggtcgccatggatggtgttattgtatactgtctaaacgcgctagtaaaacatggcgaggaaataaatcatataaaaaatgatttcatgattaaaccatgttgtgaaagagtttgtgaaaaagtcaagaacgttcacattggcggacaatctaaaaacaatacagtgattgcagatttgccatatatggataatgcggtatccgatgtatgcaattcactgtataaaaagaatgtatcaagaatatccagatttgctaatttgataaagatagatgacgatgacaagactcctactggtgtatataattattttaaacctaaagatgccattcctgttatcatatctataggaaaggataaagatgtctgtgaactattaatctcatcagacatatcgtgtgcatgcgtggagttaaattcatatcacgtagccattcttcccatggatgtttccttttttaccaaaggaaatgcatcattgattattctcctgtttgatttctctatcgatgcggcacctctcttaagaagtgtaaccgataataatgttattatatctagacaccagcgtctacatgacgagcttccgagttccaattggttcaagttttacataagtataaagtccgactattgttctatattatatatggttgttgatggatctgtgatgcatgcgatagctgataatagaactcacgcaattattagcaaaaatatattagacaatactacgattaacgatgagtgtagatgctgttattttgaaccacagattaggattcttgatagagatgagatgctcaatggatcatcgtgtgatatgaacagacattgtattatgatgaatttacctgatgtaggcgaatttggatctagtatgttggggaaatatgaacctgacatgattaagattgctctttcggtggctggtaatttaataagaaatcgagactacattcccgggagacgaggatatagctactacgtttacggtatagcctctagataatttttttaagcacgaaataaaaaacataattttaaaccaatctatttcatactattttgtgtgatcaccatggacataaagatagatattagtatttctggtgataaatttacggtgactactaggagggaaaatgaagaaagaaaaaaatatctacctctccaaaaagaaaaaactactgatgttatcaaacctgattatcttgagtacgatgacttgttagatagagatgagatgtttactattctagaggaatattttatgtacagaggtctattaggcctcagaataaaatatggacgactctttaacgaaattaaaaaattcgacaatgatgcggaagaacaattcggtactatagaagaactcaagcagaaacttagattaaattctgaagagggagcagataactttatagattatataaaggtacaaaaacaggatatcgtcaaacttactgtatacgattgcatatctatgataggattgtgtgcatgcgtggtagatgtttggagaaatgagaaactgttttctagatggaaatattgtttacgagcgattaaactgtttattgatgatcacatgcttgataagataaaatctatactgcagaatagactagtatatgtggaaatgtcatagaaagttaaaagttaatgagagcaaaaatatataaggttgtattccatatttgttatttttttctgtaatagttagaaaaatacattcgatggtctatctatcagattattatgtgttataaggtactttttctcataataaactagagtatgagtaagatagtgtttttcaaaacatataaatctaaaattgatggatgagatatacagctattaatttcgaaaatatattttaatctgataactttaaacatggatttttaatggtggtttaacgttttaaaaaaagattttgttattgtagtatatgataatattaaaagatggatataaagaatttgctgactgcatgtactattttttacattactacattggctacggcagatatacctacttcgtcactgccacacgctccggtaaacggggcatgtgacgagggagaatatcttgataagaggcataatcaatgttgtaatcagtgtccacctggagaatttgccaaggttagatgtaatggtaacgataacacaaaatgtgaacgctgcccacctcatacatataccgcaatccccaattactctaatggatgtcatcaatgtagaaaatgcccaacaggatcatttgataaggtaaagtgtaccggaacacagaacagtaaatgttcgtgtcttcctggttggtattgcgctactgattcttcacagactgaagattgtcgagattgtataccaaaaaggagatgtccatgcggatactttggtggaatagatgaacaaggaaatcctatttgtaaatcgtgttgtgttggtgaatattgcgactacctacgtaattatagacttgatccatttcctccatgcaaactatctaaatgtaattaattatgattttgatgataatgttaccatacattatatcgctacttggttagtgtattattcagtatgaagacctattaataattacttatcttttgacgatcttgttataattataatataaaaatacttatggcatagtaactcataattgctgacgcgataaattcgtaataatctgttttgttcaaatttttataaggaatctacaggcataaaaataaaaatataatttataatatactcttacagcgcgccatcatgaataacagcagtgaattgattgctgttattaatggatttagaaatagtggacgattttgtgatattaatatagttattaatgatgaaaggataaacgctcacagactcatcctatctggagcctccgaatatttttccattctgttttccaataattttatcgattctaatgaatacgaagttaatctaagtcatttagattatcaaagtgttaacgatttgatcgattacatttatgggatacctttgagcctaactaacgataacgtgaaatatattctttcaaccgctgattttttacaaattggatctgctattacggagtgtgaaaattacatacttaaaaatctttgttctagaaactgtatcgatttctacatatacgctgataaatataataacaagaaaatagaatcagcgtcgtttaacacaatattacaaaatattttgagactcatcaacgatgaaaactttaaatacttaacagaggaatcaatgataaaaattttaagcgatgatatgttaaatataaaaaatgaggatttcgccccactaattctcattaaatggttagagagtactcaacaaccatgcaccgtcgagttacttaaatgcctcagaatatcattgctttccccacaagttataaaatcactttatagtcatcgactggttagttcaatctacgaatgtataacattcttaaacaatatagcattcttggatgaatcatttcctagataccatagcatcgagttgatatctatcggtataagtaattcgcatgataagatttccataaactgctacaatcataaaaaaaatacatgggaaatgatatcttcacgtagatataggtgtagtttcgcagtggccgtcctggataatattatctatatgatgggtggatatgatcagtccccgtatagaagttcaaaggttatagcgtacaatacatgtacaaattcttggatatatgatataccagagctaaaatatcctcgttctaattgtgggggactggctgatgacgaatacatttattgtataggcggcatacgcgatcaggattcatcgttgacatctagtattgatagatggaagccatcaaaaccatattggcagaagtatgctaaaatgcgcgaaccaaaatgtgatatgggggttgcgatgttaaacggattaatatatgttataggtggaatcgttaaaggtgacacgtgtaccgacgcactagagagtttatcagaagatggatggatgaagcatcaacgtcttccaataaaaatgtccaatatgtcgacgattgttcatgatggcaagatttatatatctggaggttacaacaatagtagtgtagttaatgtaatatcgaatctagtccttagctataattcgatatatgatgaatggaccaaattatcatcattaaacattcctagaattaatcccgctctatggtcagcgcataataaattatatgtaggaggaggaatatctgatgatgttcgaactaatacatctgagacatacgacaaagaaaaagattgttggacattggataatggtcacgtgttaccacgcaattatataatgtataaatgcgaaccgattaaacataaatatccattggaaaaaacacagtacacgaatgattttctaaagtatttggaaagttttataggtagttgatagaacaaaatacataattttgtaaaaataaatcactttttatactaatatgacacgattaccaatacttttgttactaatatcattagtatacgctacaccttttcctcagacatctaaaaaaataggtgatgatgcaactctatcatgtaatcgaaataatacaaatgactacgttgttatgagtgcttggtataaggagcccaattccattattcttttagctgctaaaagcgacgtcttgtattttgataattataccaaggataaaatatcttacgactctccatacgatgatctagttacaactatcacaattaaatcattgactgctagagatgccggtacttatgtatgtgcattctttatgacatcaactacaaatgacactgataaagtagattatgaagaatactccacagagttgattgtaaatacagatagtgaatcgactatagacataatactatctggatctacacattcaccggaaactagttctaagaaacctgattatatagataattctaattgctcgtcggtattcgaaatcggtacccggggatcagcttgcatgcctgcagcaattcccgaggctgtagccgacgatggtgcgccaggagagttgttgattcattgtttgcctccctgctgcggtttttcaccgaagttcatgccagtccagcgtttttgcagcagaaaagccgccgacttcggtttgcggtcgcgagtgaagatccctttcttgttaccgccaacgcgcaatatgccttgcgaggtcgcaaaatcggcgaaattccatacctgttcaccgacgacggcgctgacgcgatcaaagacgcggtgatacatatccagccatgcacactgatactcttcactccacatgtcggtgtacattgagtgcagcccggctaacgtatccacgccgtattcggtgatgataatcggctgatgcagtttctcctgccaggccagaagttctttttccagtaccttctctgccgtttccaaatcgccgctttggacataccatccgtaataacggttcaggcacagcacatcaaagagatcgctgatggtatcggtgtgagcgtcgcagaacattacattgacgcaggtgatcggacgcgtcgggtcgagtttacgcgttgcttccgccagtggcgcgaaatattcccgtgcaccttgcggacgggtatccggttcgttggcaatactccacatcaccacgcttgggtggtttttgtcacgcgctatcagctctttaatcgcctgtaagtgcgcttgctgagtttccccgttgactgcctcttcgctgtacagttctttcggcttgttgcccgcttcgaaaccaatgcctaaagagaggttaaagccgacagcagcagtttcatcaatcaccacgatgccatgttcatctgcccagtcgagcatctcttcagcgtaagggtaatgcgaggtacggtaggagttggccccaatccagtccattaatgcgtggtcgtgcaccatcagcacgttatcgaatcctttgccacgcaagtccgcatcttcatgacgaccaaagccagtaaagtagaacggtttgtggttaatcaggaactgttcgcccttcactgccactgaccggatgccgacgcgaagcgggtagatatcacactctgtctggcttttggctgtgacgcacagttcatagagataaccttcacccggttgccagaggtgcggattcaccacttgcaaagtcccgctagtgccttgtccagttgcaaccacctgttgatccgcatcacgcagttcaacgctgacatcaccattggccaccacctgccagtcaacagacgcgtggttacagtcttgcgcgacatgcgtcaccacggtgatatcgtccacccaggtgttcggcgtggtgtagagcattacgctgcgatggattccggcatagttaaagaaatcatggaagtaagactgctttttcttgccgttttcgtcggtaatcaccattcccggcgggatagtctgccagttcagttcgttgttcacacaaacggtgatacgtacacttttcccggcaataacatacggcgtgacatcggcttcaaatggcgtatagccgccctgatgctccatcacttcctgattattgacccacactttgccgtaatgagtgaccgcatcgaaacgcagcacgatacgctggcctgcccaacctttcggtataaagacttcgcgctgataccagacgttgcccgcataattacgaatatctgcatcggcgaactgatcgttaaaactgcctggcacagcaattgcccggctttcttgtaacgcgctttcccaccaacgctgatcaattccacagttttcgcgatccagactgaatgcccacaggccgtcgagttttttgatttcacgggttggggtttctacaggacgtaacattctagtcgaggaattcatttatagcatagaaaaaaacaaaatgaaattctactatatttttacatacatatattctaaatatgaaagtggtgattgtgactagcgtagcatcgcttctagacatctatatactatatagtaataccaatactcaagactacgaaactgatacaatctcttatcatgtgggtaatgttctcgatgtcgatagccatatgcccggtagttgcgatatacataaactgatcactaattccaaacccacccgctttttatagtaagtttttcacccataaataataaatacaataattaatttctcgtaaaagtagaaaatatattctaatttattgcacggtaaggaagtagaatcataaagaacagtgacggatccccgatccccgacctgcaggcatgcaagctcgactccggaaccaattactgataatgtagaagatcatacagacaccgtcacatacactagtgatagcattaatacagtaagtgcatcatctggagaatccacaacagacgagactccggaaccaattactgataaagaagatcatacagttacagacactgtctcatacactacagtaagtacatcatctggaattgtcactactaaatcaaccaccgatgatgcggatctttatgatacgtacaatgataatgatacagtaccaccaactactgtaggcggtagtacaacctctattagcaattataaaaccaaggactttgtagaaatatttggtattaccgcattaattatattgtcggccgtggcaattttctgtattacatattatatatataataaacgttcacgtaaatacaaaacagagaacaaagtctagatttttgacttacataaatgtctgggatagtaaaatctatcatattgagcggaccatctggtttaggaaagacagccatagccaaaagactatgggaatatatttggatttgtggtgtcccataccactagatttcctcgtcctatggaacgagaaggtgttgattaccattacgttaacagagaggccatctggaagggaatagccgccggaaactttctagaacatactgagtttttaggaaatatttacggaacttctaaaacagctgtgaatacagcggctattaataatcgtatttgtgtgatggatctaaacatcgacggtgttagaagtcttaaaaatacgtacctaatgccttactcggtgtatataagacctacctctcttaaaatggttgagaccaagcttcgtcgtagaaacactgaagctaacgatgagattcatcgtcgtgtgatgttggcaaaaactgacatggatgaggcaggtgaagccggtctattcgacactattatcattgaagatgatgtgaatttagcatatagtaagttaattcagatactacaggaccgtattagaatgtattttaacactaattagagacttaagacttaaaacttgataattaataatataactcgtttttatatgtgtctatttcaacgtctaatgtattagttaaatattaaaacttaccacgtaaaacttaaaatttaaaatgatatttcattgacagatagatcacacattatgaactttcaaggacttgtgttaactgacaattgcaaaaatcaatgggtcgttggaccattaataggaaaaggtggattcggtagtatttatactactaatgacaataattatgtagtaaaaatagagcccaaagctaacggatcattatttaccgaacaggcattttatactagagtacttaaaccatccgttatcgaagaatggaaaaaatctcacaatataaagcacgtaggtcttatcacgtgcaaggcatttggtctatacaaatccattaatgtggaatatcgattcttggtaattaatagattaggtgcagatctagatgcggtgatcagagccaataataatagactaccaaaaaggtcggtgatgttgatcggaatcgaaatcttaaataccatacaatttatgcacgagcaaggatattctcacggagatattaaagcgagtaatatagtcttagatcaaatagataagaataaattatatctagtggattacggattggtttctaaattcatgtctaatggcgaacatgttccatttataagaaatccaaataaaatggataacggtactctagaatttacacctatagattcgcataaaggatacgttgtatctagacgtggagatctagaaacacttggatattgtatgattagatggttgggaggtatcttaccatggactaagatatctgaaacaaagaattgtgcattagtaagtgccacaaaacagaaatatgttaacaatactgcgactttgttaatgaccagtttgcaatatgcacctagagaattgctgcaatatattaccatggtaaactctttgacatattttgaggaacccaattacgacaagtttcggcacatattaatgcagggtgtatattattaagtgtggtgtttggtcgataaaaattaaaaaataacttaatttattattgatctcgtgtgtacaaccgaaatcatggcgatgttttacgcacacgctctcggtgggtacgacgagaatcttcatgcctttcctggaatatcatcgactgttgccaatgatgtcaggaaatattctgttgtgtcagtttataataacaagtatgacattgtaaaagacaaatatatgtggtgttacagtcaggtgaacaagagatatattggagcactgctgcctatgtttgagtgcaatgaatatctacaaattggaaatccgatccatgatcaagaaggaaatcaaatctctatcatcacatatcgccacaaaaactactatgctctaagcggaatcgggtacgagagtctagacttgtgtttggaaggagtagggattcatcatcacgtacttgaaacaggaaacgctgtatatggaaaagttcaacatgattattctactatcaaagagaaggccaaagaaatgagtgcacttagtccaggacctatcatcgattaccacgtctggataggagattgtatctgtcaagttactgctgtggacgtacatggaaaggaaattatgaaaatgagattcaaaaagggtgcggtgcttccgatcccaaatctggtaaaagttaaacttggggagaatgatacagaaaatctttcttctactatatcggcggcaccatcgaggtaaccacctctctggaagacagcgtgaatcatgtactcatgaaacgtttggaaactatacgccatatgtggtctgttgtatatgatcattttgatattgtgaatggtaaagaatgctgttatgtgcatacgcattcatctaatcaaaatcctataccgagtactgtaaaaacaaatttgtacatgaagactatgggatcatgcattcaaatggattccatggaagctctagagtatcttagcgaactgaaggaatcaggtggatggagtcccagaccagaaatgcaggaatttgaatatccagatggagtggaagacactgaatcaattgagagattggcagaggagttcttcaatagatcagaacttcaggctggtgaatcagtcaaatttggtaattctattaattgttaaacatacatctgtttcagctaagcaactaagaacacgtatacggcagcagcttccttctatactctcatcttttaccaacacaaagggtggatatttgttcattggagttgataataatacacacaaagtatttggattcacggtgggttacgactacctcagactgatagagaatgatatagaaaagcatatcaaaagacttcgtgttgtgcatttctgtgagaagaaagaggacatcaagtacgcgtgtcgattcatcaaggtatataaacctggggatgagactacctcgacatacgtgtgcgctatcaaagtggaaagatgctgttgtgctgtgtttgcagattggccagaatcatggtatatggatactaatggtatcaagaagtattctccagatgaatgggtgtcacatataaaattttaattaatgtaactatagagaacaaataataaggttgtaatatcatatagacaataactaacaattaattagtaactgttatctcttttttaactaaccaactaactatatacctattaatacatcgtaattatagttcttaacatctattaatcattaattcgcttctttaattttttataaactaacattgttaattgaaaagggataacatgttacagaatataaattatatatggatttttttaaaaaggaaatacttgactggagtatatatttatctcttcattatatagcacgcgtgttttccaatttttccacatcccatataatacaggattataatctcgttcgaacatacgagaaagtggataaaacaatagttgattttttatctaggttgccaaatttattccatattttagaatatggggaaaatattctacatatttattctatggatgatgctaatacgaatattataattttttttctagatagagtattaaatattaataagaacgggtcatttatacacaatctcgggttatcatcatccattaatataaaagaatatgtatatcaattagttaataatgatcatccagataataggataagactaatgcttgaaaatggacgtagaacaagacattttttgtcctatatatcagatacagttaatatctatatatgtattttaataaatcatggattttatatagatgccgaagacagttacggttgtacattattacatagatgtatatatcactataagaaatcagaatcagaatcatacaatgaattaattaagatattgttaaataatggatcagatgtagataaaaaagatacgtacggaaacacaccttttatcctattatgtaaacacgatatcaacaacgtggaattgtttgagatatgtttagagaatgctaatatagactctgtagactttaatagatatacacctcttcattatgtctcatgtcgtaataaatatgattttgtaaagttattaatttctaaaggagcaaatgttaatgcgcgtaataaattcggaactactccattttattgtggaattatacacggtatctcgcttataaaactatatttggaatcagacacagagttagaaatagataatgaacatatagttcgtcatttaataatttttgatgctgttgaatctttagattatctattatccagaggagttattgatattaactatcgtactatatacaacgaaacatctatttacgacgctgtcagttataatgcgtataatacgttggtctatctattaaacaaaaatggtgattttgagacgattactactagtggatgtacatgtatttcggaagcagtcgcaaacaacaacaaaataataatggaagtactattgtctaaacgaccatctttgaaaattatgatacagtctatgatagcaattactaaacataaacagcataatgcagatttattgaaaatgtgtataaaatatactgcgtgtatgaccgattatgatactcttatagatgtacagtcgctacagcaatataaatggtatattttaagatgtttcgatgaaatagatatcatgaagagatgttatataaaaaataaaactgtattccaattagttttttgtatcaaagacattaatactttaatgagatacggtaaacatccttctttcgtgaaatgcactagtctcgacgtatacggaagtcgtgtacgtaatatcatagcatctattagatatcgtcagagattaattagtctattatccaagaagctggatcctggagataaatggtcgtgttttcctaacgaaataaaatataaaatattggaaaactttaacgataacgaactatccacatatctaaaaatcttataaacattattaaaatataaaatctaagtaggataaaatcacactacatcattgtttccttttagtgctcgacagtgtatactatttttaacgctcataaataaaaatgaaaacgatttccgttgttacgttgttatgcgtactacctgctgttgtttattcaacatgtactgtacccactatgaataacgctaaattaacgtctaccgaaacatcgtttaatgataaccagaaagttacgtttacatgtgatcagggatatcattctttggatccaaatgctgtctgtgaaacagataaatggaaatacgaaaatccatgcaaaaaaatgtgcacagtttctgattatgtctctgaactatataataaaccgctatacgaagtgaattccaccatgacactaagttgcaacggcgaaacaaaatattttcgttgcgaagaaaaaaatggaaatacttcttggaatgatactgttacgtgtcctaatgcggaatgtcaacctcttcaattagaacacggatcgtgtcaaccagttaaagaaaaatactcatttggggaatatatgactatcaactgtgatgttggatatgaggttattggtgcttcgtacataagttgtacagctaattcttggaatgttattccatcatgtcaacaaaaatgtgatatgccgtctctatctaacggattaatttccggatctacattttctatcggtggcgttatacatcttagttgtaaaagtggttttacactaacggggtctccatcatccacatgtatcgacggtaaatggaatcccatactcccaatatgtgtacgaactaacgaaaaatttgatccagtggatgatggtcccgacgatgagacagatttgagcaaactctcgaaagacgttgtacaatatgaacaagaaatagaatcgttagaagcaacttatcatataatcatagtggcgttgacaattatgggcgtcatatttttaatctccgttatagtattagtttgttcctgtgacaaaaataatgaccaatataagttccataaattgctaccgtaaatataaatccgttaaaataattaataatttaataacaaacaagtatcaaaagattaaagacttatagctagaatcaattgagatgtcttcttcagtggatgttgatatctacgatgccgttagagcatttttactcaggcactattataacaagagatttattgtgtatggaagaagtaacgccatattacataatatatacaggctatttacaagatgcgccgttataccgttcgatgatatagtacgtactatgccaaatgaatcacgtgttaaacaatgggtgatggatacacttaatggtataatgatgaatgaacgcgatgtttctgtaagcgttggcaccggaatactattcatggaaatgtttttcgattacaataaaaatagtatcaacaatcaactaatgtatgatataattaatagcgtatctataattctagctaatgagagatatagaagcgcttttaacgacgatggtatatacatccgtagaaatatgattaacaagttgtacggatacgcatctctaactactattggcacgatcgctggaggtgtttgttattatctgttgatgcatctagttagtttgtataaataattatttcaatatactagttaaaattttaagattttaaatgtataaaaaactaataacgtttttatttgtaataggtgcattagcatcctattcgaataatgagtacactccgtttaataaactgagtgtaaaactctatatagatggagtagataatatagaaaattcatatactgatgataataatgaattggtgttaaattttaaagagtacacaatttctattattacagagtcatgcgacgtcggatttgattccatagatatagatgttataaacgactataaaattattgatatgtataccattgactcgtctactattcaacgcagaggtcacacgtgtagaatatctaccaaattatcatgccattatgataagtacccttatattcacaaatatgatggtgatgagcgacaatattctattactgcagagggaaaatgctataaaggaataaaatatgaaataagtatgatcaacgatgatactctattgagaaaacatactcttaaaattggatctacttatatatttgatcgtcatggacatagtaatacatattattcaaaatatgatttttaaaaatttaaaatatattatcacttcagtgacagtagtcaaataacaaacaacaccatgagatatattataattctcgcagttttgttcattaatagtatacatgctaaaataactagttataagtttgaatccgtcaattttgattccaaaattgaatggactggggatggtctatacaatatatcccttaaaaattatggcatcaagacgtggcaaacaatgtatacaaatgtaccagaaggaacatacgacatatccgcatttccaaagaatgatttcgtatctttctgggttaaatttgaacaaggcgattataaagtggaagagtattgtacgggactatgcgtcgaagtaaaaattggaccaccgactgtaacattgactgaatacgacgaccatatcaatttgtacatcgagcatccgtatgctactagaggtagcaaaaagattcctatttacaaacgcggtgacatgtgtgatatctacttgttgtatacggctaacttcacattcggagattctaaagaaccagtaccatatgatatcgatgactacgattgcacgtctacaggttgcagcatagactttgtcacaacagaaaaagtgtgcgtgacagcacagggagccacagaagggtttctcgaaaaaattactccatggagttcgaaagtatgtctgacacctaaaaagagtgtatatacatgcgcaattagatccaaagaagatgttcccaatttcaaggacaaaatggccagagttatcaagagaaaatttaatacacagtctcaatcttatttaactaaatttctcggtagcacatcaaatgatgttaccacttttcttagcatgcttaacttgactaaatattcataactaatttttattaatgatacaaaaacgaaataaaactgcatattatacactggttaacgcccttataggctctaaccattttcaagatgaggtccctgattatagtccttctgttcccctctatcatctactccatgtctattagacgatgtgagaagactgaagaggaaacatggggattgaaaatagggttgtgtataattgccaaagatttctatcccgaaagaactgattgcagtgttcatctcccaactgcaagtgaaggattgataactgaaggcaatggattcagggatatacgaaacaccgataaattataaaaaaagcaatgtgtccgctgtttccgttaataatactattttcgtaactggcggattattcataaataactctaatagcacgatcgtggttaacaatatggaaaaacttgacatttataaagacaaacaatggtcgattatagaaatgcctatggctagggtatatcacggcattgactcgacatttggaatgttatattttgccggaggtctatccgttaccgaacaatatggtaatttagagaaaaacaacgagatatcttgttacaatcctagaacgaataagtggtttgatatttcatatactatttataagatatccatatcatcattgtgtaaactaaataacgtcttctatgtatttagtaaggacattggatatgtggaaaagtatgatggtgcatggaagttagtacatgatcgtctccccgctataaaggcattatcaacttctccttattgattgaaaatgaaaatataaatagtttttatgtatagcagtattaccctatagttttattgcttactactaacatggatacagatgttacaaatgtagaagatatcataaatgaaatagatagagagaaagaagaaatactaaaaaatgtagaaattgaaaataataaaaacattaacaagaatcatcccaatgaatatattagagaagcactcgttattaataccagtagtaatagtgattccattgataaagaagttatagaatgtatcagtcacgatgtaggaatatagatcatatctactaatttttataatcgatacaaaacataaaaaacaactcgttattacatagcaggcatggaatccttcaagtattgttttgataacgatggcaagaaatggattatcggaaatactttatattctggtaattcaatactctataaggtcagaaaaaatttcactagttcgttctacaattacgtaatgaagatagatcacaaatcacacaagccattgttgtctgaaatacgattctatatatctgtattggatcctttgactatcgacaactggacacgggaacgtggtataaagtatttggctattccagatctgtatggaattggagaaaccgatgattatatgttcttcgttataaagaattcgggaagagtattcgccccaaaggatactgaatcagtcttcgaagcatgcgtcactatgataaacacgttagagtttatacactctcgaggatttacccatggaaaaatagaaccgaggaatatactgattagaaataaacgtctttcactaattgactattctagaactaacaaactatacaagagtggaaactcacatatagattacaacgaggacatgataacttcaggaaatatcaattatatgtgtgtagacaatcatcttggagcaacagtttcaagacgaggagatttagaaatgttgggatattgcatgatagaatggttcggtggcaaacttccatggaaaaacgaaagtagtataaaagtaataaaacaaaaaaaagaatataaaaaatttatagctactttctttgaggactgttttcctgaaggaaatgaacctctggaattagttagatatatagaattagtatacacgttagattattctcaaactcctaattatgacagactacgtaaactgtttatacaagattgaaattatattcttttttttatagagtgtggtagtgttacggatatctaatattaatattagactatctctatcgcgctacacgaccaatatcgattactatggatatcttctatgaaaggagagaatgtatttatttctccagcgtcaatctcgtcagtattgacaatactgtattatggagctaatggatccactgctgaacagctatcaaaatatgtagaaacggaggagaacacggataaggttagcgctcagaatatctcattcaaatccatgaataaagtatatgggcgatattctgccgtgtttaaagattcctttttgagaaaaattggcgataagtttcaaactgttgacttcactgattgtcgcactatagatgcaatcaacaagtgtgtagatatctttactgaggggaaaatcaatccactattggatgaaccattgtctcctagcaattagtgccgtatactttaaagcaaaatggttgacgccattcgaaaaggaatttaccagtgattatcccttttacgtatctccgacggaaatggtagacgtaagtatgatgtctatgtacggcaaggcatttaatcacgcatctgtaaaagaatcattcggcaacttttcaatcatagaactgccatatgttggagatactagtatgatggtcattcttccagacaagattgatggattagaatccatagaacaaaatctaacagatacaaattttaagaaatggtgtgactttatggatgctatgtttatagatgttcacattcccaagtttaaggtaacaggctcgtataatctggtggatactctagtaaagtcaggactgacagaggtgttcggttcaactggagattatagcaatatgtgtaatttagatgtgagtgtcgacgctatgatccacaaaacgtatatagatgtcaatgaagagtatacagaagcagctgcagcaacttctgtactagtggcagactgtgcatcaacaattacaaatgagttctgtgcagatcatccgttcatctatgtgattaggcatgttgatggaaaaattcttttcgttggtagatattgctctccgacaactaattgttaaccattttttttaaaaaaaatagaaaaaacatgtggtattagtgcaggtcgttgttcttccaattgcaattggtaagatgacggccaactttagtacccacgtcttttcaccacagcactgtggatgtgacagactgaccagtattgatgacgtcaaacaatgtttgactgaatatatttattggtcgtcctatgcataccgcaacaggcaatgcgctggacaattgtattccacactcctctcttttagagatgatgcggaattagtgttcatcgacattcgcgagctggtaaaaaatatgccgtgggatgatgtcaaagattgtacagaaatcatccgttgttatataccggatgagcaaaaaaccatcagagagatttcggccatcatcggactttgtgcatatgctgctacttactggggaggtgaagaccatcccactagtaacagtctgaacgcattgtttgtgatgcttgagatgctaaattacgtggattataacatcatattccggcgtatgaattgatgagttgtacatcttgacattttctttcttctcttctccctttcttctcttctcccttcctccctcttctccctttcccagaaacaaacttttttacccactataaaataaaatgagtatactacctattatatttcttcctatatttttttattcttcattcgttcagacttttaacgcgtctgaatgtatcgacaaagggcaatattttgcatcattcatggagttagaaaacgagccagtaatcttaccatgtcctcaaataaatacgctatcatccggatataatatattagatattttatgggaaaaacgaggagcggataatgatagaattataccgatagataatggtagcaatatgctaattctgaacccgacacaatcagactctggtatttatatatgcattaccacgaacgaaacctactgtgacatgatgtcgttaaatttgacaatcgtgtctgtctcagaatcaaatatagatcttatctcgtatccacaaatagtaaatgagagatctactggcgaaatggtatgtcccaatattaatgcatttattgctagtaacgtaaacgcagatattatatggagcggacatcgacgccttagaaataagagacttaaacaacggacacctggaattattaccatagaagatgttagaaaaaatgatgctggttattatacatgtgttttagaatatatatacggtggcaaaacatataacgtaaccagaattgtaaaattagaggtacgggatagaataataccttctactatgcaattaccagatggcattgtaacttcaataggtagtaatttgactattgcatgcagagtatcgttgagacctcccacaacggacaccgacgtcttttggataagtaatggtatgtattacgaagaagatgatggggacggaaacggtagaataagtgtagcaaataaaatctatatgaccgataagagacgtgttattacatcccggttaaacattaatcctgtcaaggaagaagatgctacaacgtttacgtgtatggcgtttactattcctagcatcagcaaaacagttactgttagtataacgtgaatgtatgttgttacatttccatgtcaattgagtttataagaatttttatacattatcttccaacaaacaattgacgaacgtattgctatgattaactcccacgatactatgcatattattaatcattaacttgcagactatacctagtgctattttgacatactcgtgttcttgtgtaattgcggtatctatattattaaagtacgtaaatctagctatagttttattatttaattttagataatataccgtctccttatttttaaaaattgccacatcctttattaaatcatgaatgggaatttctatgtcatcgttagtatattgtgaacaacaagagcagatatctataggaaagggtggaatgcgatacattgatctatgtagttttaaaacacacgcgaactttgaagaatttatataaatcattccatcgatacatccttctatgttgacatgtatatatccaggaattcttttattaatgtcaggaaatgtataaactaaaacattgcccgaaagcggtgcctctatctgcgttatatccgttcttaacttacaaaatgtaaccaatacctttgcatgacttgttttgttcggcaacgttagtttaaacttgacgaatggattaattacaatagcatgatccgcgcatctattaagtttttttactttaacgcccttgtatgtttttacagagactttatctaaatttctagtgcttgtatgtgttataaatataacgggatatagaaccgaatcacctaccttagatacccaattacattttatcagatccagataataaacaaattttgtcgccctaactaattctatattgttatatattttacaattggttatgatatcatgtaataacttggagtctaacgcgcatcgtcgtacgtttatacaattgtgatttagtgtagtatatctacacatgtatttttccgcactatagtattctggactagtgataaaactatcgttatatctgtcttcaatgaactcatcgagatattgctctctgtcatattcatacacctgcataaactttctagacatcttacaatccgtgttattttaggatcatatttacatatttacgggtatatcaaagatgttagattagttaatgggaatcgtctataataatgaatattaaacaattatatgaggacttttaccacaaagcatcataaaaatgagtcgtcgtctgatttatgttttaaatatcaaccgcaaatcaactcataaaatacaagagaatgaaatatatacatattttagtcattgcaatatagaccatacttctacagaacttgattttgtagttaaaaactatgatctaaacagacgacaacctgtaactgggtatactgcactacactgctatttgtataataattactttacaaacgatgtactgaagatattattaaatcatgacgtaaatgtaacgatgaaaaccagtagcggacgtatgcctgtttatatattgcttactagatgttgtaatatttcacatgatgtagtgatagatatgatagacaaagataaaaaccacttattacatagagactattccaacctattactagagtatataaaatctcgttacatgttattgaaggaagaggatatcgatgagaacatagtatccactttattagataagggaatcgatcctaactttaaacaagacggatatacagcgttacattattattatttgtgtctcgcacacgtttataaactaggtgagtgtagaaaaccgataacgataaaaaaggccaagcgaattatttctttgtttatacaacatggagctaatctaaacgcgttagataattgtggtaatacaccattccatttgtatcttagtattgaaatgtgtaataatattcatatgactaaaatgctgttgacttttaatccgaatttcaaaatatgtaataatcatggattaacgcctatactatgttatataacttccgactacatacaacacgatattcttgttatgttaatacatcactatgaaacaaatgttggagaaatgccgatagatgagcgtcgtatgatcgtattcgagtttatcaaaacatattctacacgtccggcagattcgataacttatttgatgaataggtttaaaaatataaatatttatacccgctatgaaggaaagacattattacacgtagcatgtgaatataataatacacaagtaatagattatcttatacgtatcaacggagatataaatgcgttaaccgacaataacaaacacgctacacaactcattatagataacaaagaaaattccccatataccattaattgtttactgtatatacttagatatattgtagataagaatgtgataagatcgttggtggatcaacttccatctctacctatcttcgatataaaatcatttgagaaattcatatcctactgtatacttttagatgacacattttacgataggcacgttaagaatcgcgattctaaaacgtatcgatacgcattttcaaaatacatgtcgtttgataaatacgatggtataataactaaatgtcacgacgaaacaatgttactcaaactgtccactgttctagacactacactatatgcagttttaagatgtcataattcgagaaagttaagaagatacctcaacgagttaaaaaaatataataacgataagtcctttaaaatatattctaatattatgaatgagagataccttaatgtatattataaagatatgtacgtgtcaaaggtatatgataaactatttcctgttttcacagataaaaattgtctactaacattactaccttcagaaattatatacgaaatattatacatgctgacaattaacgatctttataatatatcgtatccacctaccaaagtatagttgtatttttctcatgcgatgtgtgtaaaaaaactgatattatataaatattttagtgccgtataataaagatgacgatgaaaatgatggtacatatatatttcgtatcattattgttattgctattccacagttacgccatagacatcgaaaatgaaatcacagaattcttcaataaaatgagagatactctaccagctaaagactctaaatggttgaatccagcatgtatgttcggaggcacaatgaatgatatagccgctctaggagagccattcagcgcaaagtgtcctcctattgaagacagtcttttatcgcacagatataaagactatgtggttaaatgggagaggctagaaaagaatagacggcgacaggtttctaataaacgtgttaaacatggtgatttatggatagccaactatacatctaaattcagtaaccgtaggtatttgtgcaccgtaactacaaagaatggtgactgtgttcagggtatagttagatctcatattaaaaaacctccttcatgcattccaaaaacatatgaactaggtactcatgataagtatggcatagacttatactgtggaattctttacgcaaaacattataataatataacttggtataaagataataaggaaattaatatcgacgacattaagtattcacaaacgggaaaggaattaattattcataatccagagttagaagatagcggaagatacgactgttacgttcattacgacgacgttagaatcaagaatgatatcgtagtatcaagatgtaaaatacttacggttataccgtcacaagaccacaggtttaaactaatactagatccgaaaatcaacgtaacgataggagaacctgccaatataacatgcactgctgtgtcaacgtcattattgatcgacgatgtactgattgaatgggaaaatccatccggatggcttataggattcgattttgatgtatactctgttttaactagtagaggcggtatcaccgaggcgaccttgtactttgaaaatgttactgaagaatatataggtaatacatataaatgtcgtggacacaactattattttgaaaaaacccttacaactacagtagtattggagtaaatatacaatgcatttttatatacattactgaattattattactgaattattattactgaattattattaattatatcgtatttgtgctatagaatggatgaagatacgcgactatctaggtatttgtatctcaccgatagagaacatataaatgtagactctattaaacagttgtgtaaaatatcagatcctaatgcatgttatagatgtggatgtacggctttacatgagtacttttataattatagatcagtcaacggaaaatacaagtatagatacaacggttactatcaatattattcatctagcgattatgaaaattataatgaatattattatgatagaactggtatgaacagtgagagtgataatatatcaatcaaaacagaatatgaattctatgatgaaacacaagatcaaagtacacaactagtaggttacgacattaaactcaaaaccaatgaggatgattttatggctatgatagatcagtgggtgtccatgattatatagatgaatcaattaataaagtagtatatggaagagagtctcacgtaagatggcgggatatatggcaagaacataatgatggcgtatacagtataggaaaggagtgcatagataatatatacgaagacaaccataccgtagacgaattctacaagatagacagcgtatcagatgtagatgacgcggaacacatatctccgataactaaaaaaccatagaatcagttgatgataatacctacatttctaatcttccgtataccatcaaatacaaaatattcgagcaacaataagtattttttatacctttaaaactgataaataaattttttctagtgatattttggcaagatgagaatcctatttctcatcgctttcatgtatgggtgtgttcactcatatgttaacgcggttgaaaccaaatgtccaaatctagacattgtaacatcttctggagaatttcattgttcaggatgtgtggaacatatgcctgagtttagctatatgtattggttggcaaaggatatgaaatcggacgaggataccaagtttatagaacatctgggtgatggcatcaaagaagatgaaaccgttcgtaccacagatagtggaatcgtcactctacgtaaagtccttcatgtgactgatactaataaatttgataattataggttcacttgtgtcctcgctacgctagatggcatttataaaaagaatgtttgctgaagtagttgtgtgctactatttttatttatgatataatctaatggaattaatttgaattgatatttatccaatactaaagattatattagaatcaaattaatcttttatacgagaaaaaataacgacatacgtcgtcaacaaattaaactttttatttattagttaactagcttatagaacttgctcattgttatgtttctaaaacgggtacggcatataggacaattatccgacgcaccggtttctcttcgtgttctatgccatatattgatgcatgttatgcaaaatatatgagtacacgaatccaataaaccaaagtatctatcgttttgagtaaacaacttcatagcaaattccacattctttttctttacttactctatacacgtcctcgtatttatttagtattttgatgatatccaactcagaaatggttgttgtattattgggtgtatttggagtataggtattattagctatgtaccaatttaccaaccctcttaatattgattgataatcacatcggttatccaattaataactaaattgtagtgtatatatagaccatatatgtttctatttttttgacagttacgtatagtttcagtaagttttgattgttgtattcctgtatctctagataagttagtcatatagtcccttccggcgatacgttttttccaagcccgaaattgattagccaaatgtgtatttatttttgtgatattgatataatatttcggataatgcatactgttagtcttatatcatttggttcatctatgtattgtaatattgttacatgatctatagatgatgtattgattttggcaggatcgaattccatatccgcgactaaacagtgaaaaaaatgtaaatactttttaaattttaaattagtaaaacttttttttattttttatgattccaaaaatactgaatacaaagtcctaaattataaatatggagatcatactaccacaacttattattatgtatacaaggccggtgtaatagatagatatatataattctattacaccggcagacaattaccgaccggtatttgtcgttaccaacataccgtataatatgtaatatacaattccataacccattgacagttgttatacatcaaaattgcaattcttttgattacgatgttataagaatgtagttaattgatgtatgatgttaatgtgtcctctttcctcttataacatcgtaatcaaaaacttttttataatatatacctaataatgtgtcttaatagttctcgtgattcgtcaaacaatcattcttataaaatataataaagcaacgtaaaaacacataaaaataagcgtaactaataagacaatggatatttacgacgataaaggtctacagactattaaactgtttaataatgaatttgattgtataaggaatgacatcagagaattatttaaacatgtaactgattccgatagtatacaacttccgatggaagacaattctgatattatagaaaatatcagaaaaatactatatagacgattaaaaaatgtagaatgtgttgacatcgataacacaataacttttatgaaatacgatccaaatgatgataataagcgtacgtgttctaattgggtacccttaactaataactatatggaatattgtctagtaatatatttggaaacaccgatatgtggaggcaaaataaaattataccaccctacaggaaatataaagtcggataaggatattatgtttgcaaagactctagactttaaatcaacgaaagtgttaactggacgtaaaacaattgccgttctagacatatccgtttcatataatagatcaatgactactattcactacaacgacgacgttgatatagatatacatactgataaaaatggaaaagagttatgttattgttatataacaatagatgatcattacttggttgatgtggaaactataggagttatagtcaatagatctggaaaatgtctgttagtaaataaccatctaggtataggtatcgttaaagataaacgtataagcgatagttttggagatgtatgtatggatacaatatttgacttttctgaagcacgagagttattttcattaactaatgatgataacaggaatatagcatgggacactgataaactagacgatgatacagatatatggactcccgtcacagaagatgattacaaatttctttctagactagtattgtatgcaaaatctcaatcggatactgtatttgactattatgttcttactggtgatacggaaccacccactgtattcattttcaaggtaactagattttactttaatatgccgaaataaaaaatttttgtataatatctagaggtagaggtattgtttagataaatacaaataacatagatacatcgcatacttagcatttttataaatatacataagacatacactttatacatttttgtaaaaatactcataaaaaaatttataaaaattatggcacaaccatatcttgtataggtagtttagttcgtcgagtgaacctataaacagataatagacaacacataataatgcctactaatacaagcataataccgggagatgggatatatgacgttgtagtgtttgggttttctgaacgttgatagtctactaatactacatgctgacatctaatgcctgtataaccatgagagcatctacaatacataccgtcaatatctctagcgtggatacagtcaccgtgtaaacaatatccatctccctctggaccgcataatctgatagctggaatatctgttgtagcgtttgtaatttctggcaatgtcgtttcgatagcgttaccactatcggcgaatgatctgattatcatagcagcgaacaacaacatcagataatttatcaacatttttgatggattctgtgtttatgctgtttctcagtgtgtgtttatgacaagattgggaattttatattattaattcagtaatataaactaataatatattgttaattgtgtaaataatataaaaataacaatacaatattgaatgtgttgctgttaaaaatgtatgtgttaatataatagaataaaataaatgagtatgatcattttagataacgattgattttatcattaccgcttcattcttatattctttgcttacggaacctatatttagaaacatctactaacaattttttatgcttgcattattaatggtatgtaatatgattgattgtgtacgcaataccaatttgttaagtatgaatacggggtacaaacataaattgaaatttaacattatttatttatgatatatatcgttatcgttaggtctataccatggatatctttaaagaactaatcttaaaacaccctgatgaaaatgttttgatttctccagtttccattttatctactttatctattctaaatcatggagcagctggttctacagctgaacaactatcaaaatatatagagaatatgaatgagaatacacccgatgacaataatgatgacatggaggtagatattccgtattgtgcgacactagctaccgcaaataaaatatacggtagcgatagtatcgagttccacgcctccttcctacaaaaaataaaagacgattttcaaactgtaaactttaataatgctaaccaaacaaaggaactaatcaacgaatgggttaagacaatgacaaatggtaaaattaattccttattgactagtccgctatccattaatactcgtatgacagttgttagcgccgtccattttaaagcaatgtggaaatatccattttctaaacatcttacatatacagacaagttttatatttctaagaatatagttaccagcgttgatatgatggtgggtaccgagaataacttgcaatatgtacatattaatgaattattcggaggattctctattatcgatattccatacgagggaaactctagtatggtaattatactaccggacgacatagaaggtatatataacatagaaaaaaatataacagatgaaaaatttaaaaaatggtgtggtatgttatctactaaaagtatagacttgtatatgccaaagtttaaagtggaaatgacagaaccgtataatctggtaccgattttagaaaatttaggacttactaatatattcggatattatgcagattttagcaagatgtgtaatgaaactatcactgtagaaaaatttctacatacgacgtttatagatgttaatgaggagtatacagaagcatcggccgttacaggagtatttacgattaacttttcgatggtatatcgtacgaaggtctacataaaccatccattcatgtacatgattaaagacaccacaggacgtatactttttatagggaaatactgctatccgcaataaatataaacaaatagacttttataaagagtcttcaacgataagtatatcgacatactacttatgctgcgaaagattctgaacgagaacgactatctcaccctcttggatcatatccgcactgctaaatactaaatctccactacactttttatcatcttatgaggaatgattgccttcgtgaaataggaataattagcaccagaatagctatggattattgtggtagagagtgcactattctatgtcgtctactggatgaagatgtgacgtacaaaaaaataaaactagaaattgaaacgtgtcacaacttatcaaaacatatagatagacgaggaaacaatgcgctacattgttacgtctccaataaatgcgatacagacattaagattgttctctcgcggagtcgagagactttgtagaaacaacgaaggattaactccgctaggagtatacagtaagcatagatacgtaaaatctcagattgtgcatctactgatatccagctattcaaattcctctaacgaactcaagtcgaatataaatgatttcgatctgtattcggataatatcgacttacgtctgctaaaatacctaattgtggataaacggatacgtccgtccaagaatacgaattatgcaatcaatggtctcggattggtggatatatacgtaacgacgcctaatccgagaccagaagtattgctatggcttcttaaatcagaatgttacagcaccggttacgtatttcgtacctgtatgtacgacagtgatatgtgtaagaactctcttcattactatatatcgtctcatagagaatctcaatctctatccaaggatgtaattaaatgtttgatcgataacaatgtttccatccatggcagagacgaaggaggatctttacccatccaatactactggtctttctcaaccatagatatagagattgttaaattattattaataaaggatgtggacacgtgtagagtatacgacgtcagccctatattagaggcgtattatctaaacaagcgatttagagtaaccccatataatgtagacatggaaatcgttaatcttcttattgagagacgtcatactcttgtcgacgtaatgcgtagtattacttcgtacgattccagagaatataaccactacatcatcgataacattctaaagagatttagacaacaggatgaatccatcgtacaagccatactgataaactacttacattacggcgatatggtcgttcgatgcatgttagataacggacaacaactatcctctacacgactactttgttaataataatctcgtcgatgtaaacgtcgtaaggtttatcgtggaaaatatggacacgcggctgtaaatcacgtatcgaacaatggccgtctatgtatgtacggtctgatattatcgagatttaataattgcgggtatcactgttatgaaaccatactgatagatgtatttgatatactaagcaagtacatggatgatatagatatgatcgataactctactatattacgcggtcgatgtcaataatatacaatttgcaaagcggttattggaatatggagcgagtatcacgctcgataatcaatacggccatccagaaaagcagttacagaagagaaaacaaaacgaaatcgttgttctacaagatgtctctccctacgacgattactacgtaaaaaagatactagcctactgcctattaagggacgagtcattcgcggaactacatagtaaattctgtttaaacgaggactataaaagtgtatttatgaaaaatatatcattcgataagatagattccatcatcgtgacataagtcgcctcaaagagattcgaatctccgacaccgacctgtatacggtatcacagctatcttaaagccatacattcagacagtcacatttcatttcccatgtacgacgatctcatagaacagtgccatctatcgatggagcgtaaaagtaaactcgtcgacaaagcactcaataaattagagtctaccatcggtcaatctagactatcgtatttgcctccggaaattatgcgcaatatcatctaaacagtatgttgtacggaaagaaccattacaaatattatccatgatagaaagaaaatatctatatgattggagaagtaggaaacaggaacaagacaacgattactacattattaaatcatgaagtccgtattatactcgtatatattgtttctctcatgtataataataaacggaagagatatagcaccgcatgcaccatccgatggaaagtgtaaagacaacgaatacaaacgccataatttgtgtccgggaacatacgcttccagattatgcgatagcaagactaacacacgatgtacgccgtgtggttcgggtaccttcacatctcgcaataatcatttacccgcttgtctaagttgtaacggaagacgcgatcgtgtaacacgactcacaatagaatctgtgaatgctctcccggatattattgtcttctcaaaggatcatccggatgcaaggcatgtgtttcccaaacaaaatgtggaataggatacggagtatccggagacgtcatctgttctccgtgtggtctcggaacatattctcacaccgtctcttccgcagataaatgcgaacccgtacccagaaatacgtttaactatatcgatgtggaaattaacctgtatccagttaacgacacgtcgtgtactcggacgaccactaccggtctcagcgaatccatctcaacgtcggaactaactattactatgaatcataaagactgtaatcccgtatttcgtgatggatacttctccgttcttaataaggtagcgacttcaggtttctttacaggagaaaggtgtgcactctgaatttcgagattaaatgcaataacaaagattcttcctccaaacagttaacgaaagcaaagaatgatactatcatgccgcattcggagacagtaactctagtgggcgacatctatatactatatagtaataccaatactcaagactacgaaactgatacaatctcttatcatgtgggtaatgttctcgatgtcgatagccatatgcccggtagttgcgatatacataaactgatcactaattccaaacccacccactttttatagtaagtttttcacccataaataataaatacaataattaatttctcgtaaaagtagaaaatatattctaatttattgcacggtaaggaagtagaatcataaagaacagtactcaatcaatagcaattatgaaacaatatatcgtcctggcatgcatgtgcctggcggcagctgctatgcctgccagtcttcagcaatcatcctcatcctcctcctcgtgtacggaagaagaaaacaaacatcatatgggaatcgatgttattatcaaagtcacaaagcaagaccaaacaccgaccaatgataagatttgccaatccgtaacggaaattacagagtccgagtcagatccagatcccgaggtggaatcagaagatgattccacatcagtcgaggatgtagatcctcctaccacttattactccatcatcggtggaggtctgagaatgaactttggattcaccaaatgtcctcagattaaatccatctcagaatccgctgatggaaacacagtgaatgctagattgtccagcgtgtccccaggacaaggtaaggactctcccgcgatcactcatgaagaagctcttgctatgatcaaagactgtgaagtgtctatcgacatcagatgtagcgaagaagagaaagacagcgacatcaagacccatccagtactcgggtctaacatctctcataagaaagtgagttacgaagatatcatcggttcaacgatcgtcgatacaaaatgcgtcaagaatctagagtttagcgttcgtatcggagacatgtgcaaggaatcatctgaacttgaggtcaaggatggattcaagtatgtcgacggatcggcatctgaaggtgcaaccgatgatacttcactcatcgattcaacaaaactcaaagcgtgtgtctgaatcgataactctattcatctgaaattggatgagtagggttaatcgaacgattcaggcacaccacgaattaaaaaagtgtaccggacactatattccggtttgcaaaacaaaaatgttcttaactacattcacaaaaagttacctctcgcgacttcttctttttctgtctcaatagtgtgatacgattatgacactattcctattcctattcctatttcctttcagagtatcacaaaaatattaaacctctttctgatggtctcataaaaaaagttttacaaaaatatttttattctctttctctctttgatggtctcataaaaaaagttttacaaaaatatttttattctctttctctctttgatggtctcataaaaaaagttttacaaaaatatttttattctctttctctctttgatggtctcataaaaaaagttttacaaaaatatttttattctctttctctctttgatggtctcataaaaaaagttttacaaaaatatttttattctctttctctctttgatggtctcataaaaaaagttttacaaaaatatttttattctctttctctctttgatggtctcataaaaaaagttttacaaaaatatttttattctctttctctctttgatggtctcataaaaaaagttttacaaaaatatttttattctctttctctctttgatggtctcataaaaaaagttttacaaaaatatttttattctctttctctctttgatggtctcataaaaaaagttttacaaaaatatttttattctctttctctctttgatggtctcataaaaaaagttttacaaaaatatttttattctctttctctctttgatggtctcataaaaaaagttttacaaaaatatttttattctctttctctctttgatggtctcataaaaaagttttacaaaaatatttttattctctttctctctttgatggtctcataaaaaagttttacaaaaatatttttattctctttctctctttgatggtctcataaaaaaagttttacaaaaatatttttattctctttctctctttgatggtctcataa

SEQ ID NO: 68 - DNA, 197935 bp, Artificial Sequence
  GLV-1h324 (SE-Tyrp1-SEL-mTyr)
ttatgagaccatcaaagagagaaagagaataaaaatatttttgtaaaactttttttatgagaccatcaaagagagaaagagaataaaaatatttttgtaaaacttttttatgagaccatcaaagagagaaagagaataaaaatatttttgtaaaacttttttatgagaccatcaaagagagaaagagaataaaaatatttttgtaaaactttttttatgagaccatcaaagagagaaagagaataaaaatatttttgtaaaactttttttatgagaccatcaaagagagaaagagaataaaaatatttttgtaaaactttttttatgagaccatcaaagagagaaagagaataaaaatatttttgtaaaactttttttatgagaccatcaaagagagaaagagaataaaaatatttttgtaaaactttttttatgagaccatcaaagagagaaagagaataaaaatatttttgtaaaactttttttatgagaccatcaaagagagaaagagaataaaaatatttttgtaaaactttttttatgagaccatcaaagagagaaagagaataaaaatatttttgtaaaactttttttatgagaccatcaaagagagaaagagaataaaaatatttttgtaaaactttttttatgagaccatcaaagagagaaagagaataaaaatatttttgtaaaactttttttatgagaccatcaaagagagaaagagaataaaaatatttttgtaaaactttttttatgagaccatcaaagagagaaagagaataaaaatatttttgtaaaactttttttatgagaccatcagaaagaggtttaatatttttgtgatactctgaaaggaaataggaataggaataggaatagtgtcataatcgtatcacactattgagacagaaaaagaagaagtcgcgagaggtaactttttgtgaatgtagttaagaacatttttgttttgcaaaccggaatatagtgtccggtacacttttttaattcgtggtgtgcctgaatcgttcgattaaccctactcatccaatttcagatgaatagagttatcgattcagacacacgctttgagttttgttgaatcgatgagtgaagtatcatcggttgcaccttcagatgccgatccgtcgacatacttgaatccatccttgacctcaagttcagatgattccttgcacatgtctccgatacgaacgctaaactctagattcttgacgcattttgtatcgacgatcgttgaaccgatgatatcttcgtaactcactttcttatgagagatgttagacccgagtactggatgggtcttgatgtcgctgtctttctcttcttcgctacatctgatgtcgatagacacttcacagtctttgatcatagcaagagcttcttcatgagtgatcgcgggagagtccttaccttgtcctggggacacgctggacaatctagcattcactgtgtttccatcagcggattctgagatggatttaatctgaggacatttggtgaatccaaagttcattctcagacctccaccgatgatggagtaataagtggtaggaggatctacatcctcgactgatgtggaatcatcttctgattccacctcgggatctggatctgactcggactctgtaatttccgttacggattggcaaatcttatcattggtcggtgtttggtcttgctttgtgactttgataataacatcgattcccatatgatgtttgttttcttcttccgtacacgaggaggaggatgaggatgattgctgaagactggcaggcatagcagctgccgccaggcacatgcatgccaggacgatatattgtttcataattgctattgattgagtactgttctttatgattctacttccttaccgtgcaataaattagaatatattttctacttttacgagaaattaattattgtatttattatttatgggtgaaaaacttactataaaaagtgggtgggtttggaattagtgatcagtttatgtatatcgcaactaccgggcatatggctatcgacatcgagaacattacccacatgataagagattgtatcagtttcgtagtcttgagtattggtattactatatagtatatagatgtcgcccactagagttactgtctccgaatgcggcatgatagtatcattctttgctttcgttaactgtttggaggaagaatctttgttattgcatttaatctcgaaattcagagtgcacacctttctcctgtaaagaaacctgaagtcgctaccttattaagaacggagaagtatccatcacgaaatacgggattacagtctttatgattcatagtaatagttagttccgacgttgagatggattcgctgagaccggtagtggtcgtccgagtacacgacgtgtcgttaactggatacaggttaatttccacatcgatatagttaaacgtatttctgggtacgggttcgcatttatctgcggaagagacggtgtgagaatatgttccgagaccacacggagaacagatgacgtctccggatactccgtatcctattccacattttgtttgggaaacacatgccttgcatccggatgatcctttgagaagacaataatatccgggagagcattcacagattctattgtgagtcgtgttacacgatcgcgtcttccgttacaacttagacaagcgggtaaatgattattgcgagatgtgaaggtacccgaaccacacggcgtacatcgtgtgttagtcttgctatcgcataatctggaagcgtatgttcccggacacaaattatggcgtttgtattcgttgtctttacactttccatcggatggtgcatgcggtgctatatctcttccgtttattattatacatgagagaaacaatatatacgagtataatacggacttcatgatttaataatgtagtaatcgttgtcttgttcctgtttcctacttctccaatcatatagatattttctttctatcatggataatatttgtaatggttctttccgtacaacatactgtttagatgatattgcgcataatttccggaggcaaatacgatagtctagattgaccgatggtagactctaatttattgagtgctttgtcgacgagtttacttttacgctccatcgatagatggcactgttctatgagatcgtcgtacatgggaaatgaaatgtgactgtctgaatgtatggctttaagatagctgtgataccgtatacaggtcggtgtcggagattcgaatctctttgaggcgacttatgtcacgatgatggaatctatcttatcgaatgatatatttttcataaatacacttttatagtcctcgtttaaacagaatttactatgtagttccgcgaatgactcgtcccttaataggcagtaggctagtatcttttttacgtagtaatcgtcgtagggagagacatcttgtagaacaacgatttcgttttgttttctcttctgtaactgcttttctggatggccgtattgattatcgagcgtgatactcgctccatattccaataaccgctttgcaaattgtatattattgacatcgaccgcgtaatatagtagagttatcgatcatatctatatcatccatgtacttgcttagtatatcaaatacatctatcagtatggtttcataacagtgatacccgcaattattaaatctcgataatatcagaccgtacatacatagacggccattgttcgatacgtgatttacagccgcgtgtccatattttccacgataaaccttacgacgtttacatcgacgagattattattaacaaagtagtcgtgtagaggatagttgttgtccgttatctaacatgcatcgaacgaccatatcgccgtaatgtaagtagtttatcagtatggcttgtacgatggattcatcctgttgtctaaatctctttagaatgttatcgatgatgtagtggttatattctctggaatcgtacgaagtaatactacgcattacgtcgacaagagtatgacgtctctcaataagaagattaacgatttccatgtctacattatatggggttactctaaatcgcttgtttagataatacgcctctaatatagggctgacgtcgtatactctacacgtgtccacatcctttattaataataatttaacaatctctatatctatggttgagaaagaccagtagtattggatgggtaaagatcctccttcgtctctgccatggatggaaacattgttatcgatcaaacatttaattacatccttggatagagattgagattctctatgagacgatatatagtaatgaagagagttcttacacatatcactgtcgtacatacaggtacgaaatacgtaaccggtgctgtaacattctgatttaagaagccatagcaatacttctggtctcggattaggcgtcgttacgtatatatccaccaatccgagaccattgattgcataattcgtattcttggacggacgtatccgtttatccacaattaggtattttagcagacgtaagtcgatattatccgaatacagatcgaaatcatttatattcgacttgagttcgttagaggaatttgaatagctggatatcagtagatgcacaatctgagattttacgtatctatgcttactgtatactcctagcggagttaatccttcgttgtttctacaaagtctctcgactccgcgagagaacaatcttaatgtctgtatcgcatttattggagacgtaacaatgtagcgcattgtttcctcgtctatctatatgttttgataagttgtgacacgtttcaatttctagttttatttttttgtacgtcacatcttcatccagtagacgacatagaatagtgcactctctaccacaataatccatagctattctggtgctaattattcctatttcacgaaggcaatcattcctcataagatgataaaaagtgtagtggagatttagtatttagcagtgcggatatgatccaagagggtgagatagtcgttctcgttcagaatctttcgcagcataagtagtatgtcgatatacttatcgttgaagactctttataaaagtctatttgtttatatttattgcggatagcagtatttccctataaaaagtatacgtcctgtggtgtctttaatcatgtacatgaatggatggtttatgtagaccttcgtacgatataccatcgaaaagttaatcgtaaatactcctgtaacggccgatgcttctgtatactcctcattaacatctataaacgtcgtatgtagaaatttttctacagtgatagtttcattacacatcttgctaaaatctgcataatatccgaatatattagtaagtcctaaattttctaaaatcggtaccagattatacggttctgtcatttccactttaaactttggcatatacaagtctatacttttagtagataacataccacaccattttttaaatttttcatctgttatatttttttctatgttatatataccttctatgtcgtccggtagtataattaccatactagagtttccctcgtatggaatatcgataatagagaatcctccgaataattcattaatatgtacatattgcaagttattctcggtacccaccatcatatcaacgctggtaactatattcttagaaatataaaacttgtctgtatatgtaagatgtttagaaaatggatatttccacattgctttaaaatggacggcgctaacaactgtcatacgagtattaatggatagcggactagtcaataaggaattaattttaccatttgtcattgtcttaacccattcgttgattagttcctttgtttggttagcattattaaagtttacagtttgaaaatcgtcttttattttttgtaggaaggaggcgtggaactcgatactatcgctaccgtatattttatttgcggtagctagtgtcgcacaatacggaatatctacctccatgtcatcattattgtcatcgggtgtattctcattcatattctctatatattttgatagttgttcagctgtagaaccagctgctccatgatttagaatagataaagtagataaaatggaaactggagaaatcaaaacattttcatcagggtgttttaagattagttctttaaagatatccatggtatagacctaacgataacgatatatatcataaataaataatgttaaatttcaatttatgtttgtaccccgtattcatacttaacaaattggtattgcgtacacaatcaatcatattacataccattaataatgcaagcataaaaaattgttagtagatgtttctaaatataggttccgtaagcaaagaatataagaatgaagcggtaatgataaaatcaatcgttatctaaaatgatcatactcatttattttattctattatattaacacatacatttttaacagcaacacattcaatattgtattgttatttttatattatttacacaattaacaatatattattagtttatattactgaattaataatataaaattcccaatcttgtcataaacacacactgagaaacagcataaacacagaatccatcaaaaatgttgataaattatctgatgttgttgttcgctgctatgataatcagatcattcgccgatagtggtaacgctatcgaaacgacattgccagaaattacaaacgctacaacagatattccagctatcagattatgcggtccagagggagatggatattgtttacacggtgactgtatccacgctagagatattgacggtatgtattgtagatgctctcatggttatacaggcattagatgtcagcatgtagtattagtagactatcaacgttcagaaaacccaaacactacaacgtcatatatcccatctcccggtattatgcttgtattagtaggcattattatgtgttgtctattatctgtttataggttcactcgacgaactaaactacctatacaagatatggttgtgccataatttttataaatttttttatgagtatttttacaaaaatgtataaagtgtatgtcttatgtatatttataaaaatgctaagtatgcgatgtatctatgttatttgtatttatctaaacaatacctctacctctagatattatacaaaaattttttatttcggcatattaaagtaaaatctagttaccttgaaaatgaatacagtgggtggttccgtatcaccagtaagaacataatagtcaaatacagtatccgattgagattttgcatacaatactagtctagaaagaaatttgtaatcatcttctgtgacgggagtccatatatctgtatcatcgtctagtttatcagtgtcccatgctatattcctgttatcatcattagttaatgaaaataactctcgtgcttcagaaaagtcaaatattgtatccatacatacatctccaaaactatcgcttatacgtttatctttaacgatacctatacctagatggttatttactaacagacattttccagatctattgactataactcctatagtttccacatcaaccaagtaatgatcatctattgttatataacaataacataactcttttccatttttatcagtatgtatatctatatcaacgtcgtcgttgtagtgaatagtagtcattgatctattatatgaaacggatatgtctagaacggcaattgttttacgtccagttaacactttcgttgatttaaagtctagagtctttgcaaacataatatccttatccgactttatatttcctgtagggtggtataattttattttgcctccacatatcggtgtttccaaatatattactagacaatattccatatagttattagttaagggtacccaattagaacacgtacgcttattatcatcatttggatcgtatttcataaaagttattgtgttatcgatgtcaacacattctacattttttaatcgtctatatagtatttttctgatattttctataatatcagaattgtcttccatcggaagttgtatactatcggaatcagttacatgtttaaataattctctgatgtcattccttatacaatcaaattcattattaaacagtttaatagtctgtagacctttatcgtcgtaaatatccattgtcttattagttacgcttatttttatgtgtttttacgttgctttattatattttataagaatgattgtttgacgaatcacgagaactattaagacacattattaggtatatattataaaaaagtttttgattacgatgttataagaggaaagaggacacattaacatcatacatcaattaactacattcttataacatcgtaatcaaaagaattgcaattttgatgtataacaactgtcaatgggttatggaattgtatattacatattatacggtatgttggtaacgacaaataccggtcggtaattgtctgccggtgtaatagaattatatatatctatctattacaccggccttgtatacataataataagttgtggtagtatgatctccatatttataatttaggactttgtattcagtatttttggaatcataaaaaataaaaaaaagttttactaatttaaaatttaaaaagtatttacatttttttcactgtttagtcgcggatatggaattcgatcctgccaaaatcaatacatcatctatagatcatgtaacaatattacaatacatagatgaaccaaatgatataagactaacagtatgcattatccgaaatattatatcaatatcacaaaaataaatacacatttggctaatcaatttcgggcttggaaaaaacgtatcgccggaagggactatatgactaacttatctagagatacaggaatacaacaatcaaaacttactgaaactatacgtaactgtcaaaaaaatagaaacatatatggtctatatatacactacaatttagttattaattggataaccgatgtgattatcaatcaatattaagagggttggtaaattggtacatagctaataatacctatactccaaatacacccaataatacaacaaccatttctgagttggatatcatcaaaatactaaataaatacgaggacgtgtatagagtaagtaaagaaaaagaatgtggaatttgctatgaagttgtttactcaaaacgatagatactttggtttattggattcgtgtactcatatattttgcataacatgcatcaatatatggcatagaacacgaagagaaaccggtgcgtcggataattgtcctatatgccgtacccgttttagaaacataacaatgagcaagttctataagctagttaactaataaataaaaagtttaatttgttgacgacgtatgtcgttattttttctcgtataaaagattaatttgattctaatataatctttagtattggataaatatcaattcaaattaattccattagattatatcataaataaaaatagtagcacacaactacttcagcaaacattctttttataaatgccatctagcgtagcgaggacacaagtgaacctataattatcaaatttattagtatcagtcacatgaaggactttacgtagagtgacgattccactatctgtggtacgaacggtttcatcttctttgatgccatcacccagatgttctataaacttggtatcctcgtccgatttcatatcctttgccaaccaatacatatagctaaactcaggcatatgttccacacatcctgaacaatgaaattctccagaagatgttacaatgtctagatttggacatttggtttcaaccgcgttaacatatgagtgaacacacccatacatgaaagcgatgagaaataggattctcatcttgccaaaatatcactagaaaaaatttatttatcagttttaaaggtataaaaaatacttattgttgctcgaatattttgtatttgatggtatacggaagattagaaatgtaggtattatcatcaactgattctatggttttatgtattctatcatgtttcactattgcgttggaaataatatcatatgcttccacatatattttattttgttttaactcataatactcacgtaattctggattattggcatatctatgaataattttagctccatgatcagtaaatattaatgagaacatagtattaccacctaccattatttttttcatctcattcaattcttaattgcaaagatctatataatcattatagcgttgacttatggactctggaatcttagacgatgtacagtcatctataatcatggcatatttaatacattgttttatagcatagtcgttatctacgatgttagatatttctctcaatgaatcaatcacacaatctaatgtaggtttatgacataatagcattttcagcagttcaatgtttttagattcgttgatggcaatggctatacatgtatatccgttatttgatctaatgttgacatctgaaccggattctagcagtaaagatactagagattgtttattatatctaacagccttgtgaagaagtgtttctcctcgtttgtcaatcatgttaatgtctttaagataaggtaggcaaatgtttatagtactaagaattgggcaagcataagacatgtcacaaagacccttttttgtatgtataagtgtaaaaattataacatccatagttggatttacataggtgtccaatcgggatctctccatcatcgagataattgatggcatctcccttccttttttagtagatatttcatcgtgtaagaatcaatattaatatttctaaagtatccgtgtatagcctctttatttaccacagctccatattccactagagggatatcgccgaatgtcatatactcaattagtatatgttggaggacatccgagttcattgttttcaatatcaaagagatggtttccttatcatttctccatagtggtacaatactacacattattccgtgcggctttccattttccaaaaacaatttgaccaaatctaaatctacatctttattgtatctataatcactatttagataatcagccataattcctcgagtgcaacatgttagatcgtctatatatgaataagcagtgttatctattcctttcattaacaatttaacgatgtctatatctatatgagatgacttaatataatattgaagagctgtacaatagtttttatctataaaagacggcttgattccgtgattaattagacatttaacaacttccggacgcacatatgctctcgtatccgactctgaatacagatgagagatgatatacagatgcaatacggtaccgcaatttcgtagttgataatcatcatacgcgtatcagtactcgtcctcataaagaacactgcagccattttctatgaacaaatcaataattttagaaacaggatcattgtcattacataattttctataactgaacgatggttttcacatttaacactcaagtcaaatccatgttctaccaacacctttatcaagtcaacgtctacatttttggatttcatatagctgaatatattaaagttatttatgttgctaaatccagtggcttctagtagagccatcgctatatccttattaactttaacatgtctactatttgtgtattcttctaatggggtaagctgtctccaatttttgcgtaatggattagtgccactgtctagtagtagtttgacgacctcgacattattacaatgctcattaaaaaggtatgcgtgtaaagcattattcttgaattggttcctggtatcattaggatctctgtctttcaacatctgtttaagttcatcaagagccacctcctcattttccaaatagtcaaacattttgactgaatgagctactgtgaactctatacacccacacaactaatgtcattaaatatcatgtcaaaaacttgtacaattattaataaaaataatttagtgtttaaattttaccagttccagattttacacctccgttaatacctccattaaccccactggacgatcctcctccccacattccaccgccaccagatgtataagttttagatcctttattactaccatcatgtccatggataaagacactccacatgccgccactaccccctttagaagacatattaataagacttaaggacaagtttaacaataaaattaatcacgagtaccctactaccaacctacactattatatgattatagtttctatttttacagtaccttgactaaagtttctagtcacaagagcaatactaccaacctacactattatatgattatagtttctatttttataggaacgcgtacgagaaaatcaaatgtctaatttctaacggtagtgttgataaacgattgttatccgcggatacctcctctatcatgtcgtctattttcttactttgttctattaacttattagcattatatattatttgattataaaacttatattgcttattagcccaatctgtaaatatcggattattaacatatcgtttctttgtaggtttatttaacatgtacatcactgtaagcatgtccttaccatttattttaatttgacgcatatccgcaatttctttttcgcagtcggttataaattctatatatgatggatacatgctacatgtgtacttataatcgactaatatgaagtacttgatacatattttcagtaacgatttattattaccacctatgaataagtacctgtgatcgtctaggtaatcaactgttttcttaatacattcgatggttggtaatttactcagaataatttccaatatcttaatatataattctgctatttctgggatatatttatctgccagtataacacaaatagtaatacatgtaaacccatattttgttattatattaatgtctgcgccattatctattaaccattctactaggctgacactatgcgactcaatacaatgataaagtatactacatccatgtttatctattttgtttatatcatcaatatacggcttacaaagttttagtatcgataacacatccaactcacgcatagagaaggtagggaataatggcataatatttattaggttatcatcattgtcattatctacaactaagtttccattttttaaaatatactcgacaactttaggatctctattgccaaatttttgaaaatatttatttatatgcttaaatctatataatgtagctccttcatcaatcatacatttaataacattgatgtatactgtatgataagatacatattctaacaatagatcttgtatagaatctgtatatcttttaagaattgtggatattaggatattattacataaactattacacaattctaaaatataaaacgtatcacggtcgaataatagttgatcaactatataattatcgattttgtgatttttcttcctaaactgtttacgtaaatagttagatagaatattcattagttcatgaccactatagttactatcgaataacgcgtcaaatatttcccgtttaatatcgcatttgtcaagataataatagagtgtggtatgttcacgataagtataataacgcatctctttttcgtgtgaaattaaatagtttattacgtccaaagatgtagcataaccatcttgtgacctagtaataatataataatagagaactgttttacccattctatcatcataatcagtggtgtagtcgtaatcgtaatcgtctaattcatcatcccaattataatattcaccagcacgtctaatctgttctattttgatcttgtatccatactgtatgttgctacatgtaggtattcctttatccaataatagtttaaacacatctacattgggatttgatgttgtagcgtatttttctacaatattaataccatttttgatactatttatttctatacctttcgaaattagtaatttcaataagtctatattgatgttatcagaacatagatattcgaatatatcaaaatcattgatatttttatagtcgactgacgacaataacaaaatcacaacatcgtttttgatattattatttttcttggtaacgtatgcctttaatggagtttcaccatcatactcatataatggatttgcaccactttctatcaatgattgtgcactgctggcatcgatgttaaatgttttacaactatcatagagtatcttatcgttaaccatgattggttgttgatgctatcgcattttttggtttctttcatttcagttatgtatggatttagcacgtttgggaagcatgagctcatatgatttcagtactgtagtgtcagtactattagtttcaataagatcaatctctagatctatagaatcaaaacacgataggtcagaagataatgaatatctgtaggcttcttgttgtactgtaacttctggttttgttagatggttgcatcgtgctttaacgtcaatggtacaaattttatcctcgctttgtgtatcatattcgtccctactataaaattgtatattcagattatcatgcgatgtgtatacgctaacggtatcaataaacggagcacaccatttagtcataaccgtaatccaaaaatttttaaagtatatcttaacgaaagaagttgtgtcattgtctacggtgtatggtactagatcctcataagtgtatatatctagagtaatgtttaatttattaaatggttgataatatggatcctcgtgacaatttccgaagatggaaataagacataaacacgcaataaatctaattgcggacatggttactccttaaaaaaatacgaataatcaccttggctatttagtaagtgtcatttaacactatactcatattaatccatggactcataatctctatacgggattaacggatgttctatatacggggatgagtagttctcttctttaactttatactttttactaatcatatttagactgatgtatgggtaatagtgtttgaagagctcgttctcatcatcagaataaatcaatatctctgtttttttgttatacagatgtattacagcctcatatattacgtaatagaacgtgtcatctaccttattaactttcaccgcatagttgtttgcaaatacggttaatcctttgacctcgtcgatttccgaccaatctgggcgtataatgaatctaaactttaattgcttgtaatcattcgaaataatttttagtttgcatccgtagttatcccctttatgtaactgtaaatttctcaacgcgatatctccattaataatgatgtcgaattcgtgctgtatacccatactgaatggatgaacgaataccgacggcgttaatagtaatttactttttcatctttacatattgggtactagttttactatcataagtttataaattccacaagctactatggaataagccaaccatcttagtataccacacatgtcttaaagtttattaattaattacatgttgttttatatatatcgctacgaatttaaagagaaattagtttaggaagaaaaattatctatctacatcatcacgtctctgtattctacgatagagtgctactttaagatgcgacagatccgtgtcatcaaatatatactccattaaaatgattattccggcagcgaacttgatattggatatatcacaacctttgttaatatctacgacaatagacagcagtcccatggttccataaacagtgagtttatctttctttgaagagatattttgtagagatcttataaaactgtcgaatgacatcgcatttatatctttagctaaatcgtatatgttaccatcgtaatatctaaccgcgtctatcttaaacgtttccatcgctttaaagacgtttccgatagatggtctcatttcatcagtcatactgagccaacaaatataatcgtgtataacatctttgatagaatcagactctaaagaaaacgaatcggctttattatacgcattcatgataaacttaatgaaaaatgtttttcgttgtttaagttggatgaatagtatgtcttaataattgttattatttcattaattaatatttagtaacgagtacactctataaaaacgagaatgacataactaatcataactagttatcaaagtgtctaggacgcgtaattttcatatggtatagatcctgtaagcattgtctgtattctggagctattttctctatcgcattagtgagttcagaatatgttataaatttaaatcgaataacgaacataactttagtaaagtcgtctatattaactcttttattttctagccatcgtaataccatgtttaagatagtatattctctagttactacgatctcatcgttgtctagaatatcacatactgaatctacatccaattttagaaattggtctgtgttacatatctcttctatattattgttgatgtattgtcgtagaaaactattacgtagaccattttctttataaaacgaatatatagtactccaattatctttaccgatatatttgcacacataatccattctctcaatcactacatctttaagattttcgttgttaagatatttggctaaactatataattctattagatcatcaacagaatcagtatatatttttctagatccaaagacgaactctttggcgtcctctataatattcccagaaaagatattttcgtgttttagtttatcgagatctgatctgttcatatacgccatgattgtacggtacgttatgataaccgcataaaataaaaatccattttcatttttaaccaatactattcataattgagattgatgtaatactttgttactttgaacgtaaagacagtacacggatccgtatctccaacaagcacgtagtaatcaaatttggtgttgttaaacttcgcaatattcatcaatttagatagaaacttatactcatcatctgttttaggaatccatgtattattaccactttccaacttatcattatcccaggctatgtttcgtccatcatcgttgcgcagagtgaataattcttttgtattcggtagttcaaatatatgatccatgcatagatcggcaaagctattgtagatgtgatttttcctaaatctaatataaaactcgtttactagcaaacactttcctgatttatcgaccaagacacatatggtttctaaatctatcaagtggtggggatccatagttatgacgcagtaacatatattattacattcttgactgtcgctaatatctaaatatttattgttatcgtattggattctgcatatagatggcttgtatgtcaaagatatagaacacataaccaatttatagtcgcgctttacattctcgaatctaaagttaagagatttagaaaacattatatcctcggatgatgttatcactgtttctggagtaggatatattaaagtctttacagatttcgtccgattcaaataaatcactaaataatatcccacattatcatctgttagagtagtatcattaaatctattatattttatgaaagatatatcactgctcacctctatatttcgtacatttttaaactgtttgtataatatctctctgatacaatcagatatatctattgtgtcggtagacgataccgttacatttgaattaatggtgttccattttacaacttttaacaagttgaccaattcatttctaatagtatcaaactctccatgattaaatattttaatagtatccattttatatcactacggacacaaagtagctgacataaaccattgtataatttttatgttttatgtttattagcgtacacattttggaagttccggcttccatgtatttcctggagagcaagtagatgatgaggaaccagatagtttatatccgtacttgcacttaaagtctacattgtcgttgtatgagtatgatcttttaaacccgctagacaagtatccgtttgatattgtaggatgtggacatttaacaatctgacacgtgggtggatcggaccattctcctcctgaacacaggacactagagttaccaatcaacgaatatccactattgcaactataagttacaacgctcccatcggtataaaaatcctcgtatccgttatgtcttccgttggatatagatggaggggattggcatttaacagattcacaaataggtgcctcgggattccataccatagatccagtagatcctaattcacaatacgatttagattcaccgatcaactgatatccgctattacaagagtacgttatactagagccaaagtctactccaccaatatcaagttggccattatcgatatctcgaggcgatgggcatctccgtttaatacattgattaaagagtgtccatccagtacctgtacatttagcatatataggtcccattttttgctttctgtatccaggtagacatagatattctatagtgtctcctatgttgtaattagcattagcatcagtctccacactattcttaaatttcatattaatgggtcgtgacggaatagtacagcatgatagaacgcatcctattcccaacaatgtcaggaacgtcacgctctccaccttcatatttatttatccgtaaaaatgttatcctggacatcgtacaaataataaaaagcccatatatgttcgctattgtagaaattgtttttcacagttgctcaaaaacgatggcagtgacttatgagttacgttacactttggagtctcatctttagtaaacatatcataatattcgatattacgagttgacatatcgaacaaattccaagtatttgattttggataatattcgtattttgcatctgctataattaagatataatcaccgcaagaacacacgaacatctttcctacatggttaaagtacatgtacaattctatccatttgtcttccttaactatatatttgtatagataattacgagtctcgtgagtaattccagtaattacatagatgtcgccgtcgtactctacagcataaactatactatgatgtctaggcatgggagacttttttatccaacgatttttagtgaaacattccacatcgtttaatactacatatttctcatacgtggtataaactccacccattacatatatatcatcgtttacgaataccgacgcgcctgaatatctaggagtaattaagtttggaagtcttatccatttcgaagtgccgtgtttcaaatattctgccacacccgttgaaatagaaaattctaatcctcctattacatataactttccatcgttaacacaagtactaacttctgattttaacgacgacatattagtaaccgttttccattttttcgttttaagatctacccgcgatacggaataaacatgtctattgttaatcatgccgccaataatgtatagacaattatgtaaaacatttgcattatagaattgtctatctgtattaccgactatcgtccaatattctgttctaggagagtaatgggttattgtggatatataatcagagtttttaatgactactatattatgttttataccatttcgtgtcactggctttgtagatttggatatagttaatcccaacaatgatatagcattgcgcatagtattagtcataaacttgggatgtaaaatgttgatgatatctacatcgtttggatttttatgtatccactttaataatatcatagctgtaacatcctcatgatttacgttaacgtcttcgtgggataagatagttgtcagttcatcctttgataattttccaaattctggatcggatgtcaccgcagtaatattgttgattatttctgacatcgacgcattatatagttttttaattccatatcttttagaaaagttaaacatccttatacaatttgtgaaattaatattatgaatcatagtttttacacatagatctactacaggcggaacatcaattattatggcagcaactagtatcatttctacattgtttatggtgatgtttatcttcttccagcgcatatagtctaatagcgattcaaacgcgtgatagtttataccattcaatataatcgcttcatcctttagatggtgatcctgaatgcgtttaaaaaaattatacggagacgccgtaataatttccttattcacttgtataatttccccattgatagaaaatattacgctttccattcttaaagtactataagtaattatagtataatgtaaacgtttatatattcaatatttttataaaaatcattttgacattaattcctttttaaatttccgtctatcatctatagaaacgtattctatgaatttataaaatgcttttacgtgtcctatcgtaggcgatagaaccgctaaaaagcctatcgaatttctacaaaagaatctgttatatggtatagggagagtataaaacattaaatgtccgtacttattaaagtattcagtagccaatcctaactctttcgaatacttattaatggctcttgttctgtacgaatctatttttttgaacaacggacctagtggtatatcttgttctatgtatctaaaataatgtctgactagatccgttagtttaatatccgcagtcatcttgtctagaatggcaaatctaactgcgggtttaggctttagtttagtttctatatctacatctatgtctttatctaacaccaaaaatataatagctaatattttattacaatcatccggatattcttctacgatctcactaactaatgtttctttggttatactagtatagtcactatcggacaaataaagaaaatcagatgatcgatgaataatacatttaaattcatcatctgtaagatttttgagatgtctcattagaatattattagggttagtactcattatcattcggcagctattacttattttattatttttcaccatatagatcaatcattagatcatcaaaatatgtttcaatcatcctaaagagtatggtgaatgactcttcccatctaatttctgaacgttcaccaatgtctctagccactttggcactaatagcgatcattcgcttagcgtcttctatattattaactggttgatttaatctatctagcaatggaccgtcggacagcgtcattctcatgttcttaatcaatgtacatacatcgccgtcatctaccaattcatccaacaacataagctttttaaaatcatcattataataggtttgatcgttgtcatttctccaaagaatatatctaataagtagagtcctcatgcttagttaacaactattttttatgttaaatcaattagtacaccgctatgtttaatacttattcatattttagtttttaggattgagaatcaatacaaaaattaatgcatcattaattttagaaatacttagtttccacgtagtcaatgaaacatttgaactcatcgtacaggacgttctcgtacaggacgtaactataaaccggtttatatttgttcaagatagatacaaatccgataactttttttacgaattctacgggatccactttaaaagtgtcataccgggttctttttatttttttaaacagatcaatggtgtgatgttgattaggtcttttacgaatttgatatagaatagcgtttacatattctccataatggtcaatcgccatttgttcgtatgtcataaattctttaattatatgacactgtgtattatttagttcatccttgttcattgttaggaatctatccaaaatggcaattatactagaactataggtgcgttgtatacacatattgatgtgtctgtttatacaatccatgatatttggatccatgctactaccttcgggtaaaattgtagcatcatataccatttctagtactttaggttcattattatccattgcagaggacgtcatgatcgaatcataaaaaaatatattatttttatgttattttgttaaaaataatcatcgaatacttcgtaagatactccttcatgaacataatcagttacaaaacgtttatatgaagtaaagtatctacgatttttacaaaagtccggatgcataagtacaaagtacgcgataaacggaataataatagatttatctagtctatctttttctatagctttcatagttagatacatggtctcagaagtaggattatgtaacatcagcttcgataaaatgactgggttatttagtcttacacattcgctcatacatgtatgaccgttaactacagagtctacactaaaatgattgaacaatagatagtctaccattgtttcgtattcagatagtacagcgtagtacatggcatcttcacaaattatatcattgtctaatagatatttgacgcatcttatggatcccacttcaacagccatcttaaaatcatattgctttcctttatcattaataatttctagaacatcatctctatcataaaagatacaaatattaactgtttgatccgtaataacattgctagtcaatagcaatttgttaataagatgcgctgggctcaatgtcttaataagaagtgtaagaggactatctccgaatttgttttgtttattaacatccgttgatggaagtaaaagatctataatgtctacattcttgactgttttagagcatacaatatggagaggtgtatttccatcatgatctggttttgagggactaattcctagtttcatcatccatgagattgtagaagcttttggattgtctgacataagatgtctatgaatatgatttttgccaaatttatccactatcctggcttcgaatccgatggacattatttttttaaacactctttctgaaggatctgtacacgccaacaacggaccacatccttcttcatcaaccgagttgttaatcttggctccatactgtaccaataaatttattctctctatgacttcatcatctgttcccgagagataatatagaggtgttttatgctgtttatcacacgcgtttggatctgcgccgtgcgtcagcagcatcgcgactattctattattattaattttagaagctatatgcaatggataatttccatcatcatccgtctcatttggagagtatcctctatgaagaagttcttcgacaaatcgttcatctagtcctttaattccacaatacgcatgtagaatgtgataattatttccagaaggttcgatagcttgtagcatattcctaaatacatctaaatttttactattatatttggcataaagagatagataatactcggccgacataatgttgtccattgtagtataaaaattaatatttctatttctatttctgtatatttgcaacaatttactctctataacaaatatcataacttagtttttttatgtcaagaaggcactggtttagttcatctataaatgtcacgccataactaccacgcatgccatactcagaattatgataaagatatttatccttggggtgtaggtaatggggattaatctttgttggatcagtctctaagttaacacatgtcacacatgatccatttatagttatatcacacgatgatgatttatgaattgattccggaagatcgctatcgtattttgtggttccacaattcatttccatacatgttattgtcacactaatattatgatgaactttatctagccgctgagtggtaaacaacagaacagatagtttattatctttaccaacaccctcagccgctgccacaaatctctgatccgtatccatgatggtcatgtttatttctagtccgtatccagtcaacactatgttagcatttctgtcgatatagctttcactcatatgacactcaccaataatagtagaattaatgtcgtaatttacaccaatagtgagttcggcggcaaagtaccaataccggtaatcttgtcgaggaggacatatagtattcttgtattctaccgaatacccgagagatgcgatacaaaagagcaagactaatttgtaaaccatcttactcaaaatatgtaacaatagtacgatgcaatgagtaagacaataggaaatctatcttatatacacataattattctatcaattttaccaattagttagtgtaatgttaacaaaaatgtgggagaatctaattagtttttctttacacaattgacgtacatgagtctgagttccttgtttttgctaattatttcatccaatttattattcttgacgatatcgagatcttttgtataggagtcaaacttgtattcaacatgcttttctataatcattttagctatttcggcatcatccaatagtacattttccagattagcagaatagatattaatgtcgtatttgaacagagcctgtaacatctcaatgtctttattatctatagccaatttaatgtccggaatgaagagaagggaattattggtgtttgtcgacgtcatatagtcgagcaagagaatcatcatatccacgtgtccattttttatagtgatgtgaatacaactaaggagaatagccagatcaaaagtagatggtatctctgaaagaaagtaggaaacaatacttacatcattaagcatgacggcatgataaaatgaagttttccatccagttttcccatagaacatcagtctccaatttttcttaacaaacagttttaccgtttgcatgttaccactatcaaccgcataatacaatgcggtgtttcccttgtcatcaaattgtgaatcatccagtccactgaatagcaaaatctttactattttggtatcttccaatgtggctgcctgatgtaatggaaattcattctctagaagatttttcaatgctccagcgttcaacaacgtacatactagacgcacgttattatcagctattgcataatacaaggcactatgtccatggacatccgccttaaatgtatctttactagagagaaagcttttcagctgcttagacttccaagtattaattcgtgacagatccatgtctgaaacgagacgctaattagtgtatattttttcattttttataattttgtcatattgcaccagaattaataatatctttaatagatctgattagtagatacatggctatcgcaaaacaacatatacacatttaataaaaataatatttattaagaaaattcagatttcacgtacccatcaatataaataaaataatgattccttacaccgtacccatattaaggagattccaccttacccataaacaatataaatccagtaatatcatgtctgatgatgaacacaaatggtgtattaaattccagtttttcaggagatgatctcgccgtagctaccataatagtagatgcctctgctacagttccttgttcgtcgacatctatctttgcattctgaaacattttataaatatataatgggtccctagtcatatgtttaaacgacgcattatctggattaaacatactaggagccatcatttcggctatcgacttaatatccctcttattttcgatagaaaatttagggagtttaagattgtacactttattccctaattgagacgaccaatagtctaattttgcagccgtgatagaatctgtgaaatgggtcatattatcacctattgccaggtacatactaatattagcatccttatacggaaggcgtaccatgtcatattctttgtcatcgattgtgattgtatttccttgcaatttagtaactacgttcatcatgggaaccgttttcgtaccgtacttattagtaaaactagcattgcgtgttttagtgatatcaaacggatattgccatatacctttaaaatatatagtattaatgattgcccatagagtattattgtcgagcatattagaatctactacattagacataccggatctacgttctactatagaattaattttattaaccgcatctcgtctaaagtttaatctatataggccgaatctatgatattgttgataatacgacggtttaatgcacacagtattatctacgaaactttgataagttagatcagtgtacgtatatttagatgttttcagcttagctaatcctgatattaattctgtaaatgctggacccagatctctttttctcaaatccatagtcttcaataattctattctagtattacctgatgcaggcaatagcgacataaacatagaaaacgaataaccaaacggtgagaagacaatattatcatcttgaatatttttatacgctactataccggcattggtaaatccttgtagacgataggcggacgctgaacacgctaacgatagtatcaataacgcaatcatgattttatggtattaataattaaccttatttttatgttcggtataaaaaaattattgatgtctacacatccttttgtaattgacatctatatatccttttgtataatcaactctaatcactttaacttttacagttttccctaccagtttatccctatattcaacatatctatccatatgcatcttaacactctctgccaagatagcttcagagtgaggatagtcaaaaagataaatatatagagcataatcattctcgtatactctgccctttattacatcacccgcattgggcaacgaataacaaaatgcaagcatcttgttaacgggctcgtaaattgggataaaaattatgtttttattgtcttatatctattttattcaagagaatattcaggaatttctttttccggttgtatctcgtcgcagtatatatcatttgtacattgtttcatattttttaatagtttacaccttttagtaggactagtatcgtacaattcatagctgtattttgaattccaatcacgcataaaaatatcttccaattgttgacgaagacctaatccatcatccggtgtaatattaatagatgctccacatgtatccgtaaagtaatttcctgtccaatttgaggtacctatataggccgttttatcggttaccatatatttggcatggtttaccctagaatacggaatgggaggatcagcatctggtacaataaatagctttacttctatatttatgtttttagattttagcatagcgatagatcttaaaaagtttctcatgataaacgaagatcgttgccagcaactaatcaatagcttaacggatacttgtctgtctatagcggatcttcttaattcatcttctatataaggccaaaacaaaattttacccgccttcgaataaataatagggataaagttcataacagatacataaacgaatttactcgcatttctaatacatgacaataaagcggttaaatcattggttctttccatagtacatagttgttgcggtgcagaagcaataaatacagagtgtggaacgccgcttacgttaatactaagaggatgatctgtattataatacgacggataaaagtttttccaattatatggtagattgttaactccaagataccagtatacctcaaaaatttgagtgagatccgctgccaagttcctattattgaagatcgcaatacccaattccttgacctgagttagtgatctccaatccatgttagcgcttcctaaataaatatgtgtattatcagatatccaaaattttgtatgaagaactcctcctaggatatttgtaatatctatgtatcgtacttcaactccggccatttgtagtctttcaacatcctttaatggtttgttagatttattaacggctactctaactcgtactcctcttttgggtaattgtacaatctcgtttaatattatcgtgccgaaattcgtacccacttcatccgataaactccaataaaaagatgatatatctagtgtttttgtggtattggatagaatttccctccacatgttaaatgtagacaaatatactttatcaaattgcatacctataggaatagtttctgtaatcactgcgattgtattatccggattcattttatttgttaaaagaataatcctatatcacttcactctattaaaaatccaagtttctatttctttcatgactgattttttaacttcatccgtttccttatgaagatgatgtttggcaccttcataaatttttatttctctattacaatttgcatgttgcatgaaataatatgcacctaaaacatcgctaatcttattgtttgttccctggagtatgagagtcggggggtgttaatcttggaaattatttttctaaccttgttggtagccttcaagacctgactagcaaatccagccttaattttttcatgattgactaatgggtcgtattggtatttataaactttatccatatctctagatactgattctggacatagctttccgactggcgcatttggtgtgatggttcccataagtttggcagctagcagattcagtcttgaaacagcatctgcattaactagaggagacattagaatcattgctgtaaacaagtttggattatcgtaagaggctagctcccatggaatgacccaataagtagatttaatagttaccacgtgctgtaccaaagtcatcaatcatcattttttcaccattacttcttccatgtccaatatgatcatgtgagaatactaaaattcctaacgatgatatgttttcagctagttcgtcataacgtccagaatgtttaccagctccatgacttatgaatactaatgccttaggatatgtaataggtttccaatatttacaatatatgtaatcattgtccagattgaacatacagtttgcactcatgattcacgttatataactatcaatattaacagttcgtttgatgatcatattatttttatgttttattgataattgtaaaaacatacaattaaatcaatatagaggaaggagacggctactgtcttttgtaagatagtcatggcgactaaattagattatgaggatgctgttttttactttgtggatgatgataaaatatgtagtcgcgactccatcatcgatctaatagatgaatatattacgtggagaaatcatgttatagtgtttaacaaagatattaccagttgtggaagactgtacaaggaattgatgaagttcgatgatgtcgctatacggtactatggtattgataaaattaatgagattgtcgaagctatgagcgaaggagaccactacatcaattttacaaaagtccatgatcaggaaagtttattcgctaccataggaatatgtgctaaaatcactgaacattggggatacaaaaagatttcagaatctagattccaatcattgggaaacattacagatttgatgaccgacgataatataaacatcttgatactttttctagaaaaaaaattgaattgatgatataggggtcttcataacgcataattattacgttagcattctatatccgtgttaaaaaaaattatcctatcatgtatttgagagttttatatgtagcaaacatgatagctgtgatgccaataagctttagatattcacgcgtgctagtgttagggatggtattatctggtggtgaaatgtccgttatataatctacaaaacaatcatcgcatatagtatgcgatagtagagtaaacatttttatagtttttactggattcatacatcgtctacccaattcggttataaatgaaattgtcgccaatcttacacccaaccccttgttatccattagcatagtattaacttcgttatttatgtcataaactgtaaatgattttgtagatgccatatcatacatgatattcatgtccctattataatcattactaactttatcacaatatatgttgataatatctatatatgatctagtctttgtgggcaactgtctatacaagtcgtctaaacgttgtttactcatatagtatcgaacagccatcattacatggtcccgttccgttgatagataatcgagtatgttagtggacttgtcaaatctatataccatattttctggaagtggatatacatagtcgtgatcaacattattgctagcctcatcttctatatcctgtactataccattatctatatcatctacataatctatgatattattacacataaacatcgacaacatactattgtttattatctaagtcctgttgatccaaacccttgatctcctctatttgtactatctagagattgtacttcttccagttctggataatatatacgttgatagattagctgagctattctatctccagtatttacattaaacgtacattttccattattaataagaatgactcctatgtttcccctataatcttcgtctattacaccacctcctatatcaatgccttttagtgacagaccagacctaggagctattctaccatagcagaacttaggcatggacatactaatatctgtcttaattaactgtctttctcctggagggatagtataatcgtaagcgctatacaaatcatatccggcagcacccggcgattgcctagtaggagatttagctctgttagtttccttaacaaatctaactggtgagttaatattcatgttgaacataaaactaatattttatttcaaaattatttaccatcccatatattccatgaataagtgtgatgattgtacacttctatagtatctatatacgatccacgataaaatcctcctatcaatagcagtttattatccactatgatcaattctggattatccctcggataaataggatcatctatcagagtccatgtattgctggattcacaataaaattccgcatttctaccaaccaagaataaccttctaccgaacactaacgcgcatgatttataatgaggataataagtggatggtccaaactgccactgatcatgattgggtagcaaatattctgtagttgtatcagtttcagaatgtcctcccattacgtatataacattgtttatggatgccactgctggattacatctaggtttcagaagactcggcatattaacccaagcagcatccccgtggaaccaacgctcaacagatgtgggatttggtagacctcctactacgtataatttattgttagcgggtatcccgctagcatacagtctggggctattcatcggaggaattggaatccaattgtttgatatataatttacagctatagcattgttatgtatttcattgttcatccatccaccgatgagatatactacttctccaacatgagtacttgtacacatatggaatatatctataatttgatccatgttcataggatactctatgaatggatacttgtatgatttgcgtggttgtttatcacaatgaaatattttggtacagtctagtatccattttacattatttatacctctgggagaaagataatttgacctgattacatttttgataaggagtagcagatttcctaatttatttcttcgcctcatataccacttaatgacaaaatcaactacataatcctcatctggaacatttagttcatcgctttctagaataagtttcatagatagataatcaaaattgtctatgatgtcatcttccagttccaaaaagtgtttggcaataaagtttttagtatgacataagagattggatagtccgtattctatacccatcatgtaacactcgacacaatattcctttctaaaatctcgtaagataaagtttatacaagtgtagatgataaattctacagaggttaatatagaagcacgtaataaattgacgacgttatgactatctatatatacctttccagtatatgagtaaataactatagaagttaaactgtgaatgtcaaggtctagacaaacccttgtaactggatctttatttttcgtgtatttttgacgtaaatgtgtgcgaaagtaaggagataactttttcaatatcgtagaattgactattatattgcctcctatggcatcaataattgttttgaatttcttagtcatagacaatgctaatatattcttacagtacacagtattgacaaatatcggcatttatgtttctttaaaagtcaacatctagagaaaaatgattatctttttgagacataactcccattttttggtattcacccacacgtttttcgaaaaaattagtttttccttccaatgatatattttccatgaaatcaaacggattggtaacattataaatttttttaaatcccaattcagaaatcaatctatccgcgacgaattctatatatgttttcatcatttcacaattcattcctataagtttaactggaagagccgcagtaagaaattcttgttcaatggatactgcatctgttataatagatctaacggtttcttcactcggtggatgcaataaatgtttaaacatcaaacatgcgaaatcgcagtgcagaccctcgtctctactaattagttcgttggaaaacgtgagtccgggcattaggccacgctttttaagccaaaatatggaagcgaatgatccagaaaagaaaattccttctactgcagcaaaggcaataagtctctctccataaccggcgctgtcatgtatccacttttgagcccaatcggccttcttttttacacaaggcatcgtttctatggcattaaagagatagtttttttcattactatctttaacataagtatcgatcaaaagactatacatttccgaatgaatgttttcaatggccatctgaaatccgtagaaacatctagcctcggtaatctgtacttctgtacaaaatcgttccgccaaattttcattcactattccgtcactggctgcaaaaaacgccaatacatgttttataaaatatttttcgtctggtgttagtttattccaatcattgatatctttagatatatctacttcttccactgtccaaaatgatgcctctgcctttttatacatgttccagatgtcatgatattggattgggaaaataacaaatctatttggatttggtgcaaggatgggttccataactaaattaacaataacaataaattttttttcagttatctatatgcctgtacttggattttttgtacatcgatatcgccgcaatcactacaataattacaagtattattgatagcattgttattagtactatcataattaaattatctacattcatgggtgctgaataatcgttattatcatcattatcattttgtaattgtgacatcatactagataaatcgtttgcgagattgttgtgggaagcgggcatggaggatgcattatcattattatttaacgccttccatttggattcacaaatgttacgcacattcaacattttatggaaactataattttgtgaaaacaaataacaagaaaactcgtcatcgttcaaatttttaacgatagtaaaccgattaaacgtcgagctaatttctaacgctagcgactctgttggatatgggtttccagatatatatcttttcagttcccctacgtatctataatcatctgtaggaaatggaagatatttccatttatctactgttcctaatatcatatgtggtggtgtagtagaaccattaagcgcgaaagatgttatttcgcatcgtattttaacttcgcaataatttctggttagataacgcactctaccagtcaagtcaatgatattagcctttacagatatattcatagtagtcgtaacgatgactccatcttttagatgcgatactcctttgtatgtaccagaatcttcgtacctcaaactcgatatatttaaacaagttaatgagatattaacgcgttttatgaatgatgatatataaccagaagttttatcctcggtggctagcgctataaccttatcattataataccaactagtgtgattaatatgtgacacgtcagtgtgggtacaaatatgtacattatcgtctacgtcgtattcgatacatccgcatacagccaacaaatataaaatgacaaatactctaacgccgttcgtacccatcttgatgcggtttaataaatgttttgatttcaatttattgtaaaaaaagattcggttttatactgttcgatattctcattgcttatattttcatctatcatctccacacagtcaaatccgtggttagcatgcacctcatcaaccggtaaaagactatcggactcttctatcattataactctagaatatttaatttggtcattattaatcaagtcaattatcttatttttaacaaacgtgagtattttactcattttttataaaaacttttagaaatatacagactctatcgtgtgtctatatcttctttttatatccaatgtatttatgtctgatttttcttcatttatcatatataatggtccaaattctacacgtgcttcggattcatccagatcattaaggttcttataattgtaacatccttctcttccctcttctacatcttccttcttattcttattcttagcgtcacagaatctaccacagcaggatcccatgacgagcgtcatattaaactaatccattttcaattataatatatgattagtaatgaccattaaaataaaaaatattcttcataaccggcaagaaagtgaaaagttcacattgaaactatgtcagtagtatacatcatgaaatgatgatatatatatactctattttggtggaggattatatgatataattcgtggataatcatttttaagacacatttctttattcgtaaatcttttcacgttaaatgagtgtccatattttgcaatttcttcatatgatggcggtgtacgtggacgaggctgctcctgttcttgttgtggtcgccgactgtcgtgtctgcgtttagatccctccattatcgcgattgcgtagatggagtactattttataccttgtaattaaatttttttattaattaaacgtataaaaacgttccgtatctgtatttaagagccagatttcgtctaatagaacaaatagctacagtaaaaataactagaataattgctacacccactagaaaccacggatcgtaatacggcaatcggttttcgataataggtggaacgtatattttatttaaggacttaacaattgtctgtaaaccacaatttgcttccgcggatcctgtattaactatctgtaaaagcatatgttgaccgggcggagccgaacattctccgatatctaatttctgtatatctataatattattaacctccgcatacgcattacagttcttttctagcttggataccgcactaggtacatcgtctagatctattcctatttcctcagcgatagctcttctatccttttccggaagcaatgaaatcacttcaataaatgattcaaccatgagtgtgaaactaagtcgagaattactcatgcatttgttagttattcggagcgcgcaatttttaaactgtcctataacctctcctatatgaatagcacaagtgacattagtagggatagaatgttgagctaatttttgtaaataactatctataaaaagattatacaaagttttaaactctttagtttccgccatttatccagtctgagaaaatgtctctcataataaatttttccaagaaactaattgggtgaagaatggaaacctttaatctatatttatcacagtctgttttggtacacatgatgaattcttccaatgccgtactaaattcgatatctttttcgatttctggatatgtttttaataaagtatgaacaaagaaatggaaatcgtaataccagttatgtttaactttgaaattgttttttattttcttgttaatgattccagccacttgggaaaagtcaaagtcgtttaatgccgatttaatacgttcattaaaaacaaactttttatcctttagatgaattattattggttcattggaatcaaaaagtaagatattatcgggtttaagatctgcgtgtaaaaagttgtcgcaacagggtagttcgtagattttaatgtataacagagccatctgtaaaaagataaactttatgtattgtaccaaagatttaaatcctaatttgatagctaactcggtatctactttatctgccgaatacagtgctaggggaaaaattataatgtttcctctttcatattcgtagttagttctcttttcatgttcgaaaaagtgaaacatgcggttaaaatagtttataacattaatattactgttaataactgccggataaaagtgggatagtaatttcacgaatttgatactgtcctttctctcgttaaacgcctttaaaaaaactttagaagaatatctcaatgagagttcctgaccatccatagtttgtatcaataatagcaacatatgaagaacacgtttatacagagtatgtaaaaatgttaatttatagtttaatcccatggcccacgcacacacgattaattttttttcatctccctttagattgttgtatagaaatttgggtactgtgaactccgccgtagtttccatgggactatataattttgtggcctcgaatacaaattttactacatagttatctatcttaaagactataccatatcctcctgtagatatgtgataaaaatcgtcgtttataggataaaatcgtttatccttttgttggaaaaaggatgaattaatgtaatcattctcttctatctttagtagtgtttccttattaaaattcttaaaataatttaacaatctaactgacggagcccaattttggtgtaaatctaattgggacattatattgttaaaatacaaacagtctcctaatataacagtatctgataatctatggggagacatccattgatattcaggggatgaatcattggcaacacccatttattgtacaaaaagccccaatttacaaacgaaagtccaggtttgatagagacaaacaattaactattttgtctctgtttttaacacctccacagtttttaatttctttagtaatgaaattattcacaatatcagtatcttctttatctaccagagattttactaacttgataaccttggctgtctcattcaatagggtagtaatatttgtatgtgtgatattgatatctttttgaattgtttcttttagaagtgattctttgatggtgccagcatacgaattacaataatgcagaaactcggttaacatgcaggaattatagtaagccaattccaattgttgcctgtgttgtattagagtgtcaatatgagcaatggtgtccttgcgtttctctgatagaatgcgagcagcgattttggcgttatcatttgacgatatttctggaatgacgaatcctgtttctactaactttttggtaggacaaagtgaaacaatcaagaagatagcttctcctcctatttgtggaagaaattgaactcctctagatgatctactgacgatagtatctccttgacagatattggaccgaattacagaagtacctggaatgtaaagccctgaaaccccctcattttttaagcagattgttgccgtaaatcctgcactatgcccaagatagagagctcctttggtgaatccatctctatgtttcagtttaaccaagaaacagtcagctggtctaaaatttccatctctatctaatacagcatctaacttgatgtcaggaactatgaccggtttaatgttatatgtaacattgagtaaatccttaagttcataatcatcactgtcatcagttatgtacgatccaaacaatgtttctaccggcatagtggatacgaagatgctatccatcagaatgtttccctgattagtattttctatatagctattcttctttaaacgattttccaaatcagtaactatgttcatttttttaggagtaggacgcctagccagtatggaagaggattttctagatcctctcttcaacatctttgatctcgatggaatgcaaaaccccatagtgaaacaaccaacgataaaaataatattgtttttcactttttataattttaccatctgactcatggattcattaatatctttataagagctactaacgtataattctttataactgaactgagatatatacaccggatctatggtttccataattgagtaaatgaatgctcggcaataactaatggcaaatgtatagaacaacgaaattatactagagttgttaaagttaatattttctatgagctgttccaataaattatttgttgtgactgcgttcaagtcataaatcatcttgatactatccagtaaaccgtttttaagttctggaatattatcatcccattgtaaagcccctaattcgactatcgaatatcctgctctgatagcagtttcaatatcgacggacgtcaatactgtaataaaggtggtagtattgtcatcatcgtgataaactacgggaatatggtcgttagtaggtacggtaactttacacaacgcgatatataactttccttttgtaccatttttaacgtagttgggacgtcctgcagggtattgttttgaagaaatgatatcgagaacagatttgatacgatatttgttggattcctgattattcactataatataatctagacagatagatgattcgataaatagagaaggtatatcgttggtaggataatacatccccattccagtattctcggatactctattgatgacactagttaagaacatgtcttctattctagaaaacgaaaacatcctacatggactcattaaaacttctaacgctcctgattgtgtctcgaatgcctcgtacaaggatttcaaggatgccatagattctttgaccaacgatttagaattgcgtttagcatctgatttttttattaaatcgaatggtcggctctctggtttgctaccccaatgataacaatagtcttgtaaagataaaccgcaagaaaatttatacgcatccatccaaataaccctagcaccatcggatgatattaatgtattattatagattttccatccacaattattgggccagtatactgttagcaacggtatatcgaatagattactcatgtaacctactagaatgatagttcgtgtactagtcataatatctttaatccaatctaaaaaatttaaaattagattttttacactgttaaagttaacaaaagtattacccgggtacgtggatatcatatatggcattggtccattatcagtaatagctccataaactgatacggcgatggtttttatatgtgtttgatctaacgaggaagaaattcgcgcccacaattcatctctagatatgtatttaatatcaaacggtaacacatcaatttcgggacgcgtatatgtttctaaatttttaatccaaatataatgatgacctatatgccctattatcatactgtcaactatagtacacctagggaacttacgatacatctgtttcctataatcgttaaattttacaaatctataacatgctaaaccttttgacgacagccattcattaatttctgatatggaatctgtattctcgataccgtatcgttctaaagccagtgctatatctccctgttcgtgggaacgctttcgtataatatcgatcaacggataatctgaagtttttggagaataatatgactcatgatctatttcgtccataaacaatctagacataggaattggaggcgatgatcttaattttgtgcaatgagtcgtcaatcctataacttctaatcttgtaatattcatcatcgacataatactatctatgttatcatcgtatattagtataccatgaccttcttcatttcgtgccaaaatgatatacagtcttaaatagttacgcaatatctcaatagtttcataattgttagctgttttcatcaaggtttgtatcctgtttaacatgatggcgttctataacgtctctattttctatttttaattttttaaatttttaacgatttactgtggctagatacccaatctctctcaaatatttttttagcctcgcttacaagctgtttatctatactattaaaactgacgaatccgtgattttggtaatgggttccgtcgaaatttgccgaagtgatatgaacatattcgtcgtcgactatcaacaattttgtattattctgaatagtgaaaaccttcacagatagatcattttgaacacacaacgcatctagacttttggcggttgccatagaatatacgtcgttcttatcccaattaccaactagaagtctgatcttaactcctctattaatggctgcttctataatggagttgtaaatgtcgggccaatagtagctattaccgtcgacacgtgtagtgggaactatggccaaatgttcaatatctatactagtcttagctgacctgagtttatcaataactacatcggtatctagatctctagaatatcccaataggtgttccggagaatcagtaaagaacactccacctataggattcttaatatgatacgcagtgctaactggcaaacaacaagccgcagagcataaattcaaccatgaattttttgcgctattaaaggctttaaaagtatcaaatcttctacgaagatctgtggccagcgggggataatcagaatatacacctaacgttttaatcgtatgtatagatcctccagtaaatgacgcgtttcctacataacatctttcatcatctgacacccaaaaacaaccgagtagtagtcccacattattttttttatctatattaacggttataaaatttatatccgggcagtgactttgtagctctcccagatttcttttccctcgttcatctagcaaaactattattttaatccctttttcagatgcctcttttagtttatcaaaaataagcgctcccctagtcgtactcagaggattacaacaaaaagatgctatgtatatatatttcttagctagagtgataatttcgttaaaacattcaaatgttgttaaatgatcggatctaaaatccatattttctggtagtgtttctaccagcctacattttgctcccgcaggtaccgatgcaaatggccacatttagttaacataaaaacttatacatcctgttctatcaacgattctagaatatcatcggctatatcgctaaaattttcatcaaagtcgacatcacaacctaactcagtcaatatattaagaagttccatgatgtcatcttcgtctatttctatatccgtatccattgtagattgttgaccgattatcgagtttaaatcattactaatactcaatccttcagaatacaatctgtgtttcattgtaaatttataggcggtgtatttaagttggtagattttcaattatgtattaatatagcaacagtagttcttgctcctccttgattctagcatcctcttcattattttcttctacgtacataaacatgtccaatacgttagacaacacaccgacgatggcggccgcagatctcgagttatgatctacttccttaccgtgcaataaattagaatatattttctacttttacgagaaattaattattgtatttattatttatgggtgaaaaacttactataaaaagcgggtgggtttggaattagtgaaagcttaaaaattgaaattttattttttttttttggaatataaataagctcgaagtcgacagatctaggcctggtaccaggaggaggaattcagcttaaagatgacttcgaaagtttatgatccagaacaaaggaaacggatgataactggtccgcagtggtgggccagatgtaaacaaatgaatgttcttgattcatttattaattattatgattcagaaaaacatgcagaaaatgctgttatttttttacatggtaacgcggcctcttcttatttatggcgacatgttgtgccacatattgagccagtagcgcggtgtattataccagatcttattggtatgggcaaatcaggcaaatctggtaatggttcttataggttacttgatcattacaaatatcttactgcatggtttgaacttcttaatttaccaaagaagatcatttttgtcggccatgattggggtgcttgtttggcatttcattatagctatgagcatcaagataagatcaaagcaatagttcacgctgaaagtgtagtagatgtgattgaatcatgggatgaatggcctgatattgaagaagatattgcgttgatcaaatctgaagaaggagaaaaaatggttttggagaataacttcttcgtggaaaccatgttgccatcaaaaatcatgagaaagttagaaccagaagaatttgcagcatatcttgaaccattcaaagagaaaggtgaagttcgtcgtccaacattatcatggcctcgtgaaatcccgttagtaaaaggtggtaaacctgacgttgtacaaattgttaggaattataatgcttatctacgtgcaagtgatgatttaccaaaaatgtttattgaatcggatccaggattcttttccaatgctattgttgaaggcgccaagaagtttcctaatactgaatttgtcaaagtaaaaggtcttcatttttcgcaagaagatgcacctgatgaaatgggaaaatatatcaaatcgttcgttgagcgagttctcaaaaatgaacaagcggccgccgccaccatgagcaagggcgaggaactgttcactggcgtggtcccaattctcgtggaactggatggcgatgtgaatgggcacaaattttctgtcagcggagagggtgaaggtgatgccacatacggaaagctcaccctgaaattcatctgcaccactggaaagctccctgtgccatggccaacactggtcactaccttcacctatggcgtgcagtgcttttccagatacccagaccatatgaagcagcatgactttttcaagagcgccatgcccgagggctatgtgcaggagagaaccatctttttcaaagatgacgggaactacaagacccgcgctgaagtcaagttcgaaggtgacaccctggtgaatagaatcgagctgaagggcattgactttaaggaggatggaaacattctcggccacaagctggaatacaactataactcccacaatgtgtacatcatggccgacaagcaaaagaatggcatcaaggtcaacttcaagatcagacacaacattgaggatggatccgtgcagctggccgaccattatcaacagaacactccaatcggcgacggccctgtgctcctcccagacaaccattacctgtccacccagtctgccctgtctaaagatcccaacgaaaagagagaccacatggtcctgctggagtttgtgaccgctgctgggatcacacatggcatggacgagctgtacaagtgagcggccgccctgctagcaagcttgctagcggccgctcgagatctgcggccgctacagacacgaatatgactaaaccgatgaccatttaaaaacccctctctagctttcacttaaactgtatcgatcattcttttagcacatgtataatataaaaacattattctatttcgaatttaggcttccaaaaatttttcatccgtaaaccgataataatatatatagacttgttaatagtcggaataaatagattaatgcttaaactatcatcatctccacgattagagatacaatatttacattctttttgctgtttcgaaactttatcaatacacgttaatacaaacccaggaaggagatattgaaactgaggctgttgaaaatgaaacggtgaatacaataattcagataatgtaaaatcatgattccgtattctgatgatattagaactgctaatggatgtcgatggtatgtatctaggagtatctattttaacaaagcatcgatttgctaatatacaattatccttttgattaattgttattttattcatattcttaaaaggtttcatatttatcaattcttctacattaaaaatttccatttttaatttatgtagccccgcaatactcctcattacgtttcattttttgtctataatatccattttgttcatctcggtacatagattatccaattgagaagcgcatttagtagttttgtacattttaagtttattgacgaatcgtcgaaaactagttatagttaacattttattatttgataccctgatattaatacccctgccgttactattatttataactgatgtaatccacgtaacattggaattaactatcgatagtaatgcatcgacgcttccaaaattgtctattataaactcaccgataatttttttattgcatgttttcatattcattaggattatcaaatctttaatcttattacgattgtatgcgttgatattacaagacgtcattctaaaagacggaggatctccatcaaatgccagacaatcacgtacaaagtacatggaaataggttttgttctattgcgcatcatagatttatatagaacacccgtagaaatactaatttgttttactctataaaatactaatgcatctatttcatcgttttgtataacgtctttccaagtgtcaaattccaaatttttttcattgatagtaccaaattcttctatctctttaactacttgcatagataggtaattacagtgatgcctacatgccgttttttgaaactgaatagatgcgtctagaagcgatgctacgctagtcacaatcaccactttcatatttagaatatatatatgtaaaaatatagtagaatttcattttgtttttttctatgctataaatgaattctcattttgcatctgctcatactccgttttatattaataccaaagaaggaagatatctggttctaaaagccgttaaagtatgcgatgttagaactgtagaatgcgaaggaagtaaagcttcctgcgtactcaaagtagataaaccctcatcgcccgcgtgtgagagaagaccttcgtccccgtccagatgcgagagaatgaataaccctggaaaacaagttccgtttatgaggacggacatgctacaaaatatgttcgcggctaatcgcgataatgtagcttctagacttttgtcctaaaatactattatatccttttcgatattaataaatccgtgtcgtccaggttttttatctctttcagtatgtgaatagataggtattttatctctattcatcatcgaatttaagagatccgataaacattgtttgtattctccagatgtcagcatctgatacaacaatatatgtgcacataaacctctggcacttatttcatgtaccttccccttatcactaaggagaatagtatttgagaaatatgtatacatgatattatcatgaattagatatacagaatttgtaacactctcgaaatcacacgatgtgtcggcgttaagatctaatatatcactcgataacacattttcatctagatacactagacattttttaaagctaaaatagtctttagtagtaacagtaactatgcgattattttcatcgatgatacatttcatcggcatattattacgcttaccatcaaagactataccatgtgtatatctaacgtattctagcatggttgccatacgcgcattaaacttttcaggatctttggatagatcttccaatctatctatttgagaaaacatttttatcatgttcaatagttgaaacgtcggatccactatatagatattatctataaagattttaggaactacgttcatggtatcctggcgaatattaaaactatcaatgatatgattatcgttttcatcttttatcaccatatagtttctaagatatgggattttacttaatataatattatttcccgtgataaattttattagaaaggccaaatctataagaaaagtcctagaattagtctgaagaatatctatatcgccgtatagtatatttggattaattagatatagagaatatgatccgtaacatatacaacttttattatggcgtctaagatattcttccatcaacttattaacatttttgactagggaagatacattatgacgtcccattacttttgccttgtctattactgcgacgttcatagaatttagcatatctcttgccaattcttccattgatgttacattataagaaattttagatgaaattacatttggagctttaatagtaagaactcctaatatgtccgtgtatgtggtcactaatacagattgtagttctataatcgtaaataatttacctatattatatgtttgagtctgtttagaaaagtagctaagtatacgatcttttatttctgatgcagatgtattaacatcggaaaaaaatctttttttattcttttttactaaagatacaaatatgtctttgttaaaaacagttattttctgaatatttctagcttgtaattttaacatatgatattcgttcacactaggtactctgcctaaataggtttctataatctttaatgtaatattaggaaaagtattctgatcaggattcctattcattttgaggatttaaaactctgattattgtctaatatggtctctacgcaaactttttcacagagcgatagagtttttgataactcgtttttcttaagaaatataaaactactgtctccagagctcgctctatcttttattttatctaattcgatacaaactcctgatactggttcagaaagtaattcattaattttcagtcctttatagaagatatttaatatagataatacaaaatcttcagtttttgatatcgatctgattgatcctagaactagatatattaataacgtgctcattaggcagtttatggcagcttgataattagatatagtatattccagttcatatttattagataccgcattgcccagattttgatattctatgaattcctctgaaaataaatccaaaataactagacattctattttttgtggattagtgtactctcttccctctatcatgttcactactggtgtccacgatgataaatatctagagggaatataatatagtccataggatgccaatctagcaatgtcgaataactgtaattttattcttcgctcttcattatgaattgattcttgaggtataaacctaacacaaattatattattagacttttcgtatgtaatgtctttcatgttataagtttttaatcctggaatagaatctattttaatgaggcttttaaacgcagagttctccaacgagtcaaagcataatactctgttgtttttcttatatacgatgttacgattttcttctttgaatggaataggtttttgaattagtttataattacaacataatagataaggaagtgtgcaaatagtacgcggaaaaaacataatagctcccctgttttcatccatggttttaagtaaatgatcactggcttctttagtcaatggatattcgaacattaaccgtttcatcatcattggacagaatccatatttcttaatgtaaagagtgatcaaatcattgtgtttattgtaccatcttgttgtaaatgtgtattcggttatcggatctgctcctttttctattaaagtatcgatgtcaatctcgtctaagaattcaactatatcgacatatttcatttgtatacacataaccattactaacgtagaatgtataggaagagatgtaacgggaacagggtttgttgattcgcaaactattctaatacataattcttctgttaatacgtcttgcacgtaatctattatagatgccaagatatctatataattattttgtaagatgatgttaactatgtgatctatataagtagtgtaataattcatgtattttgatatatgttccaactctgtctttgtgatgtctagtttcgtaatatctatagcatcctcaaaaaatatattcgcatatattcccaagtcttcagttctatcttctaaaaaatcttcaacgtatggaatataataatctattttacctcttctgatatcattaatgatatagtttttgacactatcttctgtcaattgattcttattcactatatctaagaaacggatagcgtccctaggacgaactactgccattaatatctctattatagcttctggacataattcatctattataccagaattaatgggaactattccgtatctatctaacatagttttaagaaagtcagaatctaagacttgatgttcatatattggttcatacatgaaatgatctctattgatgatagtgactatttcattctctgaaaattggtaactcattctatatatgctttccttgttgatgaaggatagaatatactcaatagaatttgtaccaacaaactgttctcttatgaatcgtatatcatcatctgaaataatcatgtaaggcatacatttaacaattagagacttgtctcctgttatcaatatactattcttgtgataatttatgtgtgaggcaaatttgtccacgttctttaattttgttatagtagatatcaaatccaatggagctacagttcttggcttaaacagatatagtttttctggaacaaattctacaacattattataaaggactttgggtagataagtgggatgaaatcctattttaattaatgcgatagccttgtcctcgtgcagatatccaaacgcttttgtgatagtatggcattcattgtctagaaacgctctacgaatatctgtgacagatatcatctttagagaatatactagtcgcgttaatagtactacaatttgtattttttaatctatctcaataaaaaaattaatatgtatgattcaatgtataactaaactactaactgttattgataactagaatcagaatctaatgatgacgtaaccaagaagtttatctactgccaatttagctgcattatttttagcatctcgtttagattttccatcggccttatcgaatactcttccgtcgatgtctacacaggcataaaatgtaggagagttactaggcccaactgattcaatacgaaaagaccaatctctcctagtaatttggcagtactcattaataacggtgacagggttagcatctttccaatcaataatttttttagccggaataacatcatcaaaagacttatgatcctctctcattgatttttcgcgggatacatcatctattatgacgtcagccatagcatcagcatccggcttatccgcctccgttgtcataaaccaacgaggaggaatatcgtcggagctgtacaccatagcactacgttgaagatcgtacagagctttattaacttctcgcttctccatattaagttgtctagttagttgtgcagcagtagctccttcgattccaatgtttttaatagccgcacacacaatctctgcgtcagaacgctcgtcaatatagatcttagacatttttagagagaactaacgcaaccagcaataaaactgaacctactttatcatttttttattcatcatcctctggtggttcgtcgttcctatcaaatgtagctctgattaacccgtcatctataggtgatgctggttctggagattctggaggagatggattattatctggaagaatctctgttatttccttgttttcatgtatcgattgcgttgtaacattaagattgcgaaatgctctaaatttgggaggcttaaagtgttgtttgcaatctctacacgcgtgtctaactagtggaggttcgtcagctgctctagtttgaatcatcatcggcgtagtattcctacttttacagttaggacacggtgtattgtatttctcgtcgagaacgttaaaataatcgttgtaactcacatcctttattttatctatattgtattctactcctttcttaatgcattttataccgaataagagatagcgaaggaattctttttcggtgccgctagtacccttaatcatatcacatagtgttttatattccaaatttgtggcaatagacggtttatttctatacgatagtttgtttctggaatcctttgagtattctataccaatattattctttgattcgaatttagtttcttcgatattagattttgtattacctatattcttgatgtagtactttgatgatttttccatggcccattctattaagtcttccaagttggcatcatccacatattgtgatagtaattctcggatatcagtagcggctaccgccattgatgtttgttcattggatgagtaactactaatgtatacattttccatttataacacttatgtattaactttgttcatttatattttttcattattatgttgatattaacaaaagtgaatatatatatgttaataattgtattgtggttatacggctacaattttataatgagtgaaagtcagtgtccgatgatcaatgacgatagctttactctgaaaagaaagtatcaaatcgatagtgcggagtcaacaataaaaatggataagaagaggataaagtttcagaatagagccaaaatggtaaaagaaataaatcagacaataagagcagcacaaactcattacgagacattgaaactaggatacataaaatttaagagaatgattatgactactactctagaagatatagcaccatctattccaaataatcagaaaacttataaactattctcggacatttcagccatcggcaaagcatcacagaatccgagtaagatggtatatgctctgctgctttacatgtttcccaatttgtttggagatgatcatagattcattcgttatagaatgcatccaatgagtaaaatcaaacacaagatcttctctcctttcaaacttaatcttattagaatattagtggaagaaagattctataataatgaatgcagatctaataaatggagaataattggaacacaagttgataaaatgttgatagctgaatctgataaatatacaatagatgcaaggtataacctaaaacccatgtatagaatcaagggagaatctgaagaagataccctctttatcaaacagatggtagaacaatgtgtgacatcccaggaattggtggaaaaagtgttgaagatactgtttagagatttgttcaagagtggagaatacaaagcgtacagatacgatgatgatgtagaaaatggatttattggattggatacactaaaattaaacattgttcatgatatagttgaaccatgtatgcctgttcgtaggccagtggctaagatactgtgtaaagaaatggtaaataaatactttgagaatccgctacatattattggtaaaaatcttcaagagtgcattgactttgttagtgaataggcatttcatctttctccaatactaattcaaattgttaaattaataatggatagtataaatagttattagttataagatagtaaaaataattattagaataagagtgtagtatcatagataactctcttctataaaaatggattttattcgtagaaagtatcttatatacacagtagaaaataatatagattttttaaaggatgatacattaagtaaagtaaacaattttaccctcaatcatgtactagctctcaagtatctagttagcaattttcctcaacacgttattactaaggatgtattagctaataccaatttttttgttttcatacatatggtacgatgttgtaaagtgtacgaagcggttttacgacacgcatttgatgcacccacgttgtacgttaaagcattgactaagaattatttatcgtttagtaacgcaatacaatcgtacaaggaaaccgtgcataaactaacacaagatgaaaaatttttagaggttgccgaatacatggacgaattaggagaacttataggcgtaaattatgacttagttcttaatccattatttcacggaggggaacccatcaaagatatggaaatcatttttttaaaactgtttaagaaaacagacttcaaagttgttaaaaaattaagtgttataagattacttatttgggcatacctaagcaagaaagatacaggcatagagtttgcggataatgatagacaaaatatatacactctatttcaacaaactggtagaatcgtccatagcaatctaacagaaacgtttagagattatatctttcccggagataagactagctattgggtgtggttaaacgaaagtatagctaatgatgcggatatcgttcttaatagacacgccattaccatgtatgataaaattcttagttatatatactctgagataaaacaaggacgcgttaataaaaacatgcttaagttagtttatatctttgagcctgaaaaagatatcagagaacttctgctagaaatcatatatgatattcctggagatatcctatctattattgatgcaaaaaacgacgattggaaaaaatattttattagtttttataaagctaattttattaacggtaatacatttattagtgatagaacgtttaacgaggacttattcagagttgttgttcaaatagatcccgaatatttcgataatgaacgaattatgtctttattctctacgagtgctgcggacattaaacgatttgatgagttagatattaataacagttatatatctaatataatttatgaggtgaacgatatcacattagatacaatggatgatatgaagaagtgtcaaatctttaacgaggatacgtcgtattatgttaaggaatacaatacatacctgtttttgcacgagtcggatcccatggtcatagagaacggaatactaaagaaactgtcatctataaaatccaagagtagacggctgaacttgtttagcaaaaacattttaaaatattatttagacggacaattggctcgtctaggtcttgtgttagatgattataaaggagacttgttagttaaaatgataaaccatcttaagtctgtggaggatgtatccgcattcgttcgattttctacagataaaaaccctagtattcttccatcgctaatcaaaactattttagctagttataatatttccatcatcgtcttatttcaaaggtttttgagagataatctatatcatgtagaagaattcttggataaaagcatccatctaaccaagacggataagaaatatatacttcaattgataagacacggtagatcatagaacagaccaaatatattattaataatttgtatatacatagatataattatcacacatttttgataaatgggaactgctgcaacaattcagactcccaccaaattaatgaataaagaaaatgcagaaatgattttggaaaaaattgttgatcatatagttatgtatattagtgacgaatcaagtgattcagaaaataatcctgaatatattgattttcgtaacagatacgaagactatagatctctcattataaaaagtgatcacgagtttgtaaagctatgtaaaaatcatgcggagaaaagttctccagaaacgcaacaaatgattatcaaacacatatacgaacaatatcttattccagtatctgaagtactattaaaacctataatgtccatgggtgacataattacatataacggatgtaaagacaatgaatggatgctagaacaactctctaccctaaactttaacaatctccgcacatggaactcatgtagcataggcaatgtaacgcgtctgttttatacattttttagttatctgatgaaagataaactaaatatataagtataatcccattctaatactttaacctgatgtattagcatcttattagaatattaacctaactaaaagacataacataaaaactcattacatagttgataaaaagcggtaggatataaatattatggctgccaccgttccgcgttttgacgacgtgtacaaaaatgcacaaagaagaattctagatcaagaaacattttttagtagaggtctaagtagaccgttaatgaaaaacacatatctatttgataattacgcgtatggatggataccagaaactgcaatttggagtagtagatacgcaaacctagatgctagtgactattatcccatttcgttgggattacttaaaaagttcgagtttctcatgtctctatataaaggtcctattcccgtatatgaagaaaaagtaaatactgaattcatagccaatggatcgttctctggtagatacgtatcatatcttcgaaagttttctgcccttccaacaaacgagtttattagttttttgttactgacttccattccaatctataatatcttgttctggtttaaaaacacacagtttgatattactaaacacacattattcagatacgtctatacagataatgccaaacacctggcgttggctaggtatatgcatcaaacaggagactataagcctttgtttagtcgtctcaaagagaattatatatttaccggtcccgttccaataagtatcaaagatatagatcaccctaatcttagtagagcaagaagtccatccgattatgagacattagctaatattagtactatattgtactttaccaagtatgatccggtattaatgtttttattgttttacgtacctgggtattcaattactacaaaaattactccagccgtagaatatctaatggataaactgaatctaacaaagagcgacgtacaactgttgtaaattattttatgcttcgtaaaatgtaggttttgaaccaaacattctttcaaagaatgagatgcataaaactttattatccaatagattgactatttcggacgtcaatcgtttaaagtaaacttcgtaaaatattctttgatcactgccgagtttaaaacttctatcgataattgtctcatatgttttaatatttacaagttttttggtccatggtacattagccggacaaatatatgcaaaataatatcgttctccaagttctatagtttctggattatttttattatattcagtaactaaatacatattagggttatctgcggatttataatttgagtgatgcattctactcaacataaataattctagaggagacgatctactatcaaattcggatcgtaaatctgtttctaaagaacggagaatatctatacatacctgattagaattcatccgtccttcagacaacatctcagacagtctggttttgtacatcttaatcatattcttatgaaacttggaaacatctcttctagtttcactagtacctttattaattctctcaggtacagattttgaattcgacgatgctgagtatttcatcgttgtatatttcttcttcgattgcataatcagattcttatataccgcctcaaactctattttaaaattattaaacaatactctattattaatcagtcgttctaactctttcgctatttctatagacttatctacatcttgactgtctatctctgtaaacacggagtcggtatctccatacacgctacgaaaacgaaatctgtaatctataggcaacgatgttttcacaatcggattaatatctctatcgtccatataaaatggattacttaatggattggcaaaccgtaacataccgttagataactctgctccatttagtaccgattctagatacaagatcattctacgtcctatggatgtgcaactcttagccgaagcgtatgagtatagagcactatttctaaatcccatcagaccatatactgagttggctactatcttgtacgtatattgcatggaatcatagatggccttttcagttgaactggtagcctgttttagcatctttttatatctggctctctctgccaaaaatgttcttaatagtctaggaatggttccttctatcgatctatcgaaaattgctatttcagagatgaggttcggtagtctaggttcacaatgaaccgtaatatatctaggaggtggatatttctgaagcaatagctgattatttatttcttcttccaatctattggtactaacaacgacaccgactaatgtttccggagatagatttccaaagatacacacattaggatacagactgttataatcaaagattaatacattattactaaacattttttgttttggagcaaataccttaccgccttcataaggaaacttttgttttgtttctgatctaactaagatagttttagtttccaacaatagctttaacagtggacccttgatgactgtactcgctctatattcgaataccatggattgaggaagcacatatgttgacgcacccgcgtctgtttttgtttctactccataatactcccacaaatactgacacaaacaagcatcatgaatacagtatctagccatatctaaagctatgtttagattataatccttatacatctgagctaaatcaacgtcatcctttccgaaagataatttatatgtatcattaggtaaagtaggacataatagtacgactttaaatccattttcccaaatatctttacgaattactttacatataatatcctcatcaacagtcacataattacctgtggttaaaacctttgcaaatgcagcggctttgcctttcgcgtctgtagtatcgtcaccgatgaacgtcatttctctaactcctctatttaatactttacccatgcaactgaacgcgttcttggatatagaatccaatttgtacgaatccaatttttcaaatttttgaatgaatgaatatagatcgaaaaatatagttccattattgttattaacgtgaaacgtagtattggccatgccgcctactcccttatgactagactgatttctctcataaatacagagatgtacagcttcctttttgtccggagatctaaagataattttctctcctgttaataactctagacgattagtaatatatctcagatcaaagttatgtccgttaaaggtaacgacgtagtcgaacgttagttccaacaattgtttagctattcgtaacaaaactatttcagaacatagaactagttctcgttcgtaatccatttccattagtgactgtatcctcaaacatcctctatcgacggcttcttgtatttcctgttccgttaacatctcttcattaatgagcgtaaacaataatcgtttaccacttaaatcgatataacagtaacttgtatgcgagattgggttaataaatacagaaggaaacttcttatcgaagtgacactctatatctagaaataagtacgatcttgggatatcgaatctaggtatttttttagcgaaacagttacgtggatcgtcacaatgataacatccattgttaatctttgtcaaatattgctcgtccaacgagtaacatccgtctggagatatcccgttagaaatataaaaccaactaatattgagaaattcatccatggtggcattttgtatgctgcgtttctttggctcttctatcaaccacatatctgcgacggagcattttctatctttaatatctagattataacttattgtctcgtcaatgtctatagttctcatctttcccaacggcctcgcattaaatggaggaggagacaatgactgatatatttcgtccgtcactacgtaataaaagtaatgaggaaatcgtataaatacggtctcgccatttcgacatctggatttcagatataaaaatctgttttcaccgtgactttcaaaccaattaatgcaccgaacatccatttatagaatttagaaatatattttcatttaaatgaatcccaaacattggggaagagccgtatggaccattatttttatagtactttcgcaagcgggtttagacggcaacatagaagcgtgtaaacgaaaactatatactatagttagcactcttccatgtcctgcatgtagacggcacgcgactatcgctatagaggacaataatgtcatgtctagcgatgatctgaattatatttattattttttcatcagattatttaacaatttggcatctgatcccaaatacgcgatcgatgtgacaaaggttaaccctttataaacttaacccattataaaacttatgattagtcacaactgaaataaccgcgtgattattttttggtataattctacacggcatggtttctgtgactatgaattcaacccccgttacattagtgaaatctttaacaaacagcaagggttcgtcaaagacataaaactcattgtttacaatcgaaatagaccccctatcacacttaaaataaaaaatatccttatcctttaccaccaaataaaattctgattggtcaatgtgaatgtattcacttaacagttccacaaatttatttattaactccgaggcacatacatcgtcggtattttttatggcaaactttactcttccagcatccgtttctaaaaaaatattaacgagttccatttatatcatccaatattattgaaatgacgttgatggacagatgatacaaataagaaggtacggtacctttgtccaccatctcctccaattcatgctctattttgtcattaactttaatgtatgaaaacagtacgccacatgcttccatgacagtgtgtaacactttggatacaaaatgtttgacattagtataattgtccaagactgtcaatctataatagatagtagctataatatattctatgatggtattgaagaagatgacaaccttggcatattgatcatttaacacagacatggtatcaacagatagcttgaatgaaagagaatcagtaattggaataagcgtcttctcgatagagtgtccgtataccaacatgtctgatattttgatgtattccattaaattatttagttttttctttttattctcgttaaacagcatttctgtcaacggaccccaacatcgttgaccgattaagttttgattgatttttccgtgtaaggcgtatctagtcagatcgtatagcctatccaataatccatcgtctgtgtgtagatcacatcgtacactttttaattctctatagaagagcgacagacatctggagcaattacagacagcaatttctttattctctacagatgtaagatacttgaagacattcctatgatgatgcagaattttggataacacggtattgatggtatctgttaccataattcctttgatggctgatagtgtcagagcacaagatttccaatctttgacaatttttagcaccattatctttgttttgatatctatatcagacagcatggtgcgtctgacaacacagggattaagacggaaagatgaaatgattctctcaacatcttcaatagataccttgctattttttctggcattatctatatgtgcgagaatatcctctagagaatcagtatcctttttgatgatagtggatctcaatgacatgggacgtttaaaccttcttattctatcaccagattgcatggtgatttgtcttctttcttttatcataatgtaatctctaaattcatcggcaaattgtctatatctaaaatcataatatgagatgtttacctctacaaatatctgttcgtccaatgttagagtatttacatcagttttgtattccaaattaaacatggcaacggatttaattttatattcctctattaagtcctcgtcgataataacagaatgtagataatcatttaatccgtcgtacatggttggaagatgcttgttgacaaaatctttaattgtcttgatgaaggtgggactatatctaacatcttgattaataaaatttataacattgtccataggatactttgtaactagttttatacacatctcttcatcggtaagtttagacagaatatcgtgaacaggtggtatattatattcatcagatatacgaagaacaatgtccaaatctatattgtttaatatattatatagatgtagcgtagctcctacaggaatatctttaactaagtcaatgatttcatcaaccgttagatctattttaaagttaatcatataggcattgatttttaaaaggtatgtagccttgactacattctcattaattaaccattccaagtcattgtgtgtaagaagattatattctatcataagcttgactacatttggtcccgataccattaaagaattcttatgatataaggaaacagattttaggtactcatctactctacaagaattttggagagccttaacgatatcagtgacgtttattatttcaggaggaaagaatctaacattgagaatatcggaattaatagcttccagatacagtgattttggcaatagtccgtgtaatccataatccagtaacacgagctggtgcttgctagacaccttttcaatgtttaatttttttgaaataagctttgataaagccttcctcgcaaattccggatacatgaacatgtcggcgacatgattaagtattgttttttcattatttttatattttctcaacaagttctcaataccccaatagatgatagaatatcacccaatgcgtccatgttgtctatttccaacaggtcgctatatccaccaatagaagtttttccaaaaaagattctaggaacagttctaccaccagtaatttgttcaaaataatcccgcaattcattttcgggtttaaattctttaatatcgacaatttcatacgctcctcttttgaaactaaacttatttagaatatccagtgcatttctacaaaaaggacatgtatacttgacaaaaattgtcactttgttattggccaacctttgttgtacaaattcctcggccattttaatatttaagtgatataaaactatctcgacttatttaactctttagtcgagatatatggacgcagatagctatatgatagccaactacagaaggcaaacgctataaaaaacataattacgacgagcatatttataaatatttttattcagcattacttgatatagtaatattaggcacagtcaaacattcaaccactctcgatacattaactctctcattttctttaacaaattctgcaatatcttcgtaaaaagattcttgaaactttttagaatatctatcgactctagatgaaatagcgttcgtcaacatactatgttttgtatacataaaggcgcccattttaacagtttctagtgacaaaatgctagcgatcctaggatcctttagaatcacatagattgacgattcgtctctcttagtaactctagtaaaataatcatacaatctagtacgcgaaataatattatccttgacttgaggagatctaaacaatctagttttgagaacatcgataagttcatcgggaatgacatacatactatctttaatagaactcttttcatccagttgaatggattcgtccttaaccaactgattaatgagatcttctattttatcattttccagatgatatgtatgtccattaaagttaaattgtgtagcgcttctttttagtctagcagccaatactttaacatcactaatatcgatatacaaaggagatgatttatctatggcattaagaattcgtttttcgacatccgtcaaaaccaattcctttttgcctgtatcatccagttttccatcctttgtaaagaaattattttctactagactattaataagactgataaggattcctccataattgcacaatccaaactttttaacaaaactagactttacgagatctacaggaatgcgtacttcaggttttttagcttgtgattttttcttttgcggacattttctagtaaccaactcatctaccatttcattgattttagcagtgaaataagctttcaatgcacgggcactgatactattgaaaacgagttgatcttcaaattccgccatttaagttcaccaaacaacttttaaatacaaatatatcaatagtagtagaataagaactataaaaaaaataataattaaccaaccccaacaaccggtattattagttgatgtggtagttttctcatcacttagaacagatttaacaatttctataaagtctgtcaaatcatcttccggagaccccataaatacaccaaatatagcggcgtacaacttatccatttatacattgaatattggcttttctttatcgctatcttcatcatattcatcatcaatatcaacaagtcccagattacgagccagatcttcttctacattttcagtcattgatacacgttcactatctccagagagtccgataacgttagccaccacttctctatcaatgattagtttcttgagcgcgaaagtaatttttgtttccgttccggatctatagaagacgataggtgtgataattgccttggccaattgtctttctcttttactgagtgattctagttcaccttctatagatctgagaatggatgattctccagtcgaaacatattctaccatggatccgtttaatttgttgatgaagatggattcatccttaaatgttttctctgtaatagtttccaccgaaagactatgcaaagaatttggaatgcgttccttgtgcttaatgtttccatagacggcttctagaagttgatacaacataggactagccgcggtaacttttatttttagaaagtatccatcgcttctatcttgtttagatttatttttataaagtttagtctctccttccaacataataaaagtggaagtcatttgactagataaactatcagtaagttttatagagatagacgaacaattagcgtattgagaagcatttagtgtaacgtattcgatacattttgcattagatttactaatcgattttgcatactctataacacccgcacaagtctgtagagaatcgctagatgcagtaggtcttggtgaagtttcaactctcttcttgattaccttactcatgattaaacctaaataattgtactttgtaatataatgatatatattttcactttatctcatttgagaataaaaatgtttttgtttaaccactgcatgatgtacagatttcggaatcgcaaaccaccagtggttttattttatccttgtccaatgtgaattgaatgggagcggatgcgggtttcgtacgtagatagtacattcccgtttttagaccgagactccatccgtaaaaatgcatactcgttagtttggaataactcggatctgctatatggatattcatagattgactttgatcgatgaaggctcccctgtctgcagccatttttatgatcgtcttttgtggaatttcccaaatagttttataaactcgcttaatatcttctggaaggtttgtattctgaatggatccaccatctgccataatcctattcttgatctcatcattccataattttctctcggttaaaactctaaggagatgcggattaactacttgaaattctccagacaatactctccgagtgtaaatattactggtatacggttccaccgactcattatttcccaaaatttgagcagttgatgcagtcggcataggtgccaccaataaactatttctaagaccgtatgttctgattttatcttttagaggttcccaattccaaagatccgacggtacaacattccaaagatcatattgtagaataccgttactggcgtacgatcctacatatgtatcgtatggtccttccttctcagctagttcacaactcgcctctaatgcaccgtaataaatggtttcgaagatcttcttatttagatcttgtgcttccaggctatcaaatggataatttaagagaataaacgcgtccgctaatccttgaacaccaataccgataggtctatgtctcttattagagatttcagcttctggaataggataataattaatatctataattttattgagatttctgacaattactttgaccacatccttcagtttgagaaaatcaaatcgcccatctattacaaacatgttcaaggcaacagatgccagattacaaacggctacctcattagcatccgcatattgtattatctcagtgcaaagattactacacttgatagttcctaaattttgttgattactctttttgttacacgcatccttataaagaatgaatggagtaccagtttcaatctgagattctataatcgctttccagacgactcgagcctttattatagatttgtatctcctttctctttcgtatagtgtatacaatcgttcgaactcgtctccccaaacattgtccaatccaggacattcatccggacacatcaacgaccactctccgtcatccttcactcgtttcataaagagatcaggaatccaaagagctataaatagatctctggttctatgttcctcgtttcctgtattctttttaagatcgaggaacgccataatatcagaatgccacggttccaagtatatggccataactccaggccgtttgtttcctccctgatctatgtatctagcggtgttattataaactctcaacattggaataataccgtttgatataccattggtaccggagatatagcttccactggcacgaatattactaattgatagacctattccccctgccattttagagattaatgcgcatcgttttaacgtgtcatagataccctctatgctatcatcgatcatgttaagtagaaaacagctagacatttggtgacgactagttcccgcattaaataaggtaggagaagcgtgcgtaaaccatttttcagaaagtagattgtacgtctcaatagctgagtctatatcccattgatgaattcctactgcgacacgcattaacatgtgctgaggtctttcaacgatcttgttgtttattttcaacaagtaggatttttccaaagttttaaaaccaaaatagttgtatgaaaagtctcgttcgtaaataataaccgagttgagtttatccttatatttgttaactatatccatggtgatacttgaaataatcggagaatgtttcccatttttaggattaacatagttgaataaatcctccatcacttcactaaatagtttttttgtttccttgtgtagatttgatacggctattctggcggctagaatggcataatccggatgttgtgtagtacaagtggctgctatttcggctgccagagtgtccaattctaccgttgttactccattatatattccttgaataaccttcatagctattttaataggatctatatgatccgtgtttaagccataacataattttctaatacgagacgtgattttatcaaacatgacattttccttgtatccatttcgtttaatgacaaacatttttgttggtgtaataaaaaaattatttaacttttcattaatagggatttgacgtatgtagcgtacaaaatgattgttcctggtatatagataaagagtcctatatatttgaaaatcgttacggctcgattaaactttaatgattgcatagtgaatatatcattaggatttaactccttgactatcatggcggcgccagaaattaccatcaaaagcattaatacagttataccgatcgcagttagaacggttatagcatccaccatttatatctaaaaattagatcaaagaatatgtgacaaagtcctagttgtatactgagaattgacgaaacaatgtttcttacatatttttttcttattagtaaccgacttaatagtaggaactggaaaactagacttgattattctataagtatagatacccttccaaataatattctctttgataaaagttccagaaaatgtagaattttttaaaaagttatcttttgctattaccaagattgtgtttagacgcttattattaatatgagtgatgaaatccacaccgcctctagatatcgcctttatttccacattagatggtaaatccaatagtgaaactatctttttaggaatgtatggactcgcgtttagaggagtaaacgtcttaggcgtcggaaaggatgattcatcaaacgaataaacaatttcacaaatggatgttaatgtattagtaggaaattttttgacgctattggaattgaagattctaatggatgatgttctacctatttcatccgataacatgttaatttccgacaccaacggttttaatatttcgatgatatacggtagtctctctttcggacttatatagcttattccacaatacgagtcattatatactccaaaaaacaaaataactagtataaaatctgtatcgaatgggaaaaacgaaattatcgacataggtatagaatccggaacattgaacgtattaatacttaattctttttctgtggtaagtaccgataggttattgacattgtatggttttaaatattctataacttgagacttgatagatattagtgatgaattgaaaattatttttatcaccacgtgtgtttcaggatcatcgtcgacgcccgtcaaccaaccgaacggagtaaaataaatatcattaatatatgctctagatattagtatttttatcaatcctttgattatcatcttctcgtaggcgaatgattccatgatcaagagtgatttaagaacatcctccggagtattaatgggcttagtaaacagtccatcgttgcaataataaaagttatccaagttaaaggatattatgcattcgtttaaagatatcacctcatctgacggagacaattttttggtaggttttagagactttgaagctacttgtttaacaaagttattcatcgtcgtctactattctatttaattttgtagttaatttatcacatatcacattaattgactttttggtccacttttccatacgtttatattcttttaatcctgcgttatccgtttccgttatatccagggatagatcttgcaagttaaatagaatgctcttaaataatgtcattttcttatccgctaaaaatttaaagaatgtataaacctttttcagagatttgaaactcttaggtggtgtcctagtacacaatatcataaacaaactaataaacattccacattcagattccaacagctgattaacttccacattaatacagcctattttcgctccaaatgtacattcgaaaaatctgaataaaacatcgatgtcacaatttgtattatccaatacagaatgtttgtgattcgtgttaaaaccatcggagaaggaatagaaataaaaattattatagtggtggaattcagttggaatattgcctccggagtcataaaaggatactaaacattgttttttatcataaattacacatttccaatgagacaaataacaaaatccaaacattacaaatctagaggtagaacttttaattttgtctttaagtatatacgataagatatgtttattcataaacgcgtcaaatttttcatgaatcgctaaggagtttaagaatctcatgtcaaattgtcctatataatccacttcggatccataagcaaactgagagactaagttcttaatacttcgattgctcatccaggctcctctctcaggctctattttcatcttgacgacctttggattttcaccagtatgtattcctttacgtgataaatcatcgattttcaaatccatttgtgagaagtctatcgccttagatactttttcccgtagtcgaggtttaaaaaaatacgctaacggtatactagtaggtaactcaaagacatcatatatagaatggtaacgcgtctttaactcgtcggttaactctttcttttgatcgagttcgtcgctactattgggtctgctcaggtgccccgactctactagttccaacatcataccgataggaatacaagacactttgccggcggttgtagatttatcatatttttccactacatatccgttacaatttgttaaaaatttagatacatctatattgctacataatccagctagtgaatatatatgacataataaattggtaaatcctagttctggtattttactaattactaaatctgtatatctttccatttatcatggaaaagaatttaccagatatcttcttttttccaaactgcgttaatgtattctcttacaaatattcacaagatgaattcagtaatatgagtaaaacggaacgtgatagtttctcattggccgtgtttccagttataaaacatagatggcataacgcacacgttgtaaaacataaaggaatatacaaagttagtacagaagcacgtggaaaaaaagtatctcctccatcactaggaaaacccgcacacataaacctaaccgcgaagcaatatatatacagtgaacacacaataagctttgaatgttatagttttctaaaatgtataacaaatacagaaatcaattcgttcgatgagtatatattaagaggactattagaagctggtaatagtttacagatattttccaattccgtaggtaaacgaacagatactataggtgtactagggaataagtatccatttagcaaaattccattggcctcattaactcctaaagcacaacgagagatattttcagcgtggatttctcatagacctgtagttttaactggaggaactggagtgggtaagacgtcacaggtacccaagttattgctttggtttaattatttatttggtggattctctactctagataaaatcactgactttcacgaaagaccagtcattctatctcttcctaggatagctttagttagattgcatagcaataccattttaaaatcattgggatttaaggtactagatggatctcctatttctttacggtacggatctataccggaagaattaataaacaaacaaccaaaaaaatatggaattgtattttctacccataagttatctctaacaaaactatttagttatggcactcttattatagacgaagttcatgagcatgatcaaataggagatattattatagcagtagcgagaaagcatcatacgaaaatagattctatgtttttaatgactgccacgttagaggatgacagggaacggctaaaagtatttttacctaatcccgcatttatacatattcctggagatacactgtttaaaattagcgaggtatttattcataataagataaatccatcttccagaatggcatacatagaagaagaaaagagaaatttagttactgctatacagatgtatactcctcctgatggatcatccggtatagtctttgtggcatccgttgcacagtgtcacgaatataaatcatatttagaaaaaagattaccgtatgatatgtatattattcatggtaaggtcttagatatagacgaaatattagaaaaagtgtattcatcacctaatgtatcgataattatttctactccttatttggaatccagcgttactatacgcaatgttacacacatttatgatatgggtagagtttttgtccccgctccttttggaggatcgcaacaatttatttctaaatctatgagagatcaacgaaaaggaagagtaggaagagttaatcctggtacatacgtctatttctatgatctgtcttatatgaagtctatacagcgaatagattcagaatttctacataattatatattgtacgctaataagtttaatctaacactccccgaagatttgtttataatccctacaaatttggatattctatggcgtacaaaggaatatatagactcgttcgatattagtacagaaacatggaataaattattatccaattattatatgaagatgatagagtatgctaaactttatgtactaagtcctattctcgctgaggagttggataactttgagaggacgggagaattaactagtattgtacgagaagccattttatctctaaatttacaaattaagattttaaattttaaacataaagatgatgatacgtatatacacttttgtaaaatattattcggtgtctataacggaacaaacgctactatatattatcatagacctctaacgggatatatgaatatgatttcagatactatatttgttcctgtagataataactaaaaatcaaactctaatgaccacatctttttttagagatgaaaaattttccacatctccttttgtagacacgactaaacattttgcagaaaaaagtttattagtgtttagataatcgtatacttcatcagtgtagatagtaaatgtgaacagataaaaggtattcttgctcaatagattggtaaattccatagaatatattaatcctttcttcttgagatcccacatcatttcaaccagagacgttttatccaatgatttacctcgtactataccacatacaaaactagattttgcagtgacgtcgtacctggtattcctaccaaacaaaattttacttttagttcttttagaaaattctaaggtagaatctctatttgccaatatgtcatctatggaattaccactagcaaaaaatgatagaaatatatattgatacatcgcagctggttttgatctactatactttaaaaacgaatcagattccataattgcctgtatatcatcagctgaaaaactatgttttacacgtattccttcggcatttctttttaatgatatatcttgtttagacaatgataaagttatcatgtccatgagagacgcgtctccgtatcgtataaatatttcattagatgttagacgcttcattaggggtatacttctataaggtttcttaatcagtccatcattggttgcgtcaagaactactatcggatgttgttgggtatctctagtgttacacatggccttactaaagtttgggtaaataactatgatatctctattaattatagatgcatatatttcattcgtcaaggatattagtatcgacttgctatcgtcattaatacgtgtaatgtaatcatataaatcatgcgatagccaaggaaaatttaaatagatgttcatcatataatcgtcgctataattcatattaatacgttgacattgactaatttgtaatatagcctcgccacgaagaaagctctcgtattcagtttcatcgataaaggataccgttaaatataactggttgccgatagtctcatagtctattaagtggtaagtttcgtacaaatacagaatccctaaaatattatctaatgttggattaatctttaccataactgtataaaatggagacggagtcataactattttaccgtttgtacttactggaatagatgaaggaataatctccggacatgctggtaaagacccaaatgtctgtttgaagaaatccaatgttccaggtcctaatctcttaacaaaaattacgatattcgatcccgatatcctttgcattctatttaccagcatatcacgaactatattaagattatctatcatgtctattctcccaccgttatataaatcgcctccgctaagaaacgttagtatatccatacaatggaatacttcatttctaaaatagtattcgttttctaattctttaatgtgaaatcgtatactagaaagggaaaaattatctttgagttttccgttagaaaagaaccacgaaactaatgttctgattgcgtccgattccgttgctgaattaatggatttacaccaaaaactcatataacttctagatgtagaagcattcgctaaaaaattagtagaatcaaaggatataagtagatgttccaacaagtgagcaattcccaagatttcatctatatcattctcgaatccgaaattagaaattcccaagtagatatcctttttcatccgatcgttgatgaaaatacgaactttattcggtaagacaatcatttactaaggagtaaaataggaagtaatgttcgtatgtcgttatcatcgtataaattaaaggtgtgttttttaccattaagtgacattataattttaccaatattggaattataatataggtgtatttgcgcactcgcgacggttgatgcatcggtaaatatagctgtatctaatgttctagtcggtatttcatcatttcgctgtctaataatagcgttttctctatctgtttccattacagctgcctgaagtttattggtcggataatatgtaaaataataagaaatacatacgaataacaaaaataaaataagatataataaagatgccatttagagatctaattttgtttaacttgtccaaattcctacttacagaagatgaggaatcgttggagatagtgtcttccttatgtagaggatttgaaatatcttataatgacttgataacttactttccagataggaaataccataaatatatttataaagtatttgaacatgtagatttatcggaggaattaagtatggaattccatgatacaactctgagagatttagtctatcttagattgtacaagtattccaagtgtatacggccgtgttataaattaggagataatctaaaaggcatagttgttataaaggacaggaatatttatattagggaagcaaatgatgacttgatagaatatctcctcaaggaatacactcctcagatttatacatattctaatgagcgcgtccccataactggttcaaaattaattctttgtggattttctcaagttacatttatggcgtatacaacgtcgcatataacaacaaataaaaaggtagatgttctcgtttccaaaaaatgtatagatgaactagtcgatccaataaattatcaaatacttcaaaatttatttgataaaggaagcggaacaataaacaaaatactcaggaagatattttattcggtaacaggtggccaaactccataggtagctttttctatttcggattttagaatttccaaattcaccagcgatttatcggttttggtgaaatccaaggatttattaatgtccacaaatgccatttgttttgtctgtggattgtatttgaaaatggaaacgatgtagttagatagatgcgctgcgaagtttcctattagggttccgcgcttcacgtcacccagcatacttgaatcaccatcctttaaaaaaaatgataagatatcaacatggagtatatcatactcgaattttaattcttctactgactcactgacattttcacaaatactacaatacggtttaccgaaaataatcagtacgttcttcatttatgggtatcaaaaacttaaaatcgttactgctggaaaataaatcactgacgatattagatgataatttatacaaagtatacaatggaatatttgtggatacaatgagtatttatatagccgtcgccaattgtgtcagaaacttagaagagttaactacggtattcataaaatacgtaaacggatgggtaaaaaagggagggcatgtaaccctttttatcgatagaggaagtataaaaattaaacaagacgttagagacaagagacgtaaatattctaaattaaccaaggacagaaaaatgttagaattagaaaagtgtacatccgaaatacaaaatgttaccggatttatggaagaagaaataaaggcagaaatgcaattaaaaatcgataaactcacatttcaaatatatttatctgattctgataacataaaaatatcattgaatgagatactaacacatttcaacaataatgagaatgttacattattttattgtgatgaacgagacgcagaattcgttatgtgtctcgaggctaaaacacatttctctaccacaggagaatggccgttgataataagtaccgatcaggatactatgctatttgcatctgctgataatcatcctaagatgataaaaaacttaactcaactgtttaaatttgttccctcggcagaggataactatttagcaaaattaacggcgttagtgaatggatgtgatttctttcctggactctatggggcatctataacacccaccaacttaaacaaaatacaattgtttagtgattttacaatcgataatatagtcactagtttggcaattaaaaattattatagaaagactaactctaccgtagacgtgcgtaatattgttacgtttataaacgattacgctaatttagacgatgtctactcgtatattcctccttgtcaatgcactgttcaagaatttatattttccgcattagatgaaaaatggaatgaatttaaatcatcttatttagaaagcgtgccgttaccctgccaattaatgtacgcgttagaaccacgcaaggagattgatgtttcagaagttaaaactttatcatcttatatagatttcgaaaatactaaatcagatatcgatgttataaaatctatatcctcgatcttcggatattctaacgaaaactgtaacacgatagtattcggcatctataaggataatttactactgagtataaataattcattttactttaacgatagtctgttaataaccaatactaaaagtgataatataataaatataggttactagattaaaaatggtgttccaactcgtgtgctctacatgcggtaaagatatttctcacgaacgatataaattgattatacgaaaaaaatcattaaaggatgtactcgtcagtgtaaagaacgaatgttgtaggttaaaattatctacacaaatagaacctcaacgtaacttaacagtgcaacctctattggatataaactaatatggatccggttaattttatcaagacatatgcgcctagaggttctattatttttattaattataccatgtcattaacaagtcatttgaatccatcgatagaaaaacatgtgggtatttattatggtacgttattatcggaacacttggtagttgaatctacctatagaaaaggagttcgaatagtcccattggatagtttttttgaaggatatcttagtgcaaaagtatacatgttagagaatattcaagttatgaaaatagcagctgatacgtcattaactttattgggtattccgtatggatttggtcatgatagaatgtattgttttaaattggtagctgactgttataaaaatgccggtattgatacatcgtctaaacgaatattgggcaaagatatttttctgagccaaaacttcacagacgataatagatggataaagatatatgattctaataatttaacattttggcaaattgattaccttaaagggtgagttaatatgcataactactcctccgttgttttttccctcgttctttttcttaacgttgtttgccatcactctcataatgtaaagatattctaaaatggtaaacttttgcatatcggacgcagaaattggtataaatgttgtaattgtattatttcccgtcaatggactagtcacagctccatcagttttatatcctttagagtatttctcactcgtgtctaacattctagagcattccatgatctgtttatcgttgatattggccggaaagatagattttttattttttattatattactattggcaattgtagatataacttctggtaaatatttttctaccttttcaatctcttctattttcaagccggctatatattctgctatattgttgctagtatcaataccttttctggctaagaagtcatatgtggtattcactatatcagttttaactggtagttccattagcctttccacttctgcagaataatcagaaattggttctttaccagaaaatccagctactataataggctcaccgatgatcattggcaaaatcctatattgtaccagattaatgagagcatatttcatttccaataattctgctagttcttgagacattgatttatttgatgaatctagttggttctctagatactctaccatttctgccgcatacaataacttgttagataaaatcagggttatcaaagtgtttagcgtggctagaatagtgggcttgcatgtattaaagaatgcggtagtatgagtaaaccgttttaacgaattatatagtctccagaaatctgtggcgttacatacatgagccgaatgacatcgaagattgtccaatatttttaatagctgctctttgtccattatttctatatttgactcgcaacaattgtagataccattaatcaccgattcctttttcgatgccggacaatagcacaattgtttagctttggactctatgtattcagaattaatagatatatctctcaatacagattgcactatacattttgaaactatgtcaaaaattgtagaacgacgctgttctgcagccatttaactttaaataatttacaaaaatttaaaatgagcatccgtataaaaatcgataaactgcgccaaattgtggcatatttttcagagttcagtgaagaagtgtctataaatgtagactcgacggatgagttaatgtatatttttgccgccttgggcggatctgtaaacatttgggcaattatacctctaagtgcatcagtgttttaccgaggagccgaaaatattgtgtttaatcttcctgtgtccaaggtaaaatcgtgtttgtgtagttttcacaatgatgccatcatagatatagaacctgatctggaaaataatctagtaaaactttctagttatcatgtagtaagtgtcgattgtaacaaggaactgatgcctattaggacagatactactatttgtctaagtatagatcaaaagaaatcttacgtgtttaattttcacaagtatgaagaaaaatgttgtggtagaaccgtcattcatctagaatggttgttgggctttatcaagtgtattagtcagcatcagcatctggctattatgtttaaagatgacaatattattatgaagactcctggtaatactgatgcgttttccagggaatattctatgactgaatgttctcaagaactacaaaagttttctttcaaaatagctatctcgtctctcaacaaactacgaggattcaaaaagagagtcaatgtttttgaaactagaatcgtaatggataatgacgataacattttaggaatgttgttttcggatagagttcaatcctttaagatcaacatctttatggcgtttttagattaatactttcaatgagataaatatgggtggcggagtaagtgttgagctccctaaacgggatccgcctccgggagtacccactgatgagatgttattaaacgtggataaaatgcatgacgtgatagctcccgctaagcttttagaatatgtgcatataggaccactagcaaaagataaagaggataaagtaaagaaaagatatccagagtttagattagtcaacacaggacccggtggtctttcggcattgttaagacaatcgtataatggaaccgcacccaattgctgtcgcacttttaatcgtactcattattggaagaaggatggaaagatatcagataagtatgaagagggtgcagtattagaatcgtgttggccagacgttcacgacactggaaaatgcgatgttgatttattcgactggtgtcagggggatacgttcgatagaaacatatgccatcagtggatcggttcagcctttaataggagtaatagaactgtagagggtcaacaatcgttaataaatctgtataataagatgcaaacattatgtagtaaagatgctagtgtaccaatatgcgaatcatttttgcattatttacgcgcacacaatacagaagatagcaaagagatgatcgattatattctaagacaacagtctgcggactttaaacagaaatatatgagatgtagttatcccactagagataagttagaagagtcattaaaatatgcggaacctcgagaatgttgggatccagagtgttcgaatgccaatgttaatttcttactaacacgtaattataataatttaggactttgcaatattgtacgatgtaataccagcgtgaacaacttacagatggataaaacttcctcattaagattgtcatgtggattaagcaatagtgatagattttctactgttcccgtcaatagagcaaaagtagttcaacataatattaaacactcgttcgacctaaaattgcatttgatcagtttattatctctcttggtaatatggatactaattgtagctatttaaatgggtgccgcggcaagcatacagacgacggtgaatacactcagcgaacgtatctcgtctaaattagaacaagaagcgaacgctagtgctcaaacaaaatgtgatatagaaatcggaaatttttatatccgacaaaaccatggatgtaacctcactgttaaaaatatgtgctctgcggacgcggatgctcagttggatgctgtgttatcagccgctacagaaacatatagtggattaacaccggaacaaaaagcatacgtgccagctatgtttactgctgcgttaaacattcagacgagtgtaaacactgttgttagagattttgaaaattatgtgaaacagacttgtaattctagcgcggtcgtcgataacaaattaaagatacaaaacgtaatcatagatgaatgttacggagccccaggatctccaacaaatttggaatttattaatacaggatctagcaaaggaaattgtgccattaaagcgttgatgcaattgacgactaaggccactactcaaatagcacctagacaagttgctggtacaggagttcagttttatatgattgttatcggtgttataatattggcagcgttgtttatgtactatgccaagcgtatgttgttcacatccaccaatgataaaatcaaacttattttagccaataaggaaaacgtccattggactacttacatggacacattctttagaacttctccgatggttattgctaccacggatatgcaaaactgaaaatatattgataatattttaatagattaacatggaagttatcgctgatcgtctagacgatatagtgaaacaaaatatagcggatgaaaaatttgtagattttgttatacacggtctagagcatcaatgtcctgctatacttcgaccattaattaggttgtttattgatatactattatttgttatagtaatttatatttttacggtacgtctagtaagtagaaattatcaaatgttgttggtggtgctagtcatcacattaactattttttattactttatactataatagtactagactgacttctaacaaacatctcacctgccataaataaatgcttgatattaaagtcttctatttctaacactattccatctgtggaaaataatactctgacattatcgctaattgacacatcggtgagtgatatgcctataaagtaataatcttctttgggcacatataccagtgtaccaggttctaacaacctatttactggtgctcctgtagcatactttttctttaccttgagaatatccatcgtttgcttggtcaatagcgatatgtgattttttatcaaccactcaaaaaagtaattggagtgttcatatcctctacgggctattgtctcatggccgtgtatgaaatttaagtaacacgactgtggtagatttgttctatagagccgattgccgcaaatagatagaactaccaatatgtctgtacaaatgttaaacattaattgattaacagaaaaaacaatgttcgttctgggaatagaaaccagatcaaaacaaaattcgttagaatatatgccacgtttatacatggaatataaaataactacagtttgaaaaataacagtatcatttaaacatttaacttgcggggttaatctcacaactttactgtttttgaactgttcaaaatatagcatcgatccgtgagaaatacgtttagccgcctttaatagaggaaatcccaccgcctttctggatctcaccaacgacgatagttctgaccagcaactcatttcttcatcatccacctgttttaacatataataggcaggagatagatatccgtcattgcaatattccttctcgtaggcacacaatctaatattgataaaatctccattctcttctctgcatttattatcttgtctcggtggctgattaggctgtggtcttggtttaggccttggtctatcgttgttgaatctattttggtcattaaatctttcatttcttcctggtatatttctatcacctcgtttggttggatttttgtctatattatcgtttgtaacatcggtacgggtattcatttatcacaaaaaaaacttctctaaatgagtctactgctagaaaacctcatcgaagaagataccatattttttgcaggaagtatatctgagtatgatgatttacaaatggttattgccggcgcaaaatccaaatttccaagatctatgctttctatttttaatatagtacctagaacgatgtcaaaatatgagttggagttgattcataacgaaaatatcacaggagcaatgtttaccacaatgtataatataagaaacaatttgggtctaggagatgataaactaactattgaagccattgaaaactatttcttggatcctaacaatgaagttatgcctcttattattaataatacggatatgactgccgtcattcctaaaaaaagtggtaggagaaagaataagaacatggttatcttccgtcaaggatcatcacctatcttgtgcattttcgaaactcgtaaaaagattaatatttataaagaaaatatggaatccgcgtcgactgagtatacacctatcggagacaacaaggctttgatatctaaatatgcgggaattaatgtcctgaatgtgtattctccttccacatccataagattgaatgccatttacggattcaccaataaaaataaactagagaaacttagtactaataaggaactagaatcgtatagttctagccctcttcaagaacccattaggttaaatgattttctgggactattggaatgtgttaaaaagaatattcctctaacagatattccgacaaaggattgattactataaatggagaatgttcctaatgtatactttaatcctgtgtttatagagcccacgtttaaacattctttattaagtgtttataaacacagattaatagttttatttgaagtattcgttgtattcattctaatatatgtattttttagatctgaattaaatatgttcttcatgcctaaacgaaaaatacccgatcctattgatagattacgacgtgctaatctagcgtgtgaagacgataaattaatgatctatggattaccatggatgacaactcaaacatctgcgttatcaataaatagtaaaccgatagtgtataaagattgtgcaaagcttttgcgatcaataaatggatcacaaccagtatctcttaacgatgttcttcgcagatgatgattcattttttaagtatttggctagtcaagatgatgaatcttcattatctgatatattgcaaatcactcaatatctagactttctgttattattattgatccaatcaaaaaataaattagaagctgtgggtcattgttatgaatctctttcagaggaatacagacaattgacaaaattcacagactttcaagattttaaaaaactgtttaacaaggtccctattgttacagatggaagggtcaaacttaataaaggatatttgttcgactttgtgattagtttgatgcgattcaaaaaagaatcctctctagctaccaccgcaatagatcctgttagatacatagatcctcgtcgcaatatcgcattttctaacgtgatggatatattaaagtcgaataaagtgaacaataattaattctttattgtcatcatgaacggcggacatattcagttgataatcggccccatgttttcaggtaaaagtacagaattaattagacgagttagacgttatcaaatagctcaatataaatgcgtgactataaaatattctaacgataatagatacggaacgggactatggacgcatgataagaataattttgaagcattggaagcaactaaactatgtgatgtcttggaatcaattacagatttctccgtgataggtatcgatgaaggacagttctttccagacattgtttaattctgtgagcgtatggcaaacggtaccgagctcaaaaattgaaaaactagcgtctttttttgctcgaagtcgaccaccatgagtgctcctaaactcctctctctgggctgtatcttcttccccttgctactttttcagcaggcccgggctcaattcccaagacagtgtgccactgttgaggctttgagaagtggtatgtgttgcccagacctgtcccctgtgtctgggcctgggacagaccgctgtggctcatcatcagggaggggcagatgtgaggcagtgactgcagactcccggccccacagccctcagtatccccatgatggcagagatgatcgggaggtctggcccttgcgcttcttcaataggacatgtcactgcaacggcaatttctcaggacacaactgtgggacgtgccgtcctggctggagaggagctgcctgtgaccagagggttctcatagtcaggagaaatcttctggacttaagtaaagaagaaaagaaccactttgtccgggccctggatatggcaaagcgcacaactcaccctttatttgtcattgccaccaggagatcagaagaaatactggggccagatggcaacacgccacaatttgagaacatttccatttataactactttgtttggacacactattactcagtcaaaaagactttccttggggtaggacaggaaagctttggtgaagtggatttctctcatgagggaccagcttttctcacatggcacaggtaccacctcctgcgtctggagaaagacatgcaggaaatgttgcaagagccttctttctcccttccttactggaattttgcaacggggaaaaatgtctgtgatatctgcacggatgacttgatgggatccagaagcaactttgattccactctaataagcccaaactctgtcttttctcaatggcgagtggtctgtgactccttggaagattatgataccctgggaacactttgtaacagcaccgaggatgggccaattaggagaaatccagctggaaatgtggccagaccaatggtgcaacgtcttcctgaaccacaggatgtcgctcagtgcttggaagttggtttatttgacacgcctcctttttattccaactctacaaacagtttccgaaacacagtggaaggttacagtgaccccacgggaaagtatgaccctgctgttcgaagtcttcacaatttggctcatctattcctgaatggaacagggggacaaacccatttgtctccaaatgatcctatttttgtcctcctgcacaccttcacagatgcagtctttgatgaatggctgaggagatacaatgctgatatatccacatttccattggaaaatgcccctattggacataatagacaatacaacatggtgccattctggcccccagtcaccaacacagaaatgtttgttactgctccagacaacctgggatacacttatgaaattcaatggccaagtcgggagtttagtgtacctgagataattgccatagcagtagttggcgctttgttactggttgcactcatttttgggactgcttcttatctgattcgtgccagacgcagtatggatgaagctaaccagcctctcctcactgatcagtatcaatgctatgctgaagaatatgaaaaactccagaatcctaatcagtctgtggtctaattaattaattaatttttatcgatctaattcaacaatgtctggagagctcggtttggaattagtgaaagcttaaaaattgaaattttattttttttttttggaatataaataagctcgaagtcgaccaccatgttcttggctgttttgtattgccttctgtggagtttccagatctctgatggccattttcctcgagcctgtgcctcctctaagaacttgttggcaaaagaatgctgcccaccatggatgggtgatgggagtccctgcggccagctttcaggcagaggttcctgccaggatatccttctgtccagtgcaccatctggacctcagttccccttcaaaggggtggatgaccgtgagtcctggccctctgtgttttataataggacctgccagtgctcaggcaacttcatgggtttcaactgcggaaactgtaagtttggatttgggggcccaaattgtacagagaagcgagtcttgattagaagaaacatttttgatttgagtgtctccgaaaagaataagttcttttcttacctcactttagcaaaacatactatcagctcagtctatgtcatccccacaggcacctatggccaaatgaacaatgggtcaacacccatgtttaatgatatcaacatctacgacctctttgtatggatgcattactatgtgtcaagggacacactgcttgggggctctgaaatatggagggacattgattttgcccatgaagcaccagggtttctgccttggcacagacttttcttgttattgtgggaacaagaaattcgagaactaactggggatgagaacttcactgttccatactgggattggagagatgcagaaaactgtgacatttgcacagatgagtacttgggaggtcgtcaccctgaaaatcctaacttactcagcccagcatccttcttctcctcctggcagatcatttgtagcagatcagaagagtataatagccatcaggttttatgcgatggaacacctgagggaccactattacgtaatcctggaaaccatgacaaagccaaaacccccaggctcccatcttcagcagatgtggaattttgtctgagtttgacccagtatgaatctggatcaatggatagaactgccaatttcagctttagaaacacactggaaggatttgccagtccactcacagggatagcagatccttctcaaagtagcatgcacaatgccttacatatctttatgaatggaacaatgtcccaagtacagggatcggccaacgatcccatttttcttcttcaccatgcttttgtggacagtatttttgaacaatggctgcgaaggcaccgccctcttttggaagtttacccagaagccaatgcacctatcggccataacagagactcttacatggttcctttcataccgctctatagaaatggtgatttcttcataacatccaaggatctgggatatgactacagctacctccaagagtcagatccaggcttttacagaaattatattgagccttacttggaacaagccagtcgtatctggccatggcttcttggggcagcactggtgggagctgttattgctgcagctctctctgggcttagcagtaggctatgccttcagaagaagaagaagaagaagcaaccccaggaggaaaggcagccactcctcatggacaaagacgactaccacagcttgctgtatcagagccatctgtgattaattaatttttatcgatctaattcaacaatgtctggagagctcggatccttctgtgagcgtatggcaaacgaaggaaaaatagttatagtagccgcactcgatgggacatttcaacgtaaaccgtttaataatattttgaatcttattccattatctgaaatggtggtaaaactaactgctgtgtgtatgaaatgctttaaggaggcttccttttctaaacgattgggtgaggaaaccgagataaaccgagatagaaataataggaggtaatgatatgtatcaatcggtgtgtagaaagtgttacatcgactcataatattatattttttatctaaaaaactaaaaataaacattgattaaattttaatataatacttaaaaatggatgttgtgtcgttagataaaccgtttatgtattttgaggaaattgataatgagttagattacgaaccagaaagtgcaaatgaggtcgcaaaaaaactgccgtatcaaggacagttaaaactattactaggagaattattttttcttagtaagttacagcgacacggtatattagatggtgccaccgtagtgtatataggatctgctcccggtacacatatacgttatttgagagatcatttctataatttaggagtgatcatcaaatggatgctaattgacggccgccatcatgatcctattttaaatggattgcgtgatgtgactctagtgactcggttcgttgatgaggaatatctacgatccatcaaaaaacaactgcatccttctaagattattttaatttctgatgtgagatccaaacgaggaggaaatgaacctagtacggcggatttactaagtaattacgctctacaaaatgtcatgattagtattttaaaccccgtggcgtctagtcttaaatggagatgcccgtttccagatcaatggatcaaggacttttatatcccacacggtaataaaatgttacaaccttttgctccttcatattcagctgaaatgagattattaagtatttataccggtgagaacatgagactgactcgagttaccaaattagacgctgtaaattatgaaaaaaagatgtactaccttaataagatcgtccgtaacaaagtagttgttaactttgattatcctaatcaggaatatgactattttcacatgtactttatgctgaggaccgtgtactgcaataaaacatttcctactactaaagcaaaggtactatttctacaacaatctatatttcgtttcttaaatattccaacaacatcaactgaaaaagttagtcatgaaccaatacaacgtaaaatatctagcaaaaattctatgtctaaaaacagaaatagcaagagatccgtacgcggtaataaatagaaacgtactactgagatatactaccgatatagagtataatgatttagttactttaataaccgttagacataaaattgattctatgaaaactgtgtttcaggtatttaacgaatcatccataaattatactccggttgatgatgattatggagaaccaatcattataacatcgtatcttcaaaaaggtcataacaagtttcctgtaaattttctatacatagatgtggtaatatctgacttatttcctagctttgttagactagatactacagaaactaatatagttaatagtgtactacaaacaggcgatggtaaaaagactcttcgtcttcccaaaatgttagagacggaaatagttgtcaagattctctatcgccctaatataccattaaaaattgttagatttttccgcaataacatggtaactggagtagagatagccgatagatctgttatttcagtcgctgattaatcaattagtagagatgagataagaacattataataatcaataatatatcttatatcttatatcttatatcttatatcttgtttagaaaaatgctaatattaaaatagctaacgctagtaatccaatcggaagccatttgatatctataatagggtatctaatttcctgatttaaatagcggacagctatattctcggtagctactcgtttggaatcacaaacattatttacatctaatttactatctgtaatggaaacgtttcccaatgaaatggtacaatccgatacattgcattttgttatatttttttttaaagaggctggtaacaacgcatcgcttcgtttacatggctcgtaccaacaataatagggtaatcttgtatctattcctatccgtactatgcttttatcaggataaatacatttacatcgtatatcgtctttgttagcatcacagaatgcataaatttgttcgtccgtcatgataaaaatttaaagtgtaaatataactattatttttatagttgtaataaaaagggaaatttgattgtatactttcggttctttaaaagaaactgacttgataaaaatggctgtaatctctaaggttacgtatagtctatatgatcaaaaagagattaatgctacagatattatcattagtcatgttaaaaatgacgacgatatcggtaccgttaaagatggtagactaggtgctatggatggggcattatgtaagacttgtgggaaaacggaattggaatgtttcggtcactggggtaaagtaagtatttataaaactcatatagttaagcctgaatttatttcagaaattattcgtttactgaatcatatatgtattcactgcggattattgcgttcacgagaaccgtattccgacgatattaacctaaaagagttatcgggacacgctcttaggagattaaaggataaaatattatccaagaaaaagtcatgttggaacagtgaatgtatgcaaccgtatcaaaaaattactttttcaaagaaaaaggtttgtttcgtcaacaagttggatgatattaacgttcctaattctctcatctatcaaaagttaatttctattcatgaaaagttttggccattattagaaattcatcaatatccagctaacttattttatacagactactttcccatccctccgttgattattagaccggctattagtttttggatagatagtatacccaaagagaccaatgaattaacttacttattaggtatgatcgttaagaattgtaacttgaatgctgatgaacaggttatccagaaggcggtaatagaatacgatgatattaaaattatttctaataacactaccagtatcaatttatcatatattacatccggcaaaaataatatgattagaagttatatcgtcgcccgacgaaaagatcagaccgctagatctgtaattggtcccagtacatctatcaccgttaatgaggtaggaatgcccgcatatattagaaatacacttacagaaaagatatttgttaatgcctttacagtggataaagttaaacaactattagcgtcaaaccaagttaaattttactttaataaacgattaaaccaattaacaagaatacgccaaggaaagtttattaaaaataaaatacatttattgcctggtgattgggtagaagtagctgttcaagaatatacaagtattatttttggaagacagccgtctctacatagatacaacgtcatcgcttcatctatcagagctaccgaaggagatactatcaaaatatctcccggaattgccaactctcaaaatgctgatttcgacggggatgaggaatggatgatattagaacaaaatcctaaagctgtaattgaacaaagtattcttatgtatccgacgacgttactcaaacacgatattcatggagcccccgtttatggatctattcaagatgaaatcgtagcagcgtattcattgtttaggatacaagatctttgtttagatgaagtattgaacatcttggggaaatatggaagagagttcgatcctaaaggtaaatgtaaattcagcggtaaagatatctatacttacttgataggtgaaaagattaattatccgggtctcttaaaggatggtgaaattattgcaaacgacgtagatagtaattttgttgtggctatgaggcatctgtcattggctggactcttatccgatcataagtcgaacgtggaaggtatcaactttattatcaagtcatcttatgtttttaagagatatctatctatttacggttttggggtgacattcaaagatctgagaccaaattcgacgttcactaataaattggaggccatcaacgtagaaaaaatagaacttatcaaagaagcatacgccaaatatctcaacgatgtaagagacgggaaaatagttccattatctaaagctttagaggcggactatgtggaatccatgttatccaacttgacaaatcttaatatccgagagatagaagaacatatgagacaaacgctgatagatgatccagataataacctcctgaaaatggccaaagcgggttataaagtaaatcccacagaactaatgtatattctaggtacgtatggacaacaaaggattgatggtgaaccagcagagactcgagtattgggtagagttttaccttactatcttccagactctaaggatccagaaggaagaggttacattcttaattctttaacaaaaggattaacgggttctcaatattacttttcgatgctggttgccagatctcaatctactgatatcgtctgtgaaacatcacgtaccggaacactggctagaaaaatcattaaaaagatggaggatatggtggtcgacggatacggacaagtagttataggtaatacgctcatcaagtacgccgccaattataccaaaattctaggctcagtatgtaaacctgtagatcttatctatccagatgagtccatgacttggtatttggaaattagtgctctgtggaataaaataaaacagggattcgtttactctcagaaacagaaacttgcaaagaagacattggcgccgtttaatttcctagtattcgtcaaacccaccactgaggataatgctattaaggttaaggatctgtacgatatgattcataacgtcattgatgatgtgagagagaaatacttctttacggtatctaatatagattttatggagtatatattcttgacgcatcttaatccttctagaattagaattacaaaagaaacggctatcactatctttgaaaagttctatgaaaaactcaattatactctaggtggtggaactcctattggaattatttctgcacaggtattgtctgagaagtttacacaacaagccctgtccagttttcacactactgaaaaaagtggtgccgtcaaacaaaaacttggtttcaacgagtttaataacttgactaatttgagtaagaataagaccgaaattatcactctggtatccgatgatatctctaaacttcaatctgttaagattaatttcgaatttgtatgtttgggagaattaaatccaaacatcactcttcgaaaagaaacagataaatatgtagtagatataatagtcaatagattatacatcaagagagcagaaataaccgaattagtcgtcgaatatatgattgaacgatttatctcctttagcgtcattgtaaaggaatggggtatggagacattcattgaggacgaggataatattagatttactgtctacctaaatttcgttgaaccggaagaattgaatcttagtaagtttatgatggttcttccgggggcagccaacaagggaaagattagtaaattcaagattcctatctctgattatacgggatatgacgacttcaatcaaacaaaaaagctcaataagatgactgtagaactcatgaatctaaaagaattgggttctttcgatttggaaaacgtcaacgtgtatcctggagtatggaatacatacgatatcttcggtatcgaggccgctcgtgaatacttgtgcgaagccatgttaaacacctatggagaagggttcgattatctgtatcagccttgtgatcttctcgctagtttactatgtgctagttacgaaccagaatcagtgaataaattcaagttcggcgcagctagtactcttaagagagctacgttcggagacaataaagcattgttaaacgcggctcttcataaaaagtcagaacctattaacgataatagtagctgccacttttttagcaaggtccctaatataggaactggatattacaaatactttatcgacttgggtcttctcatgagaatggaaaggaaactatctgataagatatcttctcaaaagatcaaggaaatggaagaaacagaagacttttaattcttatcaataacatatttttctatgatctgtcttttaaacgatggattttccacaaatgcgcctctcaagtccctcatagaatgatacacgtataaaaaatatagcataggcaatgactccttatttttagacattagatatgccaaaatcatagccccgcttctatttactcccgcagcacaatgaaccaacacgggctcgtttcgttgatcacatttagataaaaaggcggttacgtcgtcaaaatatttactaatatcggtagttgtatcatctaccaacggtatatgaataatattaatattagagttaggtaatgtatatttatccatcgtcaaatttaaaacatatttgaacttaacttcagatgatggtgcatccatagcatttttataatttcccaaatacacattattggttacccttgtcattatagtgggagatttggctttgtgcatatctccagttgaacgtagtagtaagtatttatacaaacttttcttatccatttataacgtacaaatggataaaactactttatcggtaaacgcgtgtaatttagaatacgttagagaaaaggctatagtaggcgtacaagcagccaaaacatcaacacttatattctttgttattatattggcaattagtgcgctattactctggtttcagacgtctgataatccagtctttaatgaattaacgagatatatgcgaattaaaaatacggttaacgattggaaatcattaacggatagcaaaacaaaattagaaagtgatagaggtagacttctagccgctggtaaggatgatatatttgaattcaaatgtgtggatttcggcgcctattttatagctatgcgattggataagaaaacatatctgccgcaagctattaggcgaggtactggagacgcgtggatggttaaaaaggcggcaaaggtcgatccatctgctcaacaattttgtcagtatttgataaaacacaagtctaataatgttattacttgtggtaatgagatgttaaatgaattaggttatagcggttattttatgtcaccgcattggtgttccgattttagtaatatggaatagtgttagataaatgcggtaacgaatgttcctgtaaggaaccataacagcttagatttaacgttaaagatgagcataaacataataaacaaaattacaatcaaacttataacattaatatcaaacaatccaaaaaatgaaatcagtggagtagtaaacgcgtacataactcctggataacgtttagcagctgccgttcctattctagaccaaaaattcggtttcatgttttcgaaacggtattctgcaacaagtcgaggatcgtgttctacatatttggcggcattatccagtatctgcctattgatcttcatttcgttttcgattctggctatttcaaaataaaatcccgatgatagacctccagactttataatttcatctacgatgttcagcgccgtagtaactctaataatataggctgataagctaacatcataccctcctgtatatgtgaatatggcatgatttttgtccattacaagctcggttttaactttattgcctgtaataatttctctcatctgtaggatatctatttttttgtcatgcattgccttcaagacgggacgaagaaacgtaatatcctcaataacgttatcgttttctacaataactacatattctacctttttattttctaactcggtaaaaaaattagaatcccatagggctaaatgtctagcgatatttcttttcgtttcctctgtacacatagtgttacaaaaccctgaaaagaagtgagtatacttgtcatcatttctaatgtttcctccagtccactgtataaacgcataatccttgtaatgatctggatcatccttgactaccacaacatttcttttttctggcataacttcgttgtcctttacatcatcgaacttctgatcattaatatgctcatgaacattaggaaatgtttctgatggaggtctatcaataactggcacaacaataacaggagttttcaccgccgccatttagttattgaaattaatcatatacaactctttaatacgagttatattttcgtctatccattgtttcacattgacatatttcgacaaaaagatataaaatgcgtattccaatgcttctctgtttaatgaattactaaaatatacaaacacgtcactgtctggcaataaatgatatcttagaatattgtaacaatttattttgtattgcacatgttcgtgatctatgagttcttcttcgaatggcataggatctccgaatctgaaaacgtataaataggagttagaataataatatttgagagtattggtaatatataaactctttagcggtataattagtttttttctctcaatttctatttttagatgtgatggaaaaatgactaattttgtagcattagtatcatgaactctaatcaaaatcttaatatcttcgtcacacgttagctctttgaagtttttaagagatgcatcagttggttctacagatggagtaggtgcaacaattttttgttctacacatgtatgtactggagccattgttttaactataatggtgcttgtatcgaaaaactttaatgcagatagcggaagctcttcgccgcgactttctacgtcgtaattgggttctaacgccgatctctgaatggatactagttttctaagttctaatgtgattctctgaaaatgtaaatccaattcctccggcattatagatgtgtatacatcggtaaataaaactatagtatccaacgatcccttctcgcaaattctagtcttaaccaaaaaatcgtatataaccacggagatggcgtatttaagagtggattcttctaccgttttgttcttggatgtcatataggaaactataaagtccgcactactgttaagaatgattactaacgcaactatatagtttaaattaagcattttggaaacataaaataactctgtagacgatacttgactttcgaataagtttgcagacaaacgaagaaagaacagacctctcttaatttcagaagaaaactttttttcgtattcctgacgtctagagtttatatcaataagaaagttaagaattagtcggttaatgttgtatttcattacccaagtttgagatttcataatattatcaaaagacatgataatattaaagataaagcgctgactatgaacgaaatagctatatggttcgctcaagaatatagtcttgttaaacgtggaaacgataactgtatttttaatcacgtcagcggcatctaaattaaatataggtatatttattccacacactctacaatatgccacaccatcttcataataaataaattcgttagcaaaattattaattttagtgaaatagttagcgtcaactttcatagcttccttcaatctaatttgatgctcacacggtgcgaattccactctaacatcccttttccatgcctcaggttcatcgatctctataatatctagttttttgcgtttcacaaacacaggctcgtctctcgcgatgagatctgtatagtaactatgtaaatgataactagatagaaagatgtagctatatagatgacgatcctttaagagaggtataataactttaccccaatcagatagactgttgttatggtcttcggaaaaagaatttttataaatttttccagtattttccaaatatacgtacttaacatctaaaaaatccttaatgataataggaatggataatccgtctattttataaagaaatacatatcgcacattatacttttttttggaaatgggaataccgatgtgtctacataaatatgcaaagtctaaatattttttagagaatcttagttggtccaaattcttttccaagtacggtaatagatttttcatattgaacggtatcttcttaatctctggttctagttccgcattaaatgatgaaactaagtcactatttttataactaacgattacatcacctctaacatcatcatttaccagaatactgatcttcttttgtcgtaaatacatgtctaatgtgttaaaaaaaagatcatacaagttatacgtcatttcatctgtggtattcttgtcattgaaggataaactcgtactaatctcttctttaacagcctgttcaaatttatatcctatatacgaaaaaatagcaaccagtgtttgatcatccgcgtcaatattctgttctatcgtagtgtataacaatcgtatatcttcttctgtgatagtcgatacgttataaaggttgataacgaaaatatttttatttcgtgaaataaagtcatcgtaggattttggacttatattcgcgtctagtagatatgcttttatttttggaatgatctcaattagaatagtctctttagagtccatttaaagttacaaacaactaggaaattggtttatgatgtataatttttttagtttttatagattctttattctatacttaaaaaatgaaaataaatacaaaggttcttgagggttgtgttaaattgaaagcgagaaataatcataaattatttcattatcgcgatatccgttaagtttgtatcgtaatggcgtggtcaattacgaataaagcggatactagtagcttcacaaagatggctgaaatcagagctcatctaaaaaatagcgctgaaaataaagataaaaacgaggatattttcccggaagatgtaataattccatctactaagcccaaaaccaaacgagccactactcctcgtaaaccagcggctactaaaagatcaaccaaaaaggaggaagtggaagaagaagtagttatagaggaatatcatcaaacaactgaaaaaaattctccatctcctggagtcagcgacattgtagaaagcgtggccgctgtagagctcgatgatagcgacggggatgatgaacctatggtacaagttgaagctggtaaagtaaatcatagtgctagaagcgatctctctgacctaaaggtggctaccgacaatatcgttaaagatcttaagaaaattattactagaatctctgcagtatcgacggttctagaggatgttcaagcagctggtatctctagacaatttacttctatgactaaagctattacaacactatctgatctagtcaccgagggaaaatctaaagttgttcgtaaaaaagttaaaacttgtaagaagtaaatgcgtgcacttttttataaagatggtaaactctttaccgataataattttttaaatcctgtatcagacgataatccagcgtatgaggttttgcaacatgttaaaattcctactcatttaacagatgtagtagtatatgaacaaacgtgggaggaggcgttaactagattaatttttgtgggaagtgattcaaaaggacgtagacaatacttttacggaaaaatgcatgtacagaatcgcaacgctaaaagagatcgtatttttgttagagtatataacgttatgaaacgaattaattgttttataaacaaaaatataaagaaatcgtccacagattccaattatcagttggcggtttttatgttaatggaaactatgttttttattagatttggtaaaatgaaatatcttaaggagaatgaaacagtagggttattaacactaaaaaataaacacatagaaataagtcccgatgaaatagttatcaagtttgtaggaaaggacaaagtttcacatgaatttgttgttcataagtctaatagactatataaaccgctattgaaactgacggatgattctagtcccgaagaatttctgttcaacaaactaagtgaacgaaaggtatacgaatgtatcaaacagtttggtattagaatcaaggatctccgaacgtatggagtcaattatacgtttttatataatttttggacaaatgtaaagtccatatctcctcttccgtcaccaaaaaagttaatagcattaactatcaaacaaactgctgaagtggtaggtcatactccatcaatttcaaaaagagcttatatggcaacgactattttagaaatggtaaaggataaaaattttttagatgtagtatctaaaactacgttcgatgaattcctatctatagtcgtagatcacgttaaatcatctacggatggatgatatagatctttacacaaataattacaagaccgataaatggaaatggataagcgtatgaaatctctcgcaatgacagctttcttcggagagctaagcacattagatattatggcattgataatgtctatatttaaacgccatccaaacaataccattttttcagtggataaggatggtcagtttatgattgatttcgaatacgataattataaggcttctcaatatttggatctgaccctcactccgatatctggagatgaatgcaagactcacgcatcgagtatagccgaacaattggcgtgtgcggatattattaaagaggatattagcgaatatatcaaaactactccccgtcttaaacgatttataaaaaaataccgcaatagatcagatactcgtatcagtcgagatacagaaaagcttaaaatagctctagctaaaggcatagattacgaatatataaaagacgcttgttaataagtaaatgaaaaaaaactagtcgtttataataaaacacgatatggatgccaacgtagtatcattttctactattgcgacgtatatagacgctttagcgaagaatgcttcggaattagaacagaggtctaccgcatacgaaataaataatgaattggaactagtatttattaagccgccattgattactttgacaaatgtagtgaatatctctacgattcaggaatcgtttattcgatttaccgttactaataaggaaggtgttaaaattagaactaagattccattatctaaggtacatggtctagatgtaaaaaatgtacagttagtagatgctatagataacatagtttgggaaaagaaatcattagtgacggaaaatcgtcttcacaaagaatgcttgttgagactatcgacagaggaacgtcatatatttttggattacaagaaatatggatcctctatccgactagaattagtcaatcttattcaagcaaaaacaaaaaactttacgatagactttaagctaaaatattttctaggatccggtgcccagtctaaaagttctttgttgcacgctattaatcatccaaagtcaaggcctaatacatctctggaaatagaattcacacctagagacaatgaaacagttccatatgatgaactaataaaggaattgacgactctctcgcgtcatatatttatggcttctccagagaatgtaattctttctccgcctattaacgcgcctataaaaacctttatgttgcctaaacaagatatagtaggtttggatctggaaaatctatatgccgtaactaagactgacggcattcctataactatcagagttacatcaaacgggttgtattgttattttacacatcttggttatattattagatatcctgttaagagaataatagattccgaagtagtagtctttggtgaggcagttaaggataagaactggaccgtatatctcattaagctaatagagcctgtgaatgcaatcaatgatagactagaagaaagtaagtatgttgaatctaaactagtggatatttgtgatcggatagtattcaagtcaaagaaatacgaaggtccgtttactacaactagtgaagtcgtcgatatgttatctacatatttaccaaagcaaccagaaggtgttattctgttctattcaaagggacctaaatctaacattgattttaaaattaaaaaggaaaatactatagaccaaactgcaaatgtagtatttaggtacatgtccagtgaaccaattatctttggagaatcgtctatctttgtagagtataagaaatttagcaacgataaaggctttcctaaagaatatggttctggtaagattgtgttatataacggcgttaattatctaaataatatctattgtttggaatatattaatacacataatgaagtgggtattaagtccgtggttgtacctattaagtttatagcagaattcttagttaatggagaaatacttaaacctagaattgataaaaccatgaaatatattaactcagaagattattatggaaatcaacataatatcatagtcgaacatttaagagatcaaagcatcaaaataggagatatctttaacgaggataaactatcggatgtgggacatcaatacgccaataatgataaatttagattaaatccagaagttagttattttacgaataaacgaactagaggaccgttgggaattttatcaaactacgtcaagactcttcttatttctatgtattgttccaaaacatttttagacgattccaacaaacgaaaggtattggcgattgattttggaaacggtgctgacctggaaaaatacttttatggagagattgcgttattggtagcgacggatccggatgctgatgctatagctagaggaaatgaaagatacaacaaattaaactctggaattaaaaccaagtactacaaatttgactacattcaggaaactattcgatccgatacatttgtctctagtgtcagagaagtattctattttggaaagtttaatatcatcgactggcagtttgctatccattattcttttcatccgagacattatgctaccgtcatgaataacttatccgaactaactgcttctggaggcaaggtattaatcactaccatggacggagacaaattatcaaaattaacagataaaaagacttttataattcataagaatttacctagtagcgaaaactatatgtctgtagaaaaaatagctgatgatagaatagtggtatataatccatcaacaatgtctactccaatgactgaatacattatcaaaaagaacgatatagtcagagtgtttaacgaatacggatttgttcttgtagataacgttgatttcgctacaattatagaacgaagtaaaaagtttattaatggcgcatctacaatggaagatagaccgtctacaaaaaactttttcgaactaaatagaggagccattaaatgtgaaggtttagatgtcgaagacttacttagttactatgttgtttatgtcttttctaagcggtaaataataatatggtatgggttctgatctcccagttctaaatgcattaaataattccaatagagcgatttttgttcctataggaccttccaactgtggatactctgtattgttaatagatatattaatacttttgtcgggtaacagaggttctacgtcttctaaaaataaaagttttataacatctggcctgttcataaataaaaacttggcgattctatatatactcttattatcaaatctagccattgtcttatagatgtgagctactgtaggtgtaccatttgattttctttctaatactatatatttctctcgaagaagttcttgcacatcatctgggaataaaatactactgttgagtaaatcagttattttttttatatcgatattgatggacatttttatagttaaggataataagtatcccaaagtcgataacgacgataacgaagtatttatacttttaggaaatcacaatgactttatcagattaaaattaacaaaattaaaggagcatgtatttttttctgaatatattgtgactccagatacatatggatctttatgcgtcgaattaaatgggtctagttttcagcacggcggtagatatatagaggtggaggaatttatagatgctggaagacaagttagatggtgttctacatccaatcatatatctaaagatatacccgaagatatgcacactgataaatttgtcatttatgatatttatacgtttgattcgttcaagaataaacgattggtattcgtacaggtacctccgtcgttaggagatgatagtcatttgactaatccgttattgtcaccgtattatcgtaattcagtagccagacaaatggtcaatgatatgatttttaatcaagattcatttttaaaatatttattagaacatctgattagaagccactatagagtttctaaacatataacaatagttagatacaaggataccgaagaattaaatctaacgagaatatgttataatagagataagtttaaggcgtttgtattcgcttggtttaacggcgtttcggaaaatgaaaaggtactagatacgtataaaaaggtatctaatttgatataatgaattcagtgactgtatcacacgcgccatatactattacttatcacgatgattgggaaccagtaatgagtcaattggtagagttttataacgaagtagccagttggctgctacgagacgagacgtcgcctattcctgataagttctttatacagttgaaacaaccgcttagaaataaacgagtatgtgtgtgtggtatagatccgtatccgaaagatggaactggtgtaccgttcgaatcaccaaattttacaaaaaaatcaattaaggagatagcttcatctatatctagattaaccggagtaattgattataaaggttataaccttaatataatagacggggttataccctggaattattacttaagttgtaaattaggagaaacaaaaagtcacgcgatttactgggataagatttccaagttactgctgcagcatataactaaacacgttagtgttctttattgtttgggtaaaacagatttctcgaatatacgggccaagttagaatccccggtaactaccatagtcggatatcatccagcggctagagaccgccaattcgagaaagatagatcatttgaaattatcaacgttttactggaattagacaacaaggcacctataaattgggctcaagggtttatttattaatgctttagtgaaattttaacttgtgttctaaatggatgcggctattagaggtaatgatgttatctttgttcttaagactataggtgtcccgtcagcgtgcagacaaaatgaagatccaagatttgtagaagcatttaaatgcgacgagttagaaagatatattgagaataatccagaatgtacactattcgaaagtcttagggatgaggaagcatactctatagtcagaattttcatggatgtagatttagacgcgtgtctagacgaaatagattatttaacggccattcaagattttattatcgaggtgtcaaactgtgtagctagattcgcgtttacagaatgcggcgccattcatgaaaatgtaataaaatccatgagatctaatttttcattgactaagtctacaaatagagataaaacaagttttcatattatctttttagatacgtataccactatggatacattgatagctatgaaacgaacactattagaattaagtagatcatctgaaaatccactaaccagatcgatagacactgccgtatataggagaaaaacaactcttcgggttgtaggtactaggaaaaatccaaattgcgacactattcatgtaatgcaaccaccgcatgataatatagaagattacctattcacttacgtggatatgaacaacaatagttattacttttctctacaacaacgattggaggatttagttcctgataagttatgggaaccagggtttatttcattcgaagacgctataaaaagagtttcaaaaatattcattaattctataataaactttaatgatctcgatgaaaataattttacaacggtaccactggtcatagattacgtaacaccttgtgcattatgtaaaaaacgatcgcataaacatccgcatcaactatcgttggaaaatggtgctattagaatttacaaaactggtaatccacatagttgtaaagttaaaattgttccgttggatggtaataaactgtttaatattgcacaaagaattttagacactaactctgttttattaaccgaacgaggagaccatatagtttggattaataattcatggaaatttaacagcgaagaacccttgataacaaaactaattttgtcaataagacatcaactacctaaggaatattcaagcgaattactctgtccaagaaaacgaaagactgtagaagctaacatacgagacatgttagtagattcagtggagaccgatacctatccggataaacttccgtttaaaaatggtgtattggacctggtagacggaatgttttactctggagatgatgctaaaaaatatacgtgtactgtatcaaccggatttaaatttgacgatacaaagttcgtcgaagacagtccagaaatggaagagttaatgaatatcattaacgatatccaaccattaacggatgaaaataagaaaaatagagagctatatgaaaaaacattatctagttgtttatgcggtgctaccaaaggatgtttaacattcttttttggagaaactgcaactggaaagtcgacaaccaaacgtttgttaaagtctgctatcggtgacctgtttgttgagacgggtcaaacaattttaacagatgtattggataaaggacctaatccatttatcgctaacatgcatttgaaaagatctgtattctgtagcgaactacctgattttgcctgtagtggatcaaagaaaattagatctgacaatattaaaaagttgacagaaccttgtgtcattggaagaccgtgtttctccaataaaattaataatagaaaccatgcgacaatcattatcgatactaattacaaacctgtttttgataggatagataacgcattaatgagaagaattgccgtcgtgcgattcagaacacacttttctcaaccttctggtagagaggctgctgaaaataatgacgcgtacgataaagtcaaactattagacgaggggttagatggtaaaatacaaaataatatatatagatttgcatttctatacttgttggtgaaatggtacaaaaaatatcatgttcctattatgaaactatatcctacacccgaagagattcctgactttgcattctatctcaaaataggtactctgttggtatctagctctgtaaagcatattccattaatgacggacctctccaaaaagggatatatattgtacgataatgtggtcactcttccgttgactactttccaacagaaaatatccaagtattttaattctagactatttggacacgatatagagagcttcatcaatagacataagaaatttgccaatgttagtgatgaatatctgcaatatatattcatagaggatatttcatctccgtaaatatatgctcatatatttatagaagatatcacatatctaaatgaataccggaatcatagatttatttgataatcatgttgatagtataccaactatattacctcatcagttagctactctagattatctagttagaactatcatagatgagaacagaagcgtgttattgttccatattatgggatcaggtaaaacaataatcgctttgttgttcgccttggtagcttccagatttaaaaaggtttacattctagtgccgaacatcaacatcttaaaaattttcaattataatatgggtgtagctatgaacttgtttaatgacgaattcatagctgagaatatctttattcattccacaacaagtttttattctcttaattataacgataacgtcattaattataacggattatctcgctacaataactctatttttatcgttgatgaggcacataatatctttgggaataatactggagaacttatgaccgtgataaaaaataaaaacaagattccttttttactattgtctggatctcccattactaacacacctaatactctgggtcatattatagatttaatgtccgaagagacgatagattttggtgaaattattagtcgtggtaagaaagtaattcagacacttcttaacgaacgcggtgtgaatgtacttaaggatttgcttaaaggaagaatatcatattacgaaatgcctgataaagatctaccaacgataagatatcacggacgtaagtttctagatactagagtagtatattgtcacatgtctaaacttcaagagagagattatatgattactagacgacagctatgttatcatgaaatgtttgataaaaatatgtataacgtgtcaatggcagtattgggacaacttaatctgatgaataatttagatactttatttcaggaacaggataaggaattgtacccaaatctgaaaataaataatggcgtgttatacggagaagaattggtaacgttaaacattagttccaaatttaaatactttattaatcggatacagacactcaacggaaaacattttatatacttttctaattctacatatggcggattggtaattaaatatatcatgctcagtaatggatattctgaatataatggttctcagggaactaatccacatatgataaacggcaaaccaaaaacatttgctatcgttactagtaaaatgaaatcgtctttagaggatctattagatgtgtataattctcctgaaaacgatgatggtagtcaattgatgtttttgttttcatcaaacattatgtccgaatcctatactctaaaagaggtaaggcatatttggtttatgactatcccagatactttttctcaatacaaccaaattcttggacgatctattagaaaattctcttacgccgatatttctgaaccagttaatgtatatcttttagccgccgtatattccgatttcaatgacgaagtgacgtcattaaacgattacacacaggatgaattaattaatgttttaccatttgacatcaaaaagctgttgtatctaaaatttaagacgaaagaaacgaatagaatatactctattcttcaagagatgtctgaaacgtattctcttccaccacatccatcaattgtaaaagttttattgggagaattggtcagacaatttttttataataattctcgtattaagtataacgataccaagttacttaaaatggttacatcagttataaaaaataaagaagacgctaggaattacatagatgatattgtaaacggtcacttctttgtatcgaataaagtatttgataaatctcttttatacaaatacgaaaacgatattattacagtaccgtttagactttcctacgaaccatttgtttggggagttaactttcgtaaagaatataacgtggtatcttctccataaaactgatgagatatataaagaaataaatgtcgagctttgttaccaatggatacctttccgttacattggaaccacacgagctgacgttagacataaaaactaatattaggaatgccgtatataagacgtatctccatagagaaattagtggtaaaatggccaagaaaatagaaattcgtgaagacgtggaattacctctcggcgaaatagttaataattctgtagttataaacgttccgtgtgtaataacctacgcgtattatcacgttggggatatagtcagaggaacattaaacatcgaagatgaatcaaatgtaactattcaatgtggagatttaatctgtaaactaagtagagattcgggtactgtatcatttagcgattcaaagtactgcttttttcgaaatggtaatgcgtatgacaatggcagcgaagtcactgccgttctaatggaggctcaacaaggtatcgaatctagttttgtttttctcgcgaatatcgtcgactcataaaaaagagaatagcggtaagtataaacacgaatactatggcaataattgcgaatgttttattctcttcgatatatttttgataatatgaaaaacatgtctctctcaaatcggacaaccatctcataaaatagttctcgcgcgctggagaggtagttgccgctcgtataatctctccagaataatatacttgcgtgtcgtcgttcaatttatacggatttctatagttctctgttatataatgcggtttgccctcatgattagacgacgacaatagtgttctaaatttagatagttgatcagaatgaatgtttattggcgttggaaaaattatccatacagcgtctgcagagtggttgatagttgttcctagatatgtaaaataatccaacttactaggcagcaaattgtctagataaaatactgaatcaaacggtgcagacgtattggcggatctaatggaatccaattgattaactatcttttgaaaatatacatttttatgatccaatacttgtaagaatatagaaataatgataagtccatcatcgtgtttttttgcctcttcataagaactatattttttcttattccaatgaacaagattaatctctccagagtatttgtacacatctatcaagtgattggatccataatcgtcttcctttccccaatatatatgtagtgatgataacacatattcattggggagaaaccctccacttatatatcctcctttaaaattaatccttactagttttccagtgttctggatagtggttggtttcgactcattataatgtatgtctaacggcttcaatcgcgcgttagaaattgcttttttagtttctatattaataggagatagttgttgcggcatagtaaaaatgaaatgataactgtttaaaaatagctcttagtatgggaattacaatggatgaggaagtgatatttgaaactcctagagaattaatatctattaaacgaataaaagatattccaagatcaaaagacacgcatgtgtttgctgcgtgtataacaagtgacggatatccgttaataggagctagaagaacttcattcgcgttccaggcgatattatctcaacaaaattcagattctatctttagagtatccactaaactattacggtttatgtactacaatgaactaagagaaatctttagacggttgagaaaaggttctatcaacaatatcgatcctcactttgaagagttaatattattgggtggtaaactagataaaaaggaatctattaaagattgtttaagaagagaattaaaagaggaaagtgatgaacgtataacagtaaaagaatttggaaatgtaattctaaaacttacaacacgggataaattatttaataaagtatatataagttattgcatggcgtgttttattaatcaatcgttggaggatttatcgcatactagtatttacaatgtagaaattagaaagattaaatcattaaatgattgtattaacgacgataaatacgaatatctgtcttatatttataatatgctagttaatagtaaatgaacttttacagatctagtataattagtcagattattaagtataatagacgactagctaagtctattatttgcgaggatgactctcaaattattacactcacggcattcgttaaccaatgcctatggtgtcataaacgagtatccgtgtccgctattttattaactactgataacaaaatattagtatgtaacagacgagatagttttctctattctgaaataattagaactagaaacatgtttagaaagaaacgattatttctgaattattccaattatttgaacaaacaggaaagaagtatactatcgtcatttttttctctagatccagctactactgataatgatagaatagacgctatttatccgggtggcatacccaaaaggggtgagaatgttccagagtgtttatccagggaaattaaagaagaagttaatatagacaattcttttgtattcatagacactcggttttttattcatggcatcatagaagataccattattaataaattttttgaggtaatcttctttgtcggaagaatatctctaacgagtgatcaaatcattgatacatttaaaagtaatcatgaaatcaaggatctaatatttttagatccgaattcaggtaatggactccaatacgaaattgcaaaatatgctctagatactgcaaaacttaaatgttacggccatagaggatgttattatgaatcattaaaaaaattaactgaggatgattgattaaaaaatataaattaatttaccatcgtgtatttttataacgggattgtccggcatatcatgtagatagttaccgtctacatcgtatactcgaccatctacgcctttaaatcctctatttattgacattaatctattagaattggaataccaaatattagtaccctcaattagtttattggtaatattttttttagacgatagatcgatggctcttgaaaccaaggttttccaaccggactcattgtcgatcggtgagaagtctttttcattagcatgaatccattctaatgatgtatgtttaaacactctaaacaattggacaaattcttttgatttgctttgaatgatttcaaataggtcttcgtctacagtaggcataccattagataatctagccattataaagtgcacgtttacatatctacgttctggaggagtaagaacgtgactattgagacgaatggctcttcctactatctgacgaagagacgcctcgttccatgtcatatctaaaatgaagatatcattaattgagaaaaaactaataccctcgcctccactagaagagaatacgcatgttttaatgcattctccgttagtgtttgattcttggttaaactcagccaccgccttgattctagtatcttttgttctagatgagaactctatattagagataccaaagactttgaaatatagtaataagatttctattcctgactgattaacaaatggttcaaagactagacatttaccatgggatgctaatattcccaaacatacatctataaatttgacgcttttctcttttaattcagtaaatagagagatatcagccgcactagcatcccctttcaatagttctccctttttaaaggtatctaatgcggatttagaaaactctctatctcttaatgaatttttaaaatcattatatagtgttgctatctcttgcgcgtattcgcccggatcacgattttgtctttcaggaaagctatcgaacgtaaacgtagtagccatacgtctcagaattctaaatgatgatatacctgtttttatttcagcgagtttagccttttgataaatttcttcttgctttttcgacatattaacgtatcgcattaatactgttttcttagcgaatgatgcagacccttctacgtcatcaaaaatagaaaactcgttattaactatatacgaacatagtcctcctagtttggagactaattctttttcatcgactagacgtttattctcaaatagcgattggtgttgtaaggatcctggtcgtagtaagttaaccaacatggtgaattcttgcacactattgacgataggtgtagccgataaacaaatcatcttatggttttttaacgcaatggtcttagataaaaaattatatactgaacgagtaggacggatcttaccatcttctttgattaatgatttagaaatgaagttatgacattcatcaataatgacgcatattctactcttggaattaatagttttgatattagtaaaaaatttatttctaaaattttgatcatcgtaattaataaaaatacaatccttcgttatctctggagcgtatctgagtatagtgttcatccaaggatcttctatcaaagcctttttcaccaataagataatagcccaattcgtataaatatccttaagatgtttgagaatatatacagtagtcattgttttaccgacacccgtttcatggaacaataaaagagaatgcatactgtctaatcctaagaaaactcttgctacaaaatgttgataatccttgaggcgtactacgtccgaccccatcatttcaacgggcatattagtagttctgcgtaaggcataatcgatataggccgcgtgtgatttactcatttatgagtgataagtaataactatgttttaaaaatcacagcagtagtttaactagtcttctctgatgtttgttttcgatactttttgaatcagaagtcatactagaataaagcaacgagtgaacgtaatagagagcttcgtatactctattcgaaaactctaagaacttattaatgaattccgtatccactggattgtttaaaatactaaattgaacactgttcacatccttccaagaagaagacttagtgacggacttaacatgagacataaataaatccaaattttttttacaaacatcactagccaccataatggcgctatctttcaaccagctatcgcttacgcattttagcagtctaacatttttaaagagactacaatatattctcatagtatcgattacacctctaccgaataaagttggaagtttaataatacaatatttttcgtttacaaaatcaaataatggtcgaaacacgtcgaaggttaacatcttataatcgctaatgtatagattgttttcagtgagatgattattagatttaatagcatctcgttcacgtttgaacagtttattgcgtgcgctgaggtcggcaactacggcgtccgctttagtactcctcccataatactttacgctattaatctttaaaatttcatagactttatctagatcgctttctggtaacatgatatcatgtgtaaaaagttttaacatgtcggtcggcattctatttagatcattaactctagaaatctgaagaaagtaattagctccgtattccagactaggtaatgggcttttacctagagacagattaagttctggcaatgtttcataaaatggaagaaggacatgcgttccctcccggatattttttacaatttcatccatttacaactctatagtttgttttcattattattagttattatctcccataatcttggtaatacttaccccttgatcgtaagataccttatacaggtcattacatacaactaccaattgtttttgtacataatagattggatggttgacatccatggtggaataaactactcgaacagatagtttatctttccccctagatacattagccgtaatagttgtcggcctaaagaatatctttggtgtaaagttaaaagttagggttcttgttccattattgctttttgtcagtagttcattataaattctcgagatgggtccgttctctgaatatagaacatcatttccaaatctaacttctagtctagaaataatatcggtcttattcttaaaatctattcccttgatgaagggatcgttaatgaacaaatccttggcctttgattcggctgatctattatctccgttatagacgttacgttgactagtccaaagacttacaggaatagatgtatcgatgatgttgatactatgtgatatgtgagcaaagattgttctcttagtggcatcactatatgttccagtaatggcggaaaactttttagaaatgttatatataaaagaattttttcgtgttccaaacattagcagattagtatgaagataaacactcatattatcaggaacattatcaatttttacatacacatcagcatcttgaatagaaacgataccatcttctggaacctctacgatctcggcagactccggataaccagtcggtgggccatcgctaacaataactagatcatccaacaatctactcacatatgcatctatataatctttttcatcttgtgagtaccctggatacgaaataaatttattatccgtatttccataataaggtttagtataaacagagagagatgttgccgcatgaacttcagttacagtcgccgttggttggtttatttgacctattactctcctaggtttctctataaacgatggtttaatttgtacattcttaaccatatatccaataaagctcaattcaggaacataaacaaattctttgttgaacgtttcaaagtcgaacgaagagtcacgaataacgatatcggatactggattgaaggttaccgttacggtaatttttgaatcggatagtttaagactgctgaatgtatcttccacatcaaacggagttttaatataaacgtatactgtagatggttctttaatagtgtcattaggagttaggccaatagaaatatcattaagttcactagaatatccagagtgtttcaaagcaattgtattattgatacaattattatataattcttcgccctcaatttcccaaataacaccgttacacgaagagatagatacgtgattaatacatttatatccaacatatggtacgtaactgaatcttcccatacctttaacttctggaagttccaaactcagaaccaaatgattaagcgcagtaatatactgatccctaatttcgaagctagcgatagcctgattgtctggaccatcgtttgtcataactccggatagagaaatatattgcggcatatacaaagttggaatttgactatcgactgcgaagacattagaccgtttaatagagtcatccccaccgatcaaagaattaatgatagtattattcattttctatttaaaatggaaaaagcttacaataaactccgtagagaaatatctataatttgtgagttttccttaaagtaacagcttccgtaaacgccgtctttatctcttagtaggtttattgtatttatgaccttttccttatcttcatagaatactaaaggcaacaaagaaatttttggttcttctctaagagctacgtgagacttaaccatagaagccaacgaatccctacatattttagaacagaaataccctacttcaccacccttgtatgtctcaatactaataggtctaaaaaccaaatcttgattacaaaaccaacacttatcaattacactatttgtcttaatagacacatctgccatagatttataatactttggtagtatacaagcgagtgcttcttctttagcgggcttaaagactgctttaggtgctgaaataaccacatctggaaggcttactcgcttagccatttaattacggaactatttttttatacttctaatgagcaagtagaaaacctctcatctacaaaaacgtactcgtgtccataatcctctaccatagttacacgttttttagatctcatatgtgctaaaaagttttcccatactaattggttactattatttttcgtataatttttaacagtttgaggttttagatttttagttacagaagtgatatcgaatattttatccaaaaagaatgaataattaattgtcttagaaggagtgttttcttggcaaaagaataccaagtgcttaaatatttctactacttcattaatcttttctgtactcagattcagtttctcatcttttacttgattgattatttcaaagactaacttataatcctttttatttattctctcgttagccttaagaaaactagatacaaaatttgcatctacatcatccgtggatatttgatttttttccatgatatccaagagttccgagataatttctccagaacattgatgagacaataatctccgcaatacatttctcaaatgaataagtttattagacacgtggaagtttgactttttttgtacctttgtacatttttgaaataccgactcgcaaaaaatacaatattcatatccttgttcagatactataccgttatgtctacaaccgctacataatcgtagattcatgttaacactctacgtatctcgtcgtccaatattttatataaaaacattttatttctagacgttgccagaaaatcctgtaatatttttagttttttgggctgtgaataaagtatcgccctaatattgttaccgtcttccgccaatatagtagttaaattatccgcacatgcagaagaacaccgcttaggcggattcagtacaatgttatatttttcgtaccaactcatttaaatatcataatctaaaatagttctgtaatatgtctagcgctaatatattgatcataatcctgtgcataaattaagatacaacaatgtctcgaaatcatcgacatggcttcttccatagttagaagatcgtcgtcaaagttagcaacgtgattcatcaacatttgctgttttgaggcagcaaatactgaaccgtcgccattcaaccattcataaaaaccatcgtctgaatccattgataatttcttgtactggtttttgagagctcgcatcaatctagcatttctagctcccggattgaaaacagaaagaggatcgtacatccagggtccattttctgtaaatagaatcgtataatgtcccttcaagaagatatcagacgatccacaatcaaagaattggtctccgagtttgtaacaaactgcggactttaacctatacatgataccgtttagcataatttctggtgatacgtcaatcggagtatcatctattagagatctaaagccggtgtaacattctccaccaaacatattcttattctgacgtcgttctacataaaacatcattgctccattaacgataacaggggaatgaacagcactacccatcacattagttcccaatggatcaatgtgtgtaactccagaacatcttccatagcctatgttaggaggagcgaacaccactcttccactattgccatcgaatgccatagaataaatatccttggaattgatagaaatcggactgtcggatgttgtgatcatcttcataggattaacaactatgtatggtgccgcctgaagtttcatatcgtaactgatgccgtttataggtctagccacagaaaccaacgtaggtctaaatccaactatagacaaaatagaagccaatatctgttcctcatctgtcataacttgagagcatccagtatgaataatcttcattagatggggatctaccgcatcatcatcgttacaataaaaaattcccattctaatgttcataattgcttttctaatcatggtatgcatgtttgctctctgaatctctgtggaaattagatctgatacacctgtaatcactatcggattatcctccgtaagacgattaaccaacaacatataattataagactttacttttctaaattcataaagttgctggattaggctataggtgtctccatgtacatacgcgttctcgagcgcaggaagtttaataccgaatagtgccatcagaataggatgaatatagtaattagtttctggttttctataaataaaagacaaatcttgtgaactagacatatcggtaaaatgcatggattggaatcgtgtagtcgacagaagaatatgatgattagatggagagtatattttatctaactctttgagttggtcaccgattctaggactagctcgagaatgaataagtactaaaggatgagtacatttcacagaaacactagcattgttcaatgtgctctttacatgggtaaggagttgaaatagctcgtttctatttgttctgacaatatttagtttattcataatgttaagcatatcctgaatagtaaagttagatgtgtcatacttgttagtagttagatatttagcaattgcattcccatcatttctcaatctcgtactccaatcatgcgtggatgctacttcgtcgatggaaaccatacaatcctttttgataggctgttgagattgatcatttcctgcacgtttaggtttggtacgttgatttctagcccctgcggatataaagtcatcgtctacaatttgggacaatgaattgcatacactacaagacaaagatttatcagaagtgtgaatatgatcttcatctaccaaagaaagagtttgattagtataactagattttagtcctgcgttagatgttaaaaaaacatcgctattgaccacggcttccattatttatattcgtagtttttactcgaaagcgtgattttaatatccaatcttattacttttggaatcgttcaaaacctttgactagttgtagaatttgatctattgccctacgcgtatactcccttgcatcatatacgttcgtcaccagatcgtttgtttcggcctgaagttggtgcatatctctttcaacattcgacatgagatccttaagggccatatcgtctagattttgttgagatgctgctcctggatttggattttgttgtgctgttgtacatactgtaccaccagtaggtgtaggagtacatacagtggccacaataggaggttgagaaagtgtaaccgttggagtagtacaagaaatacttccatccgattgttgtgtacatgtagttgttggtaacgtctgagaaggttgggtagatggcggcgtcgtcgttttttgatctttattaaatttagagataatatcctgaacagcattgctcggcgtcaacgctggaaggagtgaactcgccggcgcatcagtatcttcagacagccaatcaaaaagattagacatatcagatgatgtattagtttgttgtcgtggttttggtgtaggagcagtactactaggtagaagaataggagccgatgtagctgttggaaccggctgtggagttatatgaatagttggttgtagcggttggataggctgtctgctggcggccatcatattatctctagctagttgttctcgcaactgtctttgataatacgactcttgagactttagtcctatttcaatcgcttcatcctttttcgtatccggatccttttcttcagaataatagattgacgactttggtgtagaggattctgccagcctctgtgagaacttgttaaagaagtccatttaaggctttaaaattgaattgcgattataagattaaatggcagacacagacgatattatcgactatgaatccgatgatctcaccgaatacgaggatgatgaagaagaggaagaagatggagagtcactagaaactagtgatatagatcccaaatcttcttataagattgtagaatcagcatccactcatatagaagatgcgcattccaatcttaaacatatagggaatcatatatctgctcttaaacgacgctatactagacgtataagtctatttgaaatagcgggtataatagcagaaagctataacttgcttcaacgaggaagattacctctagtttcagaattttctgacgaaacgatgaagcaaaatatgctacatgtaattatacaagagatagaggagggttcttgtcctatagtcatcgaaaagaacggagaattgttgtcggtaaacgattttgacaaagatggtctaaaattccatctagactatattatcaaaatttggaaacttcaaaaacgatattagaatttatacgaatatcgttctctaaatgtcacaatcaagtctcgcatgttcagcaatttattgtcgtactttatatcgtgttcattaacgatatcttgcaaaatagtaatgattctatcttccttcgatagatattcttcagagattattgtcttatattctttcttgttatcagatatgaatttgataagactttgaacattattgatacccgtctgtttaattttttctacagatattttagttttggcagattctatcgtatctgtcaatagacatccaacatcgacattcgacgtcaattgtctataaatcaacgtataaattttagaaataacattagcgaattgttgtgcgttgatgtcgttattctgaaacagtatgattttaggtagcattttcttaacaaagagaacgtatttattgttactcagttgaacagatgatatatccagattactaacgcatctgattccgtataccaaactttcagaagaaatggtatacaattgtttgtattcattcaatgtctctttttcagaaattagtttagagtcgaatactgcaataattttcaagagatagttttcatcagataagattttatttagtgtagatatgataaaactattgttttgttggagaacttgatacgccgcgttctctgtagtcgacgctctcaaatgggaaacaatctccattatttttttggaatcggatactatatcttcggtatcttgacgcagtctagtatacatagagttaagagagattagagtttgtacattaagcaacatgtctctaaatgtggctacaaacttttcctttttcacatcatctagtttattatataccgatttcacaacggcaccagatttaaggaaccagaatgaaaaactctgataactacaatatttcatcatagttacgattttatcatcttctatagttggtgtaatagcgcatacctttttctccaagactggaaccaacgtcataaaaatgtttaaatcaaaatccatatcaacatctgatgcgctaagaccagtctcgcgttcaagattatctttactaatggtgacgaactcatcgtataaaactctaagtttgtccattatttatttacagatttagttgtttaatttatttgtgctcttccagagttgggatagtatttttctaacgtcggtattatattattaggatctacgttcatatgtatcataatattaatcatccacgttttgataaatctatctttagcttctgaaataacgtatttaaacaaaggagaaaaatatttagctacggcatcagacgcaataacattttttgtaaatgtaacgtatttagacgacagatcttcgttaaaaagttttccatctatgtagaatccatcggttgttaacaccattcccgcgtcagattgaataggagtttgaatagtttgttttggaaatagatccttcaataacttatagttgggtgggaaaaaatcgattttatcactagactctttcttttttactatcattacctcatgaactatttcttgaatgagtatatgtattttctttcctatatcggacgcgttcattggaaaatataccatgtcgttaactataagaatatttttatcctcgtttacaaactgaataatatcagatgtagttcgtaaacgaactatatcatcaccagcacaacatctaactatatgatatccactagtttcctttagccgtttattatcttgttccatattagcagtcattccatcatttaagaaggcgtcaaaaataatagggagaaatgacattttggattctgttacaactttaccaaaattaaggatatacggacttactatctttttctcaacgtcaatttgatgaacacacgatgaaaatgtgcttctatgagattgatcatgtagaaaacaacaagggatacaatatttccgcatatcatgaaatatattaagaaatcccaccttattatatttccccaaaggatccatgcacgtaaacattatgccgttatcattaataaagacttctttctcatcggatctgtaaaagttgttactgatttttttcattccaggatctagataattaataatgatgggttttctattcttattctttgtattttggcatatcctagaccagtaaacagtttccactttggtaaaatcagcagacttttgaacgctattaaacatggcattaatggcaataactaaaaatgtaaaatatttttctatgttaggaatatggtttttcactttaatagatatatggtttttggccaaaatgatagatatttttttatccgaggatagtaaaatattattagtcgccgtctctataaaaatgaagctagtctcgatatccaattttattctagaattgataggagtcgccaaatgtaccttatacgttatatctcccttgatgcgttccatttgtgtatctatatcggacacaagatctgtaaatagttttacgttattaatcatcacggtatcgccgtcgctagataacgctaatgtaccatccaagtcccaaatggagagatttaactgttcatcgtttagaataaaatgattaccggtcatattaataaagtgttcatcgtatctagataacaacgacttataattaatgtccaagtcttgaactcgctgaatgatcttttttaacccagttagttttagattggtacgaaatatattgttaaactttgattctacagtaatgtccaaatctagttgtggaaatacttccatcaacattgtttcaaacttgataatattattatctacatcttcgtacgatccaaattccggaatagatgtatcgcacgctctggccacccagataaccaaaaagtcacacgctccaggatatacattgtataaaaagctatcgttttttagtagggtttttttctgcgtgtatacgaagggattaaaaatagtattatcaacgtaactatattccaaattattcttatgagaatagataataatatcgtccttaatatctaacaaatttcctaaatatccctttaattgagtcattcgaagcgtcaatagaatatgtctcttaactatttccggctgttgtatatttaaatgacttcgtaaaaaataatatatgggcgacttctcatctatgtaatcatatggagtgagatatagggctcgttctacctcctgccccttacccacctgtaataccaattgcggacttactatatatcgcatatttatatcgtggggtaaagtgaaaatctactaccgatgatgtaagtcttacaatgttcgaaccagtaccagatcttaatttggaggcctccgtagaactaggggaggtaaatatagatcaaacaacacctatgataaaggagaatagcggttttatatcccgcagtagacgtctattcgcccatagatctaaggatgatgagagaaaactagcactacgattctttttacaaagactttattttttagatcatagagagattcattatttgttcagatgcgttgacgctgtaaaagacgtcactattaccaaaaaaaataacattatcgtggcgccttatatagcacttttaactatcgcatcaaaaggatgcaaacttacagaaacaatgattgaagcattctttccagaactatataatgaacatagtaagaaatttaaattcaactctcaagtatccatcatccaagaaaaactcggataccagtttggaaactatcacgtttatgattttgaaccgtattactctacagtagctctggctattcgagatgaacattcatctggcatttttaatatccgtcaagagagttatctggtaagttcattatctgaaataacatatagattttatctaattaatctaaaatctgatcttgttcaatggagtgctagtacgggcgctgtaattaatcaaatggtaaatactgtattgattacagtgtatgaaaagttacaactggtcatagaaaatgattcacaatttacatgttcattggctgtggaatcaaaacttccaataaaattacttaaagatagaaatgaattatttacaaaattcattaacgagttaaaaaagaccagttcattcaagataagcaaacgcgataaggatacgctactaaaatattttacttaggactggagttagaatttatagacgactcatttcgtttatcattgttactattattactattactatcattattagtgttggcattattagtattcttcttgtcatcttgttcagaaatatacagcaatgctatacctaatactaaatacattatcatgctcgcaatggctctaacaacaacgaaccaaaatgaatttggtcgtagcttttgttcacaaaaatacataaagaaatgtctacataaatctatggcgccattggctacttgaaatagcgccagtcctcctacagattttaatatagctgtataacatgacatttattcatcatcaaaagagacagagtcaccatctgtcatatttagattttttttcatgtgttcaaagtatcctctactcatttcattataatagtttatcatacttagaattttaggacggatcaatgagtaagacttgactagatcgtcagtagtaatttgtgcatcgtctattctgcatccgcttcgtcgaataatgtatagcatcgctttgagattctccatagctatcaagtctttatacaatgacatggaaatatctgtgaatactttatacttctccaacatcgatgccttaacatcatcgcctactttagcattgaaaatacgttctattgtgtagatggatgtagcaagatttttaaacaacaatgccatcttacacgatgattgcctcaagtctccaatcgtttgtttagaacgattagctacagagtccaatgcttggctgactagcatattattatctttagaaattgtattcttcaatgaggcgtttatcatatctgtgatttcgttagtcatattacagtctgactgggttgtaatgttatccaacatatcacctatggatacggtacacgtaccagcatttgtaataatcctatctaagatgttgtatggcattgcgcagaaaatatcttctcctgtaatatctccactctcgataaatctactcagattattcttaaatgccttattctctggagaaaagatatcagtgtccatcatttcattaatagtatacgcagaaaagataccacgagtatcaattctatccaagatacttatcggttccgagtcacagataatggtttcctctccttcgggagatcctgcatagaaatatctaggacaatagtttctatactgtctgtaactctgataatctctaaagtcactaactgataccatgaaattgagaagatcaaacgctgaagtaattaatttttctgcctcgtttttactacaactagttttcatcaatgtagtgacgatgtattgtttagttacttttggtctaatactgatgatagagatattattgcttcccataatggatcttctagtagtcaccttaaagcccattgatgcgaatagcagatagataaagtcttggtatgactcctttctaatatagtacggactacctttgtcacccaactttatacccacataagccataacaacctctttaatagccgtttcatgaggtttatcagccatgagcctgagtagttggaagaatctcatgaatcccgtctcagaaagtcctatatgcatgatagatttatctttcctgggaaactctcgtatagtcatagatgaaatactctttaaagtttctgaaataagattagtaacagtcttacctccgactactctaggtaacaaacaaactctaataggtgttttctctgcggagataatatcagaaaggatagagcaataagtagtattattgtgattataaagaccgaatacataacaggtagaatttataaacatcatgtcctgaaggtttttagacttgtattcctcgtaatccataccgtcccaaaacatggatttggtaactttgatagccgtagatctttgttccttcgccaacaggttaaagaaattaataaagaatttgttgtttctatttatgtccacaaattgcacgtttggaagcgccacggttacattcactgcagcattttgaggatcgcgagtatgaagtacgatgttattgtttactggtatatctggaaagaaatctaccagtctaggaataagagattgatatcgcatagaaatagtaaagtttataatctcatcatcgaagagcattttgttaccattgtaataaatatccactctgtcatatgtataaatgaagtactgttcaaacatgatgagatgtttatatgttggcatagtagtgagatcgacgtttggtaatggcaatgtattaagattaactccataatgtctagcagcatctgcgatgttataagcgtcgtcaaagcggggtcgatcttgtattgttatatattgtctaacacctataagattatcaaaatcttgtctgcttaatacaccgttaacaatttttgccttgaattcttttattggtgcattaataacatccttatagaggatgttaaacaaataagtgttatcaaagttaagatctggatatttcttttctgctagaacatccattgagtcggagccatctggtttaatataaccaccgataaatctagctctgtattctgtatccgtcaatctaatattaagaaggtgttgagtgaaaggtggaagatcgtaaaagctgtgagtattaatgataggattagtttccgaactaatgttaattggggtattaataatatctatatttccagcgttaagtgtaacattaaacagttttaattcacgtgacgtggtatcaattaaataattaatgcccaatttggatatagcagcctgaagctcatcttgtttagttacggatcctaatgagttattaagcaatatatcgaacggatgaacgaaggttgttttaagttggtcacatactttgtaatctagacatagatgcggaagaacggtagaaactatacgaaataaatattcagagtcctctaattgatcaagagtaactattgacttaataggcatcatttatttagtattaaatgacgaccgtaccagtgacggatatacaaaacgatttaattacagagttttcagaagataattatccatctaacaaaaattatgaaataactcttcgtcaaatgtctattctaactcacgttaacaacgtggtagatagagaacataatgccgccgtagtgtcatctccagaggaaatatcctcacaacttaatgaagatctatttccagatgatgattcaccggccactattatcgaacgagtacaacctcatactactattattgacgatactccacctcctacgtttcgtagagagttattaatatcggaacaacgtcaacaacgagaaaaaagatttaatattacagtatcgaaaaatgctgaagcaataatggaatctagatctatgataacttctatgccaacacaaacaccatccttgggagtagtttatgataaagataaaagaattcagatgttagaggatgaagtggttaatcttagaaatcaacgatctaatacaaaatcatctgataatttagataattttaccaaaatactatttggtaagactccgtacaaatcaacagaagttaataagcgtatagccatcgttaattatgcaaatttgaacgggtcccccttatcagtcgaggacttggatgtttgttcggaggatgaaatagatagaatctataaaacgattaaacaatatcacgaaagtagaaaacgaaaaattatcgtcactaacgtgattattattgtcataaacattatcgagcaggcattgctaaaactcggatttgaagaaatcaaaggactgagtaccgatatcacttcagaaattatcgatgtggagatcggagatgactgcgatgctgtagcatctaaactaggaatcggtaacagtccggttcttaatattgtattgtttatactcaagatattcgttaaacgaattaaaattatttaatttaatacattcccatatccagacaacaatcgtctggattaatctgttcctgtcgtctcataccggacgacatattaatctttttattagtgggcatctttttagatggtttctttttcccagcattaactgagtcgatacctagaagatcgtgattgatctctccgaccattccacgaacttctaattggccgtctctgacggtaccataaactattttaccagcattagtaacagcttggacaatctgaccatccatcgcattgtacgatgtagtagtaactgttgttctacgtctaggagcaccagaagtatttttggagcccttggatgttgatgtagaagaagacgaggattttgattttggtttacatgtaatacattttgaactctttgattttgtatcacatgcgccggcagtcacatctgtttgagaattaagattattgttgcctcctttgacggctgcatctccaccgatttgcgctagtagatttttaagctgtggtgtaatcttattaactgtttcgatataatcatcgtaactgcttctaacggctaaattttttttatccgccatttagaagctaaaaatatttttatttatgcagaagatttaactagattatacaatgaactaatatgatccttttccagattatttacaaacttggtattttttggttctggaggaggcgaatttaaattcggacttggattcggattttgtaagttcttgatcttattatacatcgagtataggatggcgacagtaactgctacacaaataccgatcaaaagaagaataccaatcatttattgacaataacttcactattgatcaagtatgcaatatatcatcttttcactaaataagtagtaataatgattcaacaatgtcgagatatatggacgataataatttagttcatggaaatatcgctatgattggtgtgaatgactccgctaactctgtggggtgcgcagtgctttccccacatagaataaattagcattccgactgtgataataataccaagtataaacgccataatactcaatactttccatgtacgagtgggactggtagacttactaaagtcaataaaggcgaagatacacgaaagaatcaaaagaatgattccagcgattagcacgccggaaaaataatttccaatcataagcatcatgtccatttaactaataaaaattttaaatcgccgaatgaacaaagtggaatataaaccatataaaaacaatagtttgtactgcaaaaataatatctatttttgttttcgaagatatggtaaaattaaatagtagtacacagcatgttataactaacagcagcaacggctcgtaattacttatcatttactagacgaaaaggtggtgggatattttcttgctcaaataatacgaatatatcacccatccattttatgcgatgtttatatactctaatctttaatagatctatagacgacgggtttaccaacaatatagattttatcgattcatctaatttaaacccttccttaaacgtgaatgatctattatctggcataacgatgaccctacctgatgaatcggacaatgtactgggccatgtagaataaattatcaacgaattatcgtctacgaacatttatatcatttgttttaattttaggacgcgaataaatggatataaaatagaaaataacagatattacaaccagtgttatggccgcgcccaaccaggtaggcagttttattttatcttttactacaggttctcctggatgtacgtcaccaacggcggacgtagttctagtacaattagacgtaagttccgcttgggaattttttaacgctaaagagttaacgttaatcgtgcacccaacgtatttacatctagttcgttgaacatcttgattataatataaccattttctatctctagattcgtcagtgcactcatgtaaccaacataccctaggtcctaaatatttatctccggaattagattttggataattcgcgcaccaacaatttctatttcctttatgatcgttacaaaagacgtataatgccgtatccccaaaagtaaaataatcaggacgaataattctaataaactcagaacaatatctcgcatccatatgtttggagcaaatatcggaataagtagacatagccggtttccgttttgcacgtaaccattctaaacaattggggtttccaggatcgtttctacaaaatccagtcatgaaatcgtcacaatgttctgtcttgtaattattattaaatatttttggacagtgtttggtatttgtcttagaacaacattttgccacgctatcactatcgcccaggagataatccttttttataaaatgacatcgttgcccggatgctatataatcagtagcgtgttttaaatccttaatatattcaggagttacctcgttctgataatagattaatgatccaggacgaaatttgaaagaactacatggttctccatgaattaatacatattgtttagcaaattcaggaactataaaactactacaatgatctatcgacataccatctatcaaacaaaacttgggtttaatttctcccggagatgtttcataatagtacgtataactttcttctgcaaacttaacagctctattatattcaggataattaaaacctaattccatatatttgtctcgtatatctgctattcctggtgctattttgattctattaagagtaacagctgcccccattcttaataatcgtcagtatttaaactgttaaatgttggtatatcaacatctaccttatttcccgcagtataaggtttgttgcaggtatactgttcaggaatggttacatttatacttcttctatagtcctgtctttcgatgttcatcacatatgcaaagaacagaataaacaaaataatgtaagaaataatattaaatatctgtgaattcgtaaatacattgattgccataataattacagcagctacaatacacacaatagacattcccacagtgttgccattacctccacgatacatttgagttactaagcaataggtaataactaagctagtaagaggcaatagaaaagatgagataaatatcatcaatatagagattagaggagggctatatagagccaagacgaacaaaatcaaaccgagtaacgttctaacatcattatttttgaagattcccaaataatcattcattcctccataatcgttttgcatcatacctccatctttaggcataaacgattgctgctgttcctctgtaaataaatctttatcaagcactccagcacccgcagagaagtcgtcaagcatattgtaatatcttaaataactcatttatatattaaaaaatgtcactattaaagatggagtataatctttatgccgaactaaaaaaaatgacttgtggtcaacccctaagtctttttaacgaagacggggatttcgtagaagttgaaccgggatcatcctttaagtttctgatacctaagggattttacgcctctccttccgtaaagacgagtctagtattcgagacattaacaacgaccgataataaaatcactagtatcaatccaacaaatgcgccaaagttatatcctcttcaacgcaaagtcgtatctgaagtagtttctaatatgaggaaaatgatcgaatcaaaacgtcctctatacatcactcttcacttggcgtgtggatttggtaagactattaccacgtgttatcttatggctacacacggtagaaaaaccgtcatttgcgtacccaataaaatgttaatacatcaatggaagacacaggtagaggcagtcggattggaacataagatatccatagatggagtaagtagtctattaaaggaactaaagactcaaagtccggatgtattaatagtagtcagtagacatctgacaaacgatgccttttgtaaatatatcaataagcattatgatttgttcatcttggatgaatcacatacgtataatctgatgaacaatacagcagttacaagatttttagcgtattatcctccgatgatgtgttattttttaactgctacacctagaccatctaaccgaatttattgtaacagtattattaatattgccaagttatccaatctaaaaaaaactatctatgcagtagatagtttttttgagccatattccacagataatattagacatatggtaaaacgactagatggaccatctaataaatatcatatatataccgagaagttattatctgtagacgagcctagaaatcaacttattcttgataccctggtagaagaattcaagtcaggaactattaatcgcattttagttattactaaactacgtgaacatatggtattattctacaaacgattattagattttttcggaccagaggttgtatttataggagacgcccaaaatagacgtactccagatatggtcaaatcaatcaaggaactaaatagatttatattcgtatccaccttattttattccggtactggtttagatattcctagtttggattcgttgttcatttgctcggcagtaatcaacaatatgcaaatagagcaattactagggagggtatgtcgagaaacagaactattagataggacggtatatgtatttcctaacacatccatcaaagaaataaagtacatgataggaaatttcatgcaacgaattattagtctgtctgtagataaactaggatttaaacaaaaaagttatcggaaacatcaagaatccgatcccacttctgcatgtacaacatcatccagagaagaacgtgtattaaatagaatatttaactcgcaaaatcgttaagaagtttaagcgacgatccgcatgctgcgcaggccagtgtattacccctcatagtattaatataatccaatgatacttttgtgatgtcggaaatcttaaccaatttagactgacaggcagaacacgtcatgcaatcatcatcgtcatcgataactgtagtcttgggcttctttttgcgactcttcattccggaacgcacattggtgctatccatttaggtagtaaaaaataagtcagaatatgccctataacacgatcgtgcaaaacctggtatatcgtctctatctttatcacaatatagtgtatcgacatttttattattattgacctcgtttatcttggaacatggaatgggaacatttttgttatcaacggccatctttgccttaattccagatgttgtaaaattataactaaacagtctatcatcgacacaaatgaaattcttgtttagacgtttgtagtttacgtatgcggctcgttcgcgtctcattttttcagatattgcaggtactataatattaaaaataagaatgaaataacataggattaaaaataaagttatcatgacttctagcgctgatttaactaacttaaaagaattacttagtctgtacaaaagtttgagattttcagattctgcggctatagaaaagtataattctttggtagaatggggaacatctacttactggaaaataggcgtgcaaaaggtagctaatgtcgagacgtcaatatctgattattatgatgaggtaaaaaataaaccgtttaatattgatccgggctattacattttcttaccggtatattttgggagcgtctttatttattcgaagggtaaaaatatggtagaacttggatctggaaactcttttcaaataccagatgatatgcgaagtgcgtgtaacaaagtattagacagcgataacggaatagactttctgagatttgttttgttaaacaatagatggataatggaagatgctatatcaaaatatcagtctccagttaatatatttaaactagctagtgagtacggattaaacatacccaaatatttagaaattgaaatagaggaagacacattatttgacgacgagttatactctattatagaacgctctttcgatgataaatttccaaaaatatccatatcgtatattaagttgggagaacttagacggcaagttgtagactttttcaaattctcattcatgtatattgagtccatcaaggtagatcgtataggagataatatttttattcctagcgttataacaaaatcaggaaaaaagatattagtaaaagatgtagaccatttaatacgatccaaggttagagaacatacatttgtaaaagtaaaaaagaaaaacacattttccattttatacgactatgatggaaacggaacagaaactagaggagaagtaataaaacgaattatagacactataggacgagactattatgttaacggaaagtatttctctaaggttggtagtgcaggcttaaagcaattgactaataaattagatattaatgagtgcgcaactgtcgatgagttagttgatgagattaataaatccggaactgtaaaacgaaaaataaaaaaccaatcagcatttgatttaagcagagaatgtttgggatatccagaagcggattttataacgttagttaataacatgcggttcaaaatagaaaattgtaaggttgtaaatttcaatattgaaaatactaattgtttaaataacccgagtattgaaactatatatggaaactttaaccagttcgtctcaatctttaatgtcgtcaccgatgtcaaaaaaagattattcgagtgaaataatatgcgcctttgatataggtgcaaaaaatcctgccagaactgttttagaagtcaaggataactccgttagggtattggatatatcaaaattagactggagttctgattgggaaaggcgcatagctaaagatttgtcacaatatgaatacactacagttcttctagaacgtcagcctagaaggtcgccgtatgttaaatttatctattttattaaaggctttttatatcatacatcggctgccaaagttatttgcgtctcgcctgtcatgtctggtaattcatatagagatcgaaaaaagagatcggtcgaagcatttcttgattggatggacacattcggattgcgagactccgttccggatagacgcaaattagacgatgtagcggatagtttcaatttggctatgagatacgtattagataaatggaatactaattatacaccttataataggtgtaaatctagaaattacataaaaaaaatgtaataacgttagtaacgccattatggataatctatttacctttctacatgaaatagaagatagatatgccagaactatttttaactttcatctaataagttgcgatgaaataggagatatatatggtcttatgaaagaacgcatttcctcagaggatatgtttgataatatagtgtataataaagatatacatcctgccattaagaaactagtgtattgcgacatccaacttactaaacacattattaatcagaatacgtatccggtatttaacgattcttcacaagtgaaatgttgtcattatttcgacataaactcagataatagcaatattagctctcgtacagtagagatatttgagagggaaaagtcatctcttgtatcatatattaaaactaccaataagaagagaaaggtcaattacggcgaaataaagaaaactgttcatggaggcactaatgcaaattacttttccggtaaaaagtctgacgagtatctgagtactacagttagatccaacattaatcaaccttggatcaaaaccatctctaagaggatgagagttgatatcattaatcactctatagtaacgcgtggaaaaagctctatattacaaactatagaaattatttttactaatagaacatgtgtgaaaatattcaaggattctactatgcacattattctatccaaggacaaggatgaaaaggggtgtatacacatgattgacaaattattctatgtctattataatttatttctgttgttcgaagatatcatccaaaacgagtactttaaagaagtagctaatgttgtaaaccacgtactcacggctacggcattagatgagaaattattcctaattaagaaaatggctgaacacgatgtttatggagttagcaatttcaaaatagggatgtttaacctgacatttattaagtcgttggatcataccgttttcccctctctgttagatgaggatagcaaaataaagttttttaaggggaaaaagctcaatattgtagcattacgatctctggaggattgtataaattacgtgactaaatccgagaatatgatagaaatgatgaaggaaagatcgactattttaaatagcatagatatagaaacggaatcggtagatcgtctaaaagaattgcttctaaaatgaaaaaaaacactaattcagaaatggatcaacgactagggtataagtttttggtgcctgatcctaaagccggagttttttatagaccgttacatttccaatatgtatcgtattctaattttatattgcatcgattgcatgaaatcttgaccgtcaagcggccactcttatcgtttaagaataatacagaacgaattatgatagaaattagcaatgttaaagtgactcctccagattactcacctataatcgcgagtattaaaggtaagagttatgacgcattagccacgttcactgtaaatatctttaaagaggtaatgaccaaagagggtatatccatcactaaaataagtagttatgagggaaaagattctcatttgataaaaattccgctactaataggatacgggaataaaaatccacttgatacagccaagtatcttgttcctaatgtcataggtggagtctttatcaataaacaatctgtcgaaaaagtaggaattaatctagtagaaaagattacaacatggccaaaatttagggttgttaagccaaactcattcactttctcgttttcctccgtatcccctcctaatgtattaccgacaagatatcgccattacaagatatctctggatatatcacaattggaagcgttgaatatatcatcgacaaagacatttataacggtcaatattgttttgctgtctcaatatttatctagagtgagtctagaattcattagacgtagtttatcatacgatatgcctccagaagttgtctatctagtaaacgcgataatagatagtgctaaacgaattactgaatctattactgactttaatattgatacatacattaatgacctggtggaagctgaacacattaaacaaaaatctcagttaacgatcaacgagttcaaatatgaaatgctgcataactttttacctcatatgaactatacacccgatcaactaaagggattttatatgatatctttactaagaaagtttctctactgtatcttccacacttctagatatccagatagagattcgatggtttgtcatcgcatcctaacgtacggcaaatattttgagacgttggcacatgatgaattagagaattacataggcaacatccgaaacgatatcatgaacaatcacaagaacagaggcacttacgcggtaaacattcatgtactaacaactcccggacttaatcacgcgttttctagcttattgagtggaaagttcaaaaagtcagacggtagttatcgaacacatcctcactattcatggatgcagaatatttctattcctaggagtgttggattttatccggatcaagtaaagatttcaaagatgttttctgtcagaaaataccatccaagtcaatatctttacttttgttcatcagacgttccggaaagaggtcctcaggtaggtttagtatctcaattgtctgtcttgagttccattacaaatatactaacgtctgagtatttggatttggaaaagaaaatttgtgagtatatcagatcatattataaagatgatataagttactttgaaacaggatttccaatcactatagaaaatgctctagtcgcatctcttaatccaaatatgatatgtgattttgtaactgactttagacgtagaaaacggatgggattcttcggtaacttggaggtaggtattactttagttagggatcacatgaatgaaattcgcattaatattggagcgggaagattagtcagaccattcttggttgtggataacggagagctcatgatggatgtgtgtccggagttagaaagcagattagacgacatgacattctctgacattcagaaagagtttccgcatgtcatcgaaatggtagatatagaacaatttacttttagtaacgtatgtgaatcggttcaaaaatttagaatgatgtcaaaggatgaaagaaagcaatacgatttatgtgactttcctgccgaatttagagatggatatgtagcatcttcattagtgggaatcaatcacaattctggacccagagctattcttggatgtgctcaagctaaacaagctatctcttgtctgagctcggatatacgaaataaaatagacaatggaattcatttgatgtatccagagaggccaatcgtgattagtaaggctttagaaacttcaaagattgcggctaattgcttcggccaacatgttactatagcattaatgtcgtacaaaggtatcaatcaagaggatggaattatcatcaaaaaacaatttattcagagaggcggtctcgatattgttacagccaagaaacatcaagtagaaattccattggaaaactttaataacaaagaaagagataggtctaacgcctattcaaaattagaaagtaatggattagttagactgaatgctttcttggaatccggagacgctatggcacgaaatatctcatcaagaactcttgaagatgattttgctagagataatcagattagcttcgatgtttccgagaaatataccgatatgtacaaatctcgcgttgaacgagtacaagtagaacttactgacaaagttaaggtacgagtattaaccatgaaagaaagaagacccattctaggagacaaatttaccactagaacgagtcaaaagggaacagtcgcgtatgtcgcggatgaaacggaacttccatacgacgaaaatggtatcacaccagatgtcattattaattctacatccatcttctctagaaaaactatatctatgttgatagaagttattttaacagccgcatattctgctaagccgtacaacaataagggagaaaaccgacctgtctgttttcctagtagtaacgaaacatccatcgatacatatatgcaattcgctaaacaatgttatgagcattcaaatccgaaattgtccgatgaagaattatcggataaaatcttttgtgaaaagattctctatgatcctgaaacggataagccttatgcatccaaagtattttttggaccaatttattacttgcgtctgaggcatttaactcaggacaaggcaaccgttagatgtagaggtaaaaagacgaagctcattagacaggcgaatgagggacgaaaacgtggaggaggtatcaagttcggagaaatggagagagactgtttaatagcgcatggtgcagccaatactattacagaagttttgaaagattcggaagaagattatcaagatgtgtatgtttgtgaaaattgtggagacatagcagcacaaatcaagggtattaatacatgtcttagatgttcaaaacttaatctctctcctctcttaacaaaaattgataccacgcacgtatctaaagtatttcttactcaaatgaacgccagaggcgtaaaagtcaaattagatttcgaacgaaggcctccttcgttttataaaccattagataaagttgatctcaagccgtcttttctggtgtaatattctagtttggtagtagatacatatcaatatcatcaaattcgagatccgaattataaaatgggcgtggattgttaactatagaatcggacgtctgatattcgaaaatctgtggagtttcaggttttggtggaggtgtaactgctacttgggatactgaagtctgatattcagaaagctgtggatgttctggttcggcatccaccgatggtgtcacatcactaatcggttcggtaacgtctgtggatggaggtgctacttctacagaacctgtagcctcagttgtcaacggagatacatttttaatgcgagaaaatgtataatttggtaatggtttcttatgtggatctgaagaagaggtaagatatctactagaaagataccgatcacgttctagttctcttttgtagaacttaactttttctttctccgcatctagttgatattccaacctcttcacgttactacgttcagattccaattcacgttcgcatgggttacctccgcagtttttacgagcgatttcacgttcagccttcatgcgtctctccctctctctatcgagtttatcagagcagtctttctgaaggcgatcgaactccataaatttctccaacgctttgattgtttccatagatttccgaagttcagcttttaggactgtgattctttttctttcgaattcacagctggatgtacaaccgtttccattaccgccatctctaagtttcttttctagatcggcaacatttcatccccatgccttttacattcctcgagtctactgtcgtcgaaatatcgttccagctccttttcgacatcaataactttagcacgttgtctctcaagctctcttttgtagttatctgattccctggcacgtttaagatcttcatgcaattgagtcagctcttaacttcctctcttgcttcttcgtcatagtacgcgcaatcactgtgagatccattgttaccacgtctacactcggcgagctcgcgtttaagagattcaatttcccgtttgtattggtccatgtttccattgctaccaccattagatttacaggctgctagttgtcgttcgagatcagaaatacgggttttcttggaattgatttcgtcgatgtacttggcatcgaaacacttattaagttctttttccaattctacgattttatttctttcgcgagtcaattccctcctgtagtaactatctgttttgtcagattcacgctctctacgtagactttcttgcaagttactaatttgttccctagcacgtccgagtttagttttatatgctgaatagagttctgattcatcctttgagcagatctctagcgatcgtttaagattcctaattctagtctttagcctatttacctcctcagaagatgttccgttaccgttgcgtttacactcgttaagctgtctatcaagatccatgattctatctctaagacgttgcatctctctttccatatcagcattgctttcattattacgtctgcagtcactcaactgtctttcaatatctgagattctatctctaagacgtcgcatctctctctgtttcggcattggtttcattattacgtttacagtcgttcaactgtctttcaagatctgatattctagattggagtctgctaatctctgtagcattttcacggcattcactcagttgtctttcaagatctgaaattttagattggagtctgctaatctctgtaagatttcctcctccgctctcgatgcagtcggtcaacttattctctagttctctaatacgcgaacgcagtgcatcaacttcttgcgtgtcttcctggttgcgtgtacattcatcgagatctctaacgcgtcgtcgttcttcctcaagttctctgcgtactacagaaagcgtgtccctatcttgttgatatttagcaatttctgattctagagtactgattttgcttacgtagttactaatagttgtcttggccttatcaagatcctccttgtatttgtcgcattccttgatatccctacgaagtctggacagttcccattcgacattacgacgtttatcgatttcagctcggagatcgtcatcgcgttgttttagccacatacgactgagttcaagttctcgttgacaagatccatctacttttccattcctaatagtatccagttccttttctagttctgaacgcatttctcgttccctatcaagcgattctctcaattctcggatagtcttcttatcaatttctaataaatctgaaccatcatctgtcccattttgaatatccctgtgttctttgatctcttttgtaagtcggtcgattctttcggttttataaacagaatccctttccaaagtcctaatcttactgagtttatcactaagttctgcattcaattcggtgagttttctcttggcttcttccaactctgttttaaactctccactatttccgcattcttcctcgcatttatctaaccattcaattagtttattaataactagttggtaatcagcgattcctatagccgttcttgtaattgtgggaacataattaggatcttctaatggattgtatggcttgatagcatcatctttatcattattagggggatggacaaccttaattggttggtcctcatctcctccagtagcgtgtggttcttcaataccagtgttagtaataggcttaggcaaatgcttgtcgtacgcgggcacttcctcatccatcaagtatttataatcgggttctacttcagaatattcttttctaagagacgcgacttcgggagttagtagaagaactctgtttctgtatctatcaacgctggaatcaatactcaagttaaggatagcgaatacctcatcgtcatcatccgtatcttctgaaacaccatcatatgacatttcatgaagtctaacgtattgataaatagaatcagatttagtattaaacagatccttaacctttttagtaaacgcatatgtatattttagatctccagatttcataatatgatcacatgccttaaatgtcagtgcttccatgatataatctggaacactaatgggtgacgaaaaagatacagcaccatatgctacgttgataaataaatctgaaccactaagtagataatgattaatgttaagaaagaggaaatattcagtgtataggtatgtcttggcgtcatatcttgtactaaacacgctaaacagtttgttaatgtgatcaatttccaatagattaattagagcagcgggaataccaacaaacatattaccacatccgtattttctatgaatatcacatatcatgttaaaaaatcttgatagaagagcgaatatctcgtctgacttaatgagtcgtagttcagcagcaacataagtcataactgtaaatagaacatactttcctgtagtgttgattctagactccacatcaacaccattattaaaaatagttttatatacatctttaatctgctctccgttaatcgtcgaacgttctagtatacggaaacactttgatttcttatctgtagttaatgacttagtgatatcacgaagaatattacgaattacatttcttgtttttcttgagagacctgattcagaactcaactcatcgttccatagtttttctacctcagtggcgaaatctttggagtgcttggtacatttttcaataaggttcgtgacctccatttattataaaaaatttattcaaaacttaactacaatcgggtaattataagatcgtagatctcccatgtggcggaatactaccatctatcgcatgtggatggacagtaggtaatggccatgggaacagtaatgtttgcatatttatctttcttgctagtattactgcatattgtcccaatgtttcgatgtgatgttctaacctatcaactgccgctgtatcacaacaatagtgtccgatgaaattaagattatgatccaatgtgtttaatatatgattatcaagtcttatacgatccgcgtcttttttgacaggatcaggttcttctacaggaagaagtttcggcctcttatgatattcatgtctgggaaacggtggtctagggtgaggctccggtatcggagtgggttttggattataatcatcatcgtctatgacatcatcttcgacttcgatatttattttgctatcttgatgatgtcctgtatcagttgcattttcagcactcgactgaatattagcgcattcattgtctattattaccatatttctaaacccaaaatgtatgtgttgaacatcagtactatcgttgatgagtcttatagcatgaattcgcttatcgttatcgggtttatcttctgtcaccttagcaattccttttttattaaactctacataatcatatccatttctattgtttgttctaatataaacgagtatagcatcattgctaaatttttcaatagtatcaaaaacagaatatcctaaaccatataatatatattcaggaacactcaaactaaatgtccaggattctcctaaatacgtaaactttaatagtgcgaaatcattcaaaaatctaccacttatagatagatagtacataaatgcgtatagtagtctacctatctctttattatgaaaaccggcattacgatcatatatgtcgtgatatacctgtgatccgtttacgttaaaccataaatacatgggtgatcctataaacatgaatttatttctaattctcagagctatagttaattgaccgtgtaatatttgcttacatgcatacttgatacgcttattaataagatttttatcattgctcgttatttcagaatcgtatatataaggagtaccatcgtgattcttaccagatattatacaaaatactatatataaaatatattgacccacgttagtaatcatataaatgtttaacgttttaaattttgtattcaatgatccattatcatacgctatcatggtcttgtaatattcattctttaaaatataatattgtgttagccattgcattggagctcctaatggagattttctattctcatccattttaggataggctttcataaagtccctaataacttcgtgaataatgtttctatgttttctactgatgcatgtatttgcttcgatttttttatcccatgtttcatctatcatagatttaaacgcagtaatgctcgcaacattaacatcttgaaccgttggtacaattccgttccataaatttataatgttcgccatttatataactcattttttgaatatacttttaattaacaaaagagttaagttactcatatggacgccgtccagtctgaacatcaatctttttagccagagatatcatagccgctcttagagtttcagcgtgattttccaacctaaatagaacttcatcgttgcgtttacaacacttttctatttgttcaaactttgttgttacattagtaatctttttttccaaattagttagccgttgtttgagagtttcctcattgtcgtcttcatcggctttaacaattgcttcgcgtttagcctctggctttttagcagcctttgtagaaaaaaattcagttgctggaattgcaagatcgtcatctccggggaaaagagttccgtccatttaaagtacagattttagaaactgacactctgcgttatttatatttggtacaacacatggattataaatattgatgttaataacatcagaaaatgtaaagtctatacattgttgcatcgtgttaaattttctaatggatctagtattattgggtccaacttctgcctgaaatccaaatatggaagcggatacaaaaccgtttcctggataaaccacacatctccacttttgctttacatcagaaattgtgtcgttgacatcttgaactctcctatctaatgccggtgttccacctatagattttgaatattcgaatgctgcatgagtagcattaaattccttaatattgccataattttcatatattgagtaaccctggataaaaagtaaacacaccgcagccgtcgctaccacaataaaaaaaattgatagagagttcatttataatctattagaagctgacaaaatttttttacacgcatcagacaatgctttaataaatagttcaacatctacttttgtcatatcgaaccgatggtatgattctaacctagaattacatccgaaaaagttgactatgttcatagtcattaagtcattaacaaacaacattccagactctggattataagacgatactgtttcgtcacaattacctaccttaatcatgtgattatgaatattggctattagagcaccttctaagaaatctataatatctttgaaacacgatttaaaatcaaaccacgaatatacttctacgaagaaagttagtttacccataggagaaataactataaatggagatctaaatacaaaatccggatctatgatagttttaacattattatattctctattaaatacctccacatctaaaaatgttaattttgaaactatgtcttcgtttattaccgtacctgaactaaacgctataagctctattgtttgagaactctttaaacgatattcttgaaatacatgtaacaaagtttcctttaactcggtcggtttatctaccatagttacagaatttgtatccttatctataatataataatcaaaatcgtataaagttatataattatcgcgttcagattgtgatcttttcaaatagactaaaaaccccatttctctagtaagtatcttatgtatatgtttgtaaaatatcttcatggtgggaatatgctctaccgcagttagccattcctcattgacagcggtagatgtattagacaaaactattccaatgtttaacaagggccattttacgagattattaaatccttgtttgataaatgtagccaatgagggttcgagttcaacgacgattgaattctcttcccgcggatgctgcatgatgaacgacgggatgttgttcgattgatttggaattctttttcgactttttgtttatattaaatattttaaaatttatagcggatagcaattcatgtaccacggataatgtagacgcgtattgcgcatcgatatctttattattagataaatttatcaataaatgtgagaagtttgcctcgttaaggtcttccatttaaatattatataaacatttgtgtttgtatcttattcgtcttttatggaatagttttttactagtaaagctgcaattacacactttgtccgtaaaacataaatataaacaccagcttttatcaatcgttccaaaaagtcgacggcggacatttttaacatggcatctattttaaatacacttaggtttttggaaaaaacatcattttataattgtaacgattcaataactaaagaaaagattaagattaaacataagggaatgtcatttgtattttataagccaaagcattctaccgttgttaaatacttgtctggaggaggtatatatcatgatgatttggttgtattggggaaggtaacaattaataatctaaagatgatgctattttacatggatttatcatatcatggagtgacaagtagtggagcaatttacaaattgggatcgtctatcgatagactttctctaaataggactattgttacaaaagttaataattatgatgatacattttttgacgacgatgattgatcgctattgcacaattttgtttttgtactttctaatatagtgtttaggttctttttcatatgagaatattgatttactaaaatatctatgtttaacttttgttctatgacgtccttatcggcggtatcggtacatatacgtaattcaccttcacaaaatacggagtcttcgataataatagccaatcgattattggatctagctgtctgtatcatattcaacatgtttaatatatcctttcgtttcccctttacaggcatcgatcgtagcatattttccgcgtctgatatggaaatgttaaaactacaaaaatgcgtaatgttagcccgtcctaatattggtacgtgtctataagtttggcatagtagaataatagacgtgtttaaatgccttccaaagtttaagaattctattagagtattgcattttgatagtttatcgcctacatcatcaaaaataagtaaaaagtgtgctgattttttatgattttgtgcgacagcaatacatttttctatgttacttttagttcgtatcagattatattctagagattcctgactactaacgaaattaatatgatttggccaaatgtatccatcataatctgggttataaacgggtgtaaacaagaatatatgtttatattttttaactagtgtagaaaacagagatagtaaatagatagtttttccagatccagatcctcctgttaaaaccattctaaacggcatttttaataaattttctcttgaaaattgtttttcttggaaacaattcataattatatttacagttactaaattaatttgataataaatcaaaatatggaaaactaaggttgttagtagggaggagaacaaagaaggcacatcgtgatataaataacatttattatcatgatgacaccagaaaacgacgaagagcagacatctgtgttctccgctactgtttacggagacaaaattcagggaaagaataaacgcaaacgcgtgattggtctatgtattagaatatctatggttatttcactactatctatgattaccatgtccgcgtttctcatagtgcgcctaaatcaatgcatgtctgctaacgaggctgctattactgacgccgctgttgccgttgctgctgcatcatctactcatagaaaggttgcgtctagcactacacaatatgatcacaaagaaagctgtaatggtttatattaccagggttcttgttatatattacattcagactaccagttattctcggatgctaaagcaaattgcactgcggaatcatcaacactacccaataaatccgatgtcttgactacctggctcattgattatgttgaggatacatggggatctgatggtaatccaattacaaaaactacatccgattatcaagattctgatgtatcacaagaagttagaaagtatttttgtgttaaaacaatgaactaatatttatttttgtacattaataaatgaaatcgcttaatagacaaactgtaagtaggtttaagaagttgtcggtgccggccgctataatgatgatactctcaaccattattagtggcataggaacatttctgcattacaaagaagaactgatgcctagtgcttgcgccaatggatggatacaatacgataaacattgttatttagatactaacattaaaatgtctacagataatgcggtttatcagtgtcgtaaattacgagctagattgcctagacctgatactagacatctgagagtattgtttagtattttttataaagattattgggtaagtttaaaaaagaccaatgataaatggttagatattaataatgataaagatatagatattagtaaattaacaaattttaaacaactaaacagtacgacggatgctgaagcgtgttatatatacaagtctggaaaactggttaaaacagtatgtaaaagtactcaatctgtactatgtgttaaaaaattctacaagtgacaacaaaaaatgaattaataataagtcgttaacgtacgccgccatggacgccgcgtttgttattactccaatgggtgtgttgactataacagatacattgtatgatgatctcgatatctcaatcatggactttataggaccatacattataggtaacataaaaactgtccaaatagatgtacgggatataaaatattccgacatgcaaaaatgctactttagctataagggtaaaatagttcctcaggattctaatgatttggctagattcaacatttatagcatttgtgccgcatacagatcaaaaaataccatcatcatagcatgcgactatgatatcatgttagatatagaagataaacatcagccattttatctattcccatctattgatgtttttaacgctacaatcatagaagcgtataacctgtatacagctggagattatcatctaatcatcaatccttcagataatctgaaaatgaaattgtcgtttaattcttcattctgcatatcagacggcaatggatggatcataattgatgggaaatgcaatagtaattttttatcataaaagttgtaaagtaaataataaaacaataaatattgaactagtagtacgtatattgagcaatcagaaatgatgctggtacctcttatcacggtgaccgtagttgcgggaacaatattagtatgttatatattatatatttgtaggaaaaagatacgtactgtctataatgacaataaaattatcatgacaaaattaaaaaagataaagagttctaattccagcaaatctagtaaatcaactgatagcgaatcagactgggaggatcactgtagtgctatggaacaaaacaatgacgtagataatatttctaggaatgagatattggacgatgatagcttcgctggtagtttaatatgggataacgaatccaatgttatggcgcctagcacagaacacatttacgatagtgttgctggaagcacgctgctaataaataatgatcgtaatgaacagactatttatcagaacactacagtagtaattaatgaaacggagactgttgaagtacttaatgaagataccaaacagaatcctaactattcatccaatcctttcgtaaattataataaaaccagtatttgtagcaagtcaaatccgtttattacagaacttaacaataaatttagtgagaataatccgtttagacgagcacatagcgatgattatcttaataagcaagaacaagatcatgaacacgatgatatagaatcatcggtcgtatcattggtgtgattagtttcctttttataaaattgaagtaatatttagtattattgctgccgtcacgttgtacaaatggagatattccctgtattcggcatttctaaaattagcaattttattgctaataatgactgtagatattatatagatacagaacatcaaaaaattatatctgatgagatcaatagacagatggatgaaacggtacttcttaccaacatcttaagcgtagaagttgtaaatgacaatgagatgtaccatcttattcctcatagattatcgacgattatactctgtattagttctgtcggaggatgtgttatctctatagataatgacatcaatggcaaaaatattctaacctttcccattgatcatgctgtaatcatatccccactgagtaaatgtgtcgtagttagcaagggtcctacaaccatattggttgttaaagcggatatacctagcaaacgattggtaacatcgtttacaaacgacatactatatgtaaacaatctgtcactgattaattatttgccgttgtctgtattcattattagacgagtcaccgactatttggatagacacatatgcgatcagatatttgctaataataagtggtattcccttataaccatcgacgataagcaatatcctattccatcaaactgtataggtatgtcctctgccaagtacataaattctagcatcgagcaagatactttaatccatgtttgtaacctcgagcatccgttcgactcagtatacaaaaaaatgcagtcgtacaattctctacctatcaaggaacaaatattgtacggtagaattgataatataaatatgagcattagtatttctgtggattaatagatttctagtatggggatcattaatcatctctaatctctaaatacctcataaaacgaaaaaaaagctattatcaaatactgtacggaatggattcattctcttctctttttatgaaactctgttgtatatctactgataaaactggaagcaaaaaatctgatagaaagaataagaataagatcaaggattatatggaacacgattattataaaataacaatagttcctggttcctcttccacgtctactagctcgtggtattatacacatgcctagtaatagtctctttgcgttgacggaaagcagactagaaataacaggctaaaatgttcagacaccataatagttcccaacccagataataacagagttccatcaacacattcctttaaactcaatcccaaacccaaaaccgttaaaatgtatccggccaattgatagtagataatgaggtgtacagcgcatgataatttacacagtaaccaaaatgaaaatactttagtaattataagaaatatagacggtaatgtcatcatcaacaatccgataatatgcctgagagtaaacattgacggataaaacaaaaatgctccgcataactctatcatggcaataacacaaccaaatacttgtaagattcctaaattagtagaaaatacaacgaatatcgatgtataagtgatctcgagaaataataagaataaagtaatgcccgtaaagataaacatcaacattgtttggtaatcattaaaccaattagtatgaagttgaactaatttcacagtagattttattccagtgttatcctcgcatgtataagtacctggtaagatatctttatattccataatcaatgagacatcactatctgataacgaatgaagtctagcactagtatgccatttacttaatattgtcgtcttggaagttttattataagttaaaatatcatggttatccaatttccatctaatatactttgtcggattatctatagtacacggaataatgatggtatcattacatgctgtatactctatggtctttgtagttgttataacaaccaacgtatagaggtatatcaacgatattctaactcttgacattttttatttatttaaaatgatacctttgttatttattttattctattttgctaacggtattgaatggcataagtttgaaacgagtgaagaaataatttctacttacttattagacgacgtattatacacgggtgttaatggggcggtatacacattttcaaataataaactaaacaaaactggtttaactaataataattatataacaacatctataaaagtagaggatgcggataaggatacattagtatgcggaaccaataacggaaatcccaaatgttggaaaatagacggttcagacgacccaaaacatagaggtagaggatacgctccttatcaaaatagcaaagtaacgataatcagtcacaacggatgtgtactatctgacataaacatatcaaaagaaggaattaaacgatggagaagatttgacggaccatgtggttatgatttattcacggcggataacgtaattccaaaagatggtttacgaggagcattcgtcgataaagacggtacttatgacaaagtttacattcttttcactgatactatcggctcaaagagaattgtcaaaattccgtatatagcacaaatgtgcctaaacgacgaaggtggtccatcatcattgtctagtcatagatggtcgacgtttctcaaagtcgaattagaatgtgatatcgacggaagaagttatagacaaattattcattctagaactataaaaacagataatgatacgatactatatgtattcttcgatagtccttattccaagtccgcattatgtacctattctatgaataccattaaacaatctttttctacgtcaaaattggaaggatatacaaagcaattgccgtctccagctcctggtatatgtttaccagctggaaaagttgttccacataccacgtttgaagtcatagaacaatataatgtactagatgatattataaagcctttatctaaccaacctatcttcgaaggaccgtctggtgttaaatggttcgatataaaggagaaggaaaatgaacatcgggaatatagaatatacttcataaaagaaaattctatatattcgttcgatacaaaatctaaacaaactcgtagctcgcaagtcgatgcgcgactattttcagtaatggtaactgcgaaaccgttatttatagcagatatagggataggagtaggaatgccacaaatgaaaaaaatacttaaaatgtaatcttaatcgagtacaccacacgacaatgaacaaacataagacagattatgctggttatgcttgctgcgtaatatgcggtctaattgtcggaattatttttacagcgacactattaaaagttgtagaacgtaaattagttcatacaccattaatagataaaacgataaaagatgcatatattagagaagattgtcctactgactggataagctataataataaatgtatccatttatctactgatcgaaaaacctgggaggaaggacgtaatgcatgcaaagctctaaattcaaattcggatctaattaagatagagactccaaacgagttaagttttttaagaagccttagacgaggctattgggtaggagaatccgaaatattaaaccagacaaccccatataattttatagctaagaatgccacgaagaatggaactaaaaaacggaaatatatttgtagcacaacgaatactcccaaactgcattcgtgttacactatataacaattacactacatttttatcataccactacttcggttagatgttttagaaaaaaataaatatcgccgtaccgttcttgtttttataaaaataacaattaacaattatcaaattttttctttaatattttacgtggttgaccattcttggtggtaaaataatctcttagtgttggaatggaatgctgtttaatgtttccacactcatcgtatattttgacgtatgtagtcacatcgtttacgcaatagtcagactgtagttctatcatgcttcctacatcagaaggaggaacagttttaaagtctcttggttttaatctattaccgttagttttcatgaaatcctttgttttatccacttcacattttaaataaatgtccactatacattcttttgttaattttactagatcgtcatgggtcatagaatttataggttccgtagtccatggatccaaactagcaaacttcgcgtatacggtatcgcgattagtgtatacaccaactgtatgaaaattaagaaaacagtttaataaatcaacagaaatatttaatcctccgtttgatacagatgcgccatatttatggatttcggattcacacgttgtttgtctgaggtgttcgtctagtgttgcttctacgtaaacttcgattcccatatattctttattgtcagaatcgcataccgatttatcatcatacactgtttgaaaactaaatggtatacacatcaaaataataaataataacgagtacattctgcaatattgttatcgtaattggaaaaatagtgttcgagtgagttggattatgtgagtattggattgtatattttattttatattttgtaataagaataaaatgctaatgtcaagtttattccaatagatgtcttattaaaaacatatataataaataacaatggctgaatggcataaaattatcgaggatatctcaaaaaataataagttcgaggatgccgccatcgttgattacaagactacaaagaatgttctagctgctattcctaacagaacatttgccaagattaatccgggtgaaattattcctctcatcactaatcgtaatattctaaaacctcttattggtcagaaatattgtattgtatatactaactctctaatggatgagaacacgtatgctatggagttgcttactgggtacgcccctgtatctccgatcgttatagcgagaactcataccgcacttatatttttgatgggtaagccaacaacatccagacgtgacgtgtatagaacgtgtagagatcacgctacccgtgtacgtgcaactggtaattaaaataaaaagtaatattcatatgtagtgtcaattttaaatgatgatgatgaaatggataatatccatattgacgatgtcaataatgccggtattggcatacagttcatcgatttttagatttcattcagaggatgtggaattatgttatgggcatttgtattttgataggatctataatgtagtaaatataaaatataatccgcatattccatatagatataattttattaatcgcacgttaaccgtagatgaactagacgataatgtcttttttacacatggttattttttaaaacacaaatatggttcacttaatcctagtttgattgtctcattatcaggaaacttaaaatataatgatatacaatgctcagtaaatgtatcgtgtctcattaaaaatttggcaacgagtacatctactatattaacatctaaacataagacttattctctacatcggtccacgtgtattactataataggatacgattctattatatggtataaagatataaatgacaagtataatgacatctatgattttactgcaatatgtatgctaatagcgtctacattgatagtgaccatatacgtgtttaaaaaaataaaaatgaactcttaattatgctatgctattagaaatggataaaatcaaaattacggttgattcaaaaattggtaatgttgttaccatatcgtataacttggaaaagataactattgatgtcacacctaaaaagaaaaaagaaaaggatgtattattagcgcaatcagttgctgtcgaagaggcaaaagatgtcaaggtagaagaaaaaaatattatcgatattgaagatgacgatgatatggatgtagaaagcgcgtaatacgatctataaaaataagtatataaatactttttatttactgtactcttactgtgtagtggtgataccctactcgattatttttttaaaaaaaaaatacttattctgattcttctagccatttccgtgttcgtttgaatgccacatcgacgtcaaagataggggagtagttgaaatctagttctgcattgttggtacgcacctcaaatgtagtgttggatatcttcaacgtatagttgttgagtagtgatggttttctaaatagaattctcttcatatcattcttgcacgcgtacatttttagcatccatcttggaatcctagatccttgttctattcccaatggtttcatcaatagaagattaaacatatcgtacgaacacgatggagagtaatcgtagcaaaagtaagcatttcctttaatcttagatcccggatactggatatattttgcagccaacacgtgcatccatgcagcatttcctacatatacccggctatgcaccgcgtcatcatcgactgtacgatacataatgttaccgtgttgcttacattgctcgtaaaagactttcatcaatttgtctccttctccgtaaattccagtgggtcttaggcaacaagtatacaattttgctccattcatgattacggaattattggctttcataaccagttgctcggccatacgtttactttttgcgtatacatgtcctggtgatatatcataaagggtatgctcatggccgatgaatggatcaccgtgtttattgggtcctattgcttccatgctactagtatagatcaaatacttgattcctaggtccacacaagctgccaaaatagtctgtgttccataatagtttactttcatgatttcattatcggtgtattttccaaatacatccactagagcagccgtatgaataatcagatttaccccatctagcgcttctctcaccttatcaaagtcgtttatatcacattgtatatagtttataaccttaactttcgaggttattggttgtggatcttctacaatatctatgactctgatttcttgaacatcatctgcactaattaacagttttactatatacctgcctagaaatccggcaccaccagtaaccgcgtacacggccattgctgccactcataatatcagactacttattctattttactaaataatggctgtttgtataatagaccacgataatatcagaggagttatttactttgaaccagtccatggaaaagataaagttttaggatcagttattggattaaaatccggaacgtatagtttgataattcatcgttacggagatattagtcaaggatgtgattccataggcagtccagaaatatttatcggtaacatctttgtaaacagatatggtgtagcatatgtttatttagatacagatgtaaatatatttacaattattggaaaggcgttatctatttcaaaaaatgatcagagattagcgtgtggagttattggtatttcttacataaatgaaaagataatacattttcttacaattaacgagaatggcgtttgatatatcagttaatgcgtctaaaacaataaatgcattagtttacttttctactcagcaaaataaattagtcatacgtaatgaagttaatgatacacactacactgtcgaatttgatagggacaaagtagttgacacgtttatttcatataatagacataatgacaccatagagataagaggggtgcttccagaggaaactaatattggttgcgcggttagtatgacttacttgtataataagtatagttttaaactgattttagcagaatatataagacacagaaatactatatccggcaatatttattcggcattgatgacactagatgatttggctattaaacagtatggagacattgatctattatttaatgagaaacttaaagtagactccgattcgggactatttgactttgtcaactttgtaaaggatatgatatgttgtgattctagaatagtagtagctctatctagtctagtatctaaacattgggaattgacaaataaaaaatataggtgtatggcattagccgaacatatatctgatagtattccaatatctgagctatctagactacgatacaatctatgtaagtatctacgcggacacactgagagcatagaggataaatttgattattttgaagacgatgattcgtctacatgttctgccgtaaccgacagggaaacggatgtataattttttttatagcgtgaaggatatgataaaaaatataattgttgtatttatcccattccaatcaccttatatgattctgtaacacaataaaggagtcttatagatgtatagaggtcagatactggtttgataaactgtttattccacataagtatgtttgactttatggttagacccgcatactttaacaaatcactgaaaattggagttaggtattgacctctcagaatcagttgccgttctggaacattaaatgtattttttatgatatactccaacgcatttatgtgggcatacaacaagtcattactaatggaatattccaagagttttagttgtctagtatttaacaagagaagagatttcaacagactgtttatgaactcgaatgccgcctcattgtcgcttatattgatgatgtcgaattctcccaatatcatcaccgatgagtagctcatcttgttatcgggatccaagttttctaaagatgtcattaaaccctcgatcatgaatggatttatcatcatcgtttttatgttggacatgagcttagtccgtttgtccacatctatagaagatgatttctgaattatttcatatatctctctctttaactccaggaacttgtcaggatggtctactttaatatgttctcgtctaagagatgaaaatctttggatggttgcacgcgacttttctctaaaggatgacgttgcccaagatcctctcttaaatgaatccatcttatccttggacaagatggacagtctattttccttagatggtttaatatttttgttacccatgatctataaaggtagacctaatcgtctcggatgaccatatatttattttcagttttattatacgcataaattgtaaaaaatatgttaggtttacgaaaatgtctcgtggggcattaatcgtttttgaaggattggacaaatctggaaaaacaacacaatgtatgaacatcatggaatcaataccttcaaacacaataaaataccttaactttcctcagagatccactgtcactggaaagatgatagatgactatctaactcgtaaaaaaacctataatgatcatatagttaatctattattttgtgcaaatagatgggagtttgcatcttttatacaagaacaactagaacagggaattactttaatagttgatagatacgcattttctggagtagcgtatgccgccgctaaaggcgcgtcaatgactctcagtaagagttatgaatctggattgcctaaacccgacttagttatattcttggaatctggtagcaaagaaattaatagaaacgtcggtgaggaaatttatgaagatgttacattccaacaaaaggtattacaagaatataaaaaaatgattgaagaaggagatattcattggcaaattatttcttctgaattcgaggaagatgtaaagaaggagttgattaagaatatagttatagaggctatacacacggttactggaccagtggggcaactgtggatgtaatagtgaaattacattttttataaatagatgttagtacagtgttataaatggatgaagcatattactctggcaacttggaatcagtactcggatacgtgtccgatatgcataccgaactcgcatcaatatctcaattagttattgccaagatagaaactatagataatgatatattaaacaaggacattgtaaattttatcatgtgtagatcaaacttggataatccatttatctctttcctagatactgtatatactattatagatcaagagaactatcagactgagttgattaattcattagacgacaatgaaattatcgattgtatagttaataagtttatgagcttttataaggataacctagaaaatatagtagatgctatcattactctaaaatatataatgaataatccagattttaaaactacgtatgccgaagtactcggttccagaatagccgatatagatattaaacaagtgatacgtaagaatatactacaattgtctaataatatccgcgaacgatatttgtgaaaatattaaaaaaaaatactttttttattaaatgacgtcttttcgtgaatttagaaaattatgctgtgctatatatcacgcatcaggatataaagaaaaatctaaattaattagagactttataacagatagggatgataaatatttgatcattaagctattgcttcccggattagacgatagaatttataacatgaacgataaacaaattataaaattatatagtataatatttaaacaatctcaggaagatatgctacaagatttaggatacggatatataggagacactattaggactttcttcaaagagaacacagaaatccgtccacgagataaaagcattttaactttagaagaagtggatagttttttaactacgttatcatccgtaactaaagaatcgcatcaaataaaattattgactgatgtagcatctgtttgtacatgtaatgatttaaaatgtgtagtcatgcttattgataaagatctaaaaattaaagcgggtcctcggtacgtacttaacgctattagtcctaatgcctatgatgtgtttagaaaatctaataacttgaaagagataatagaaaattcatctaaacaaaatctagactctatatctatttctgttatgactccaattaatcccatgttagcggaatcgtgtgattctgtcaataaggcgtttaaaaaatttccatcaggaatgtttgcggaagtcaaatacgatggtgaaagagtacaagttcataaaaataataacgagtttgccttctttagtagaaacatgaaaccagtactctctcataaagtggattatctcaaagaatacataccgaaagcatttaaaaaagctacgtctatcgtattggattctgaaattgttcttgtagacgaacataatgtaccgctcccgtttggaagtttaggtatacacaaaaagaaagaatataaaaactctaacatgtgtttgttcgtgtttgactgtttgtactttgatggattcgatatgacggacattccattgtacgaacgaagatcttttctcaaagatgttatggttgaaatacccaatagaatagtattctcagagttgacgaatattagtaacgagtctcagttaactgacgtattggatgatgcactaacgagaaaattagaaggattggtcttaaaagatattaatggagtatacgaaccgggaaagagaagatggttaaaaataaagcgagactatttgaacgagggttccatggcagattctgccgatttagtagtactaggtgcctactatggtaaaggagcaaagggtggtatcatggcagtctttctaatgggttgttacgacgatgaatccggtaaatggaagacggttaccaagtgttcaggacacgatgataatacgttaagggagttgcaagaccaattaaagatgattaaaattaacaaggatcccaaaaaaattccagagtggttagtagttaataaaatctatattcccgattttgtagtagaggatccgaaacaatctcagatatgggaaatttcaggagcagagtttacatcttccaagtcccataccgcaaatggaatatccattagatttcctagatttactaggataagagaggataaaacgtggaaagaatctactcatctaaacgatttagtaaacttgactaaatcttaatagttacatacaaactgaaaattaaaataacactatttagttggtggtcgccatggatggtgttattgtatactgtctaaacgcgctagtaaaacatggcgaggaaataaatcatataaaaaatgatttcatgattaaaccatgttgtgaaagagtttgtgaaaaagtcaagaacgttcacattggcggacaatctaaaaacaatacagtgattgcagatttgccatatatggataatgcggtatccgatgtatgcaattcactgtataaaaagaatgtatcaagaatatccagatttgctaatttgataaagatagatgacgatgacaagactcctactggtgtatataattattttaaacctaaagatgccattcctgttatcatatctataggaaaggataaagatgtctgtgaactattaatctcatcagacatatcgtgtgcatgcgtggagttaaattcatatcacgtagccattcttcccatggatgtttccttttttaccaaaggaaatgcatcattgattattctcctgtttgatttctctatcgatgcggcacctctcttaagaagtgtaaccgataataatgttattatatctagacaccagcgtctacatgacgagcttccgagttccaattggttcaagttttacataagtataaagtccgactattgttctatattatatatggttgttgatggatctgtgatgcatgcgatagctgataatagaactcacgcaattattagcaaaaatatattagacaatactacgattaacgatgagtgtagatgctgttattttgaaccacagattaggattcttgatagagatgagatgctcaatggatcatcgtgtgatatgaacagacattgtattatgatgaatttacctgatgtaggcgaatttggatctagtatgttggggaaatatgaacctgacatgattaagattgctctttcggtggctggtaatttaataagaaatcgagactacattcccgggagacgaggatatagctactacgtttacggtatagcctctagataatttttttaagcacgaaataaaaaacataattttaaaccaatctatttcatactattttgtgtgatcaccatggacataaagatagatattagtatttctggtgataaatttacggtgactactaggagggaaaatgaagaaagaaaaaaatatctacctctccaaaaagaaaaaactactgatgttatcaaacctgattatcttgagtacgatgacttgttagatagagatgagatgtttactattctagaggaatattttatgtacagaggtctattaggcctcagaataaaatatggacgactctttaacgaaattaaaaaattcgacaatgatgcggaagaacaattcggtactatagaagaactcaagcagaaacttagattaaattctgaagagggagcagataactttatagattatataaaggtacaaaaacaggatatcgtcaaacttactgtatacgattgcatatctatgataggattgtgtgcatgcgtggtagatgtttggagaaatgagaaactgttttctagatggaaatattgtttacgagcgattaaactgtttattgatgatcacatgcttgataagataaaatctatactgcagaatagactagtatatgtggaaatgtcatagaaagttaaaagttaatgagagcaaaaatatataaggttgtattccatatttgttatttttttctgtaatagttagaaaaatacattcgatggtctatctatcagattattatgtgttataaggtactttttctcataataaactagagtatgagtaagatagtgtttttcaaaacatataaatctaaaattgatggatgagatatacagctattaatttcgaaaatatattttaatctgataactttaaacatggatttttaatggtggtttaacgttttaaaaaaagattttgttattgtagtatatgataatattaaaagatggatataaagaatttgctgactgcatgtactattttttacattactacattggctacggcagatatacctacttcgtcactgccacacgctccggtaaacggggcatgtgacgagggagaatatcttgataagaggcataatcaatgttgtaatcagtgtccacctggagaatttgccaaggttagatgtaatggtaacgataacacaaaatgtgaacgctgcccacctcatacatataccgcaatccccaattactctaatggatgtcatcaatgtagaaaatgcccaacaggatcatttgataaggtaaagtgtaccggaacacagaacagtaaatgttcgtgtcttcctggttggtattgcgctactgattcttcacagactgaagattgtcgagattgtataccaaaaaggagatgtccatgcggatactttggtggaatagatgaacaaggaaatcctatttgtaaatcgtgttgtgttggtgaatattgcgactacctacgtaattatagacttgatccatttcctccatgcaaactatctaaatgtaattaattatgattttgatgataatgttaccatacattatatcgctacttggttagtgtattattcagtatgaagacctattaataattacttatcttttgacgatcttgttataattataatataaaaatacttatggcatagtaactcataattgctgacgcgataaattcgtaataatctgttttgttcaaatttttataaggaatctacaggcataaaaataaaaatataatttataatatactcttacagcgcgccatcatgaataacagcagtgaattgattgctgttattaatggatttagaaatagtggacgattttgtgatattaatatagttattaatgatgaaaggataaacgctcacagactcatcctatctggagcctccgaatatttttccattctgttttccaataattttatcgattctaatgaatacgaagttaatctaagtcatttagattatcaaagtgttaacgatttgatcgattacatttatgggatacctttgagcctaactaacgataacgtgaaatatattctttcaaccgctgattttttacaaattggatctgctattacggagtgtgaaaattacatacttaaaaatctttgttctagaaactgtatcgatttctacatatacgctgataaatataataacaagaaaatagaatcagcgtcgtttaacacaatattacaaaatattttgagactcatcaacgatgaaaactttaaatacttaacagaggaatcaatgataaaaattttaagcgatgatatgttaaatataaaaaatgaggatttcgccccactaattctcattaaatggttagagagtactcaacaaccatgcaccgtcgagttacttaaatgcctcagaatatcattgctttccccacaagttataaaatcactttatagtcatcgactggttagttcaatctacgaatgtataacattcttaaacaatatagcattcttggatgaatcatttcctagataccatagcatcgagttgatatctatcggtataagtaattcgcatgataagatttccataaactgctacaatcataaaaaaaatacatgggaaatgatatcttcacgtagatataggtgtagtttcgcagtggccgtcctggataatattatctatatgatgggtggatatgatcagtccccgtatagaagttcaaaggttatagcgtacaatacatgtacaaattcttggatatatgatataccagagctaaaatatcctcgttctaattgtgggggactggctgatgacgaatacatttattgtataggcggcatacgcgatcaggattcatcgttgacatctagtattgatagatggaagccatcaaaaccatattggcagaagtatgctaaaatgcgcgaaccaaaatgtgatatgggggttgcgatgttaaacggattaatatatgttataggtggaatcgttaaaggtgacacgtgtaccgacgcactagagagtttatcagaagatggatggatgaagcatcaacgtcttccaataaaaatgtccaatatgtcgacgattgttcatgatggcaagatttatatatctggaggttacaacaatagtagtgtagttaatgtaatatcgaatctagtccttagctataattcgatatatgatgaatggaccaaattatcatcattaaacattcctagaattaatcccgctctatggtcagcgcataataaattatatgtaggaggaggaatatctgatgatgttcgaactaatacatctgagacatacgacaaagaaaaagattgttggacattggataatggtcacgtgttaccacgcaattatataatgtataaatgcgaaccgattaaacataaatatccattggaaaaaacacagtacacgaatgattttctaaagtatttggaaagttttataggtagttgatagaacaaaatacataattttgtaaaaataaatcactttttatactaatatgacacgattaccaatacttttgttactaatatcattagtatacgctacaccttttcctcagacatctaaaaaaataggtgatgatgcaactctatcatgtaatcgaaataatacaaatgactacgttgttatgagtgcttggtataaggagcccaattccattattcttttagctgctaaaagcgacgtcttgtattttgataattataccaaggataaaatatcttacgactctccatacgatgatctagttacaactatcacaattaaatcattgactgctagagatgccggtacttatgtatgtgcattctttatgacatcaactacaaatgacactgataaagtagattatgaagaatactccacagagttgattgtaaatacagatagtgaatcgactatagacataatactatctggatctacacattcaccggaaactagttctaagaaacctgattatatagataattctaattgctcgtcggtattcgaaatcggtacccggggatcagcttgcatgcctgcagcaattcccgaggctgtagccgacgatggtgcgccaggagagttgttgattcattgtttgcctccctgctgcggtttttcaccgaagttcatgccagtccagcgtttttgcagcagaaaagccgccgacttcggtttgcggtcgcgagtgaagatccctttcttgttaccgccaacgcgcaatatgccttgcgaggtcgcaaaatcggcgaaattccatacctgttcaccgacgacggcgctgacgcgatcaaagacgcggtgatacatatccagccatgcacactgatactcttcactccacatgtcggtgtacattgagtgcagcccggctaacgtatccacgccgtattcggtgatgataatcggctgatgcagtttctcctgccaggccagaagttctttttccagtaccttctctgccgtttccaaatcgccgctttggacataccatccgtaataacggttcaggcacagcacatcaaagagatcgctgatggtatcggtgtgagcgtcgcagaacattacattgacgcaggtgatcggacgcgtcgggtcgagtttacgcgttgcttccgccagtggcgcgaaatattcccgtgcaccttgcggacgggtatccggttcgttggcaatactccacatcaccacgcttgggtggtttttgtcacgcgctatcagctctttaatcgcctgtaagtgcgcttgctgagtttccccgttgactgcctcttcgctgtacagttctttcggcttgttgcccgcttcgaaaccaatgcctaaagagaggttaaagccgacagcagcagtttcatcaatcaccacgatgccatgttcatctgcccagtcgagcatctcttcagcgtaagggtaatgcgaggtacggtaggagttggccccaatccagtccattaatgcgtggtcgtgcaccatcagcacgttatcgaatcctttgccacgcaagtccgcatcttcatgacgaccaaagccagtaaagtagaacggtttgtggttaatcaggaactgttcgcccttcactgccactgaccggatgccgacgcgaagcgggtagatatcacactctgtctggcttttggctgtgacgcacagttcatagagataaccttcacccggttgccagaggtgcggattcaccacttgcaaagtcccgctagtgccttgtccagttgcaaccacctgttgatccgcatcacgcagttcaacgctgacatcaccattggccaccacctgccagtcaacagacgcgtggttacagtcttgcgcgacatgcgtcaccacggtgatatcgtccacccaggtgttcggcgtggtgtagagcattacgctgcgatggattccggcatagttaaagaaatcatggaagtaagactgctttttcttgccgttttcgtcggtaatcaccattcccggcgggatagtctgccagttcagttcgttgttcacacaaacggtgatacgtacacttttcccggcaataacatacggcgtgacatcggcttcaaatggcgtatagccgccctgatgctccatcacttcctgattattgacccacactttgccgtaatgagtgaccgcatcgaaacgcagcacgatacgctggcctgcccaacctttcggtataaagacttcgcgctgataccagacgttgcccgcataattacgaatatctgcatcggcgaactgatcgttaaaactgcctggcacagcaattgcccggctttcttgtaacgcgctttcccaccaacgctgatcaattccacagttttcgcgatccagactgaatgcccacaggccgtcgagttttttgatttcacgggttggggtttctacaggacgtaacattctagtcgaggaattcatttatagcatagaaaaaaacaaaatgaaattctactatatttttacatacatatattctaaatatgaaagtggtgattgtgactagcgtagcatcgcttctagacatctatatactatatagtaataccaatactcaagactacgaaactgatacaatctcttatcatgtgggtaatgttctcgatgtcgatagccatatgcccggtagttgcgatatacataaactgatcactaattccaaacccacccgctttttatagtaagtttttcacccataaataataaatacaataattaatttctcgtaaaagtagaaaatatattctaatttattgcacggtaaggaagtagaatcataaagaacagtgacggatccccgatccccgacctgcaggcatgcaagctcgactccggaaccaattactgataatgtagaagatcatacagacaccgtcacatacactagtgatagcattaatacagtaagtgcatcatctggagaatccacaacagacgagactccggaaccaattactgataaagaagatcatacagttacagacactgtctcatacactacagtaagtacatcatctggaattgtcactactaaatcaaccaccgatgatgcggatctttatgatacgtacaatgataatgatacagtaccaccaactactgtaggcggtagtacaacctctattagcaattataaaaccaaggactttgtagaaatatttggtattaccgcattaattatattgtcggccgtggcaattttctgtattacatattatatatataataaacgttcacgtaaatacaaaacagagaacaaagtctagatttttgacttacataaatgtctgggatagtaaaatctatcatattgagcggaccatctggtttaggaaagacagccatagccaaaagactatgggaatatatttggatttgtggtgtcccataccactagatttcctcgtcctatggaacgagaaggtgttgattaccattacgttaacagagaggccatctggaagggaatagccgccggaaactttctagaacatactgagtttttaggaaatatttacggaacttctaaaacagctgtgaatacagcggctattaataatcgtatttgtgtgatggatctaaacatcgacggtgttagaagtcttaaaaatacgtacctaatgccttactcggtgtatataagacctacctctcttaaaatggttgagaccaagcttcgtcgtagaaacactgaagctaacgatgagattcatcgtcgtgtgatgttggcaaaaactgacatggatgaggcaggtgaagccggtctattcgacactattatcattgaagatgatgtgaatttagcatatagtaagttaattcagatactacaggaccgtattagaatgtattttaacactaattagagacttaagacttaaaacttgataattaataatataactcgtttttatatgtgtctatttcaacgtctaatgtattagttaaatattaaaacttaccacgtaaaacttaaaatttaaaatgatatttcattgacagatagatcacacattatgaactttcaaggacttgtgttaactgacaattgcaaaaatcaatgggtcgttggaccattaataggaaaaggtggattcggtagtatttatactactaatgacaataattatgtagtaaaaatagagcccaaagctaacggatcattatttaccgaacaggcattttatactagagtacttaaaccatccgttatcgaagaatggaaaaaatctcacaatataaagcacgtaggtcttatcacgtgcaaggcatttggtctatacaaatccattaatgtggaatatcgattcttggtaattaatagattaggtgcagatctagatgcggtgatcagagccaataataatagactaccaaaaaggtcggtgatgttgatcggaatcgaaatcttaaataccatacaatttatgcacgagcaaggatattctcacggagatattaaagcgagtaatatagtcttagatcaaatagataagaataaattatatctagtggattacggattggtttctaaattcatgtctaatggcgaacatgttccatttataagaaatccaaataaaatggataacggtactctagaatttacacctatagattcgcataaaggatacgttgtatctagacgtggagatctagaaacacttggatattgtatgattagatggttgggaggtatcttaccatggactaagatatctgaaacaaagaattgtgcattagtaagtgccacaaaacagaaatatgttaacaatactgcgactttgttaatgaccagtttgcaatatgcacctagagaattgctgcaatatattaccatggtaaactctttgacatattttgaggaacccaattacgacaagtttcggcacatattaatgcagggtgtatattattaagtgtggtgtttggtcgataaaaattaaaaaataacttaatttattattgatctcgtgtgtacaaccgaaatcatggcgatgttttacgcacacgctctcggtgggtacgacgagaatcttcatgcctttcctggaatatcatcgactgttgccaatgatgtcaggaaatattctgttgtgtcagtttataataacaagtatgacattgtaaaagacaaatatatgtggtgttacagtcaggtgaacaagagatatattggagcactgctgcctatgtttgagtgcaatgaatatctacaaattggaaatccgatccatgatcaagaaggaaatcaaatctctatcatcacatatcgccacaaaaactactatgctctaagcggaatcgggtacgagagtctagacttgtgtttggaaggagtagggattcatcatcacgtacttgaaacaggaaacgctgtatatggaaaagttcaacatgattattctactatcaaagagaaggccaaagaaatgagtgcacttagtccaggacctatcatcgattaccacgtctggataggagattgtatctgtcaagttactgctgtggacgtacatggaaaggaaattatgaaaatgagattcaaaaagggtgcggtgcttccgatcccaaatctggtaaaagttaaacttggggagaatgatacagaaaatctttcttctactatatcggcggcaccatcgaggtaaccacctctctggaagacagcgtgaatcatgtactcatgaaacgtttggaaactatacgccatatgtggtctgttgtatatgatcattttgatattgtgaatggtaaagaatgctgttatgtgcatacgcattcatctaatcaaaatcctataccgagtactgtaaaaacaaatttgtacatgaagactatgggatcatgcattcaaatggattccatggaagctctagagtatcttagcgaactgaaggaatcaggtggatggagtcccagaccagaaatgcaggaatttgaatatccagatggagtggaagacactgaatcaattgagagattggcagaggagttcttcaatagatcagaacttcaggctggtgaatcagtcaaatttggtaattctattaattgttaaacatacatctgtttcagctaagcaactaagaacacgtatacggcagcagcttccttctatactctcatcttttaccaacacaaagggtggatatttgttcattggagttgataataatacacacaaagtatttggattcacggtgggttacgactacctcagactgatagagaatgatatagaaaagcatatcaaaagacttcgtgttgtgcatttctgtgagaagaaagaggacatcaagtacgcgtgtcgattcatcaaggtatataaacctggggatgagactacctcgacatacgtgtgcgctatcaaagtggaaagatgctgttgtgctgtgtttgcagattggccagaatcatggtatatggatactaatggtatcaagaagtattctccagatgaatgggtgtcacatataaaattttaattaatgtaactatagagaacaaataataaggttgtaatatcatatagacaataactaacaattaattagtaactgttatctcttttttaactaaccaactaactatatacctattaatacatcgtaattatagttcttaacatctattaatcattaattcgcttctttaattttttataaactaacattgttaattgaaaagggataacatgttacagaatataaattatatatggatttttttaaaaaggaaatacttgactggagtatatatttatctcttcattatatagcacgcgtgttttccaatttttccacatcccatataatacaggattataatctcgttcgaacatacgagaaagtggataaaacaatagttgattttttatctaggttgccaaatttattccatattttagaatatggggaaaatattctacatatttattctatggatgatgctaatacgaatattataattttttttctagatagagtattaaatattaataagaacgggtcatttatacacaatctcgggttatcatcatccattaatataaaagaatatgtatatcaattagttaataatgatcatccagataataggataagactaatgcttgaaaatggacgtagaacaagacattttttgtcctatatatcagatacagttaatatctatatatgtattttaataaatcatggattttatatagatgccgaagacagttacggttgtacattattacatagatgtatatatcactataagaaatcagaatcagaatcatacaatgaattaattaagatattgttaaataatggatcagatgtagataaaaaagatacgtacggaaacacaccttttatcctattatgtaaacacgatatcaacaacgtggaattgtttgagatatgtttagagaatgctaatatagactctgtagactttaatagatatacacctcttcattatgtctcatgtcgtaataaatatgattttgtaaagttattaatttctaaaggagcaaatgttaatgcgcgtaataaattcggaactactccattttattgtggaattatacacggtatctcgcttataaaactatatttggaatcagacacagagttagaaatagataatgaacatatagttcgtcatttaataatttttgatgctgttgaatctttagattatctattatccagaggagttattgatattaactatcgtactatatacaacgaaacatctatttacgacgctgtcagttataatgcgtataatacgttggtctatctattaaacaaaaatggtgattttgagacgattactactagtggatgtacatgtatttcggaagcagtcgcaaacaacaacaaaataataatggaagtactattgtctaaacgaccatctttgaaaattatgatacagtctatgatagcaattactaaacataaacagcataatgcagatttattgaaaatgtgtataaaatatactgcgtgtatgaccgattatgatactcttatagatgtacagtcgctacagcaatataaatggtatattttaagatgtttcgatgaaatagatatcatgaagagatgttatataaaaaataaaactgtattccaattagttttttgtatcaaagacattaatactttaatgagatacggtaaacatccttctttcgtgaaatgcactagtctcgacgtatacggaagtcgtgtacgtaatatcatagcatctattagatatcgtcagagattaattagtctattatccaagaagctggatcctggagataaatggtcgtgttttcctaacgaaataaaatataaaatattggaaaactttaacgataacgaactatccacatatctaaaaatcttataaacattattaaaatataaaatctaagtaggataaaatcacactacatcattgtttccttttagtgctcgacagtgtatactatttttaacgctcataaataaaaatgaaaacgatttccgttgttacgttgttatgcgtactacctgctgttgtttattcaacatgtactgtacccactatgaataacgctaaattaacgtctaccgaaacatcgtttaatgataaccagaaagttacgtttacatgtgatcagggatatcattctttggatccaaatgctgtctgtgaaacagataaatggaaatacgaaaatccatgcaaaaaaatgtgcacagtttctgattatgtctctgaactatataataaaccgctatacgaagtgaattccaccatgacactaagttgcaacggcgaaacaaaatattttcgttgcgaagaaaaaaatggaaatacttcttggaatgatactgttacgtgtcctaatgcggaatgtcaacctcttcaattagaacacggatcgtgtcaaccagttaaagaaaaatactcatttggggaatatatgactatcaactgtgatgttggatatgaggttattggtgcttcgtacataagttgtacagctaattcttggaatgttattccatcatgtcaacaaaaatgtgatatgccgtctctatctaacggattaatttccggatctacattttctatcggtggcgttatacatcttagttgtaaaagtggttttacactaacggggtctccatcatccacatgtatcgacggtaaatggaatcccatactcccaatatgtgtacgaactaacgaaaaatttgatccagtggatgatggtcccgacgatgagacagatttgagcaaactctcgaaagacgttgtacaatatgaacaagaaatagaatcgttagaagcaacttatcatataatcatagtggcgttgacaattatgggcgtcatatttttaatctccgttatagtattagtttgttcctgtgacaaaaataatgaccaatataagttccataaattgctaccgtaaatataaatccgttaaaataattaataatttaataacaaacaagtatcaaaagattaaagacttatagctagaatcaattgagatgtcttcttcagtggatgttgatatctacgatgccgttagagcatttttactcaggcactattataacaagagatttattgtgtatggaagaagtaacgccatattacataatatatacaggctatttacaagatgcgccgttataccgttcgatgatatagtacgtactatgccaaatgaatcacgtgttaaacaatgggtgatggatacacttaatggtataatgatgaatgaacgcgatgtttctgtaagcgttggcaccggaatactattcatggaaatgtttttcgattacaataaaaatagtatcaacaatcaactaatgtatgatataattaatagcgtatctataattctagctaatgagagatatagaagcgcttttaacgacgatggtatatacatccgtagaaatatgattaacaagttgtacggatacgcatctctaactactattggcacgatcgctggaggtgtttgttattatctgttgatgcatctagttagtttgtataaataattatttcaatatactagttaaaattttaagattttaaatgtataaaaaactaataacgtttttatttgtaataggtgcattagcatcctattcgaataatgagtacactccgtttaataaactgagtgtaaaactctatatagatggagtagataatatagaaaattcatatactgatgataataatgaattggtgttaaattttaaagagtacacaatttctattattacagagtcatgcgacgtcggatttgattccatagatatagatgttataaacgactataaaattattgatatgtataccattgactcgtctactattcaacgcagaggtcacacgtgtagaatatctaccaaattatcatgccattatgataagtacccttatattcacaaatatgatggtgatgagcgacaatattctattactgcagagggaaaatgctataaaggaataaaatatgaaataagtatgatcaacgatgatactctattgagaaaacatactcttaaaattggatctacttatatatttgatcgtcatggacatagtaatacatattattcaaaatatgatttttaaaaatttaaaatatattatcacttcagtgacagtagtcaaataacaaacaacaccatgagatatattataattctcgcagttttgttcattaatagtatacatgctaaaataactagttataagtttgaatccgtcaattttgattccaaaattgaatggactggggatggtctatacaatatatcccttaaaaattatggcatcaagacgtggcaaacaatgtatacaaatgtaccagaaggaacatacgacatatccgcatttccaaagaatgatttcgtatctttctgggttaaatttgaacaaggcgattataaagtggaagagtattgtacgggactatgcgtcgaagtaaaaattggaccaccgactgtaacattgactgaatacgacgaccatatcaatttgtacatcgagcatccgtatgctactagaggtagcaaaaagattcctatttacaaacgcggtgacatgtgtgatatctacttgttgtatacggctaacttcacattcggagattctaaagaaccagtaccatatgatatcgatgactacgattgcacgtctacaggttgcagcatagactttgtcacaacagaaaaagtgtgcgtgacagcacagggagccacagaagggtttctcgaaaaaattactccatggagttcgaaagtatgtctgacacctaaaaagagtgtatatacatgcgcaattagatccaaagaagatgttcccaatttcaaggacaaaatggccagagttatcaagagaaaatttaatacacagtctcaatcttatttaactaaatttctcggtagcacatcaaatgatgttaccacttttcttagcatgcttaacttgactaaatattcataactaatttttattaatgatacaaaaacgaaataaaactgcatattatacactggttaacgcccttataggctctaaccattttcaagatgaggtccctgattatagtccttctgttcccctctatcatctactccatgtctattagacgatgtgagaagactgaagaggaaacatggggattgaaaatagggttgtgtataattgccaaagatttctatcccgaaagaactgattgcagtgttcatctcccaactgcaagtgaaggattgataactgaaggcaatggattcagggatatacgaaacaccgataaattataaaaaaagcaatgtgtccgctgtttccgttaataatactattttcgtaactggcggattattcataaataactctaatagcacgatcgtggttaacaatatggaaaaacttgacatttataaagacaaacaatggtcgattatagaaatgcctatggctagggtatatcacggcattgactcgacatttggaatgttatattttgccggaggtctatccgttaccgaacaatatggtaatttagagaaaaacaacgagatatcttgttacaatcctagaacgaataagtggtttgatatttcatatactatttataagatatccatatcatcattgtgtaaactaaataacgtcttctatgtatttagtaaggacattggatatgtggaaaagtatgatggtgcatggaagttagtacatgatcgtctccccgctataaaggcattatcaacttctccttattgattgaaaatgaaaatataaatagtttttatgtatagcagtattaccctatagttttattgcttactactaacatggatacagatgttacaaatgtagaagatatcataaatgaaatagatagagagaaagaagaaatactaaaaaatgtagaaattgaaaataataaaaacattaacaagaatcatcccaatgaatatattagagaagcactcgttattaataccagtagtaatagtgattccattgataaagaagttatagaatgtatcagtcacgatgtaggaatatagatcatatctactaatttttataatcgatacaaaacataaaaaacaactcgttattacatagcaggcatggaatccttcaagtattgttttgataacgatggcaagaaatggattatcggaaatactttatattctggtaattcaatactctataaggtcagaaaaaatttcactagttcgttctacaattacgtaatgaagatagatcacaaatcacacaagccattgttgtctgaaatacgattctatatatctgtattggatcctttgactatcgacaactggacacgggaacgtggtataaagtatttggctattccagatctgtatggaattggagaaaccgatgattatatgttcttcgttataaagaattcgggaagagtattcgccccaaaggatactgaatcagtcttcgaagcatgcgtcactatgataaacacgttagagtttatacactctcgaggatttacccatggaaaaatagaaccgaggaatatactgattagaaataaacgtctttcactaattgactattctagaactaacaaactatacaagagtggaaactcacatatagattacaacgaggacatgataacttcaggaaatatcaattatatgtgtgtagacaatcatcttggagcaacagtttcaagacgaggagatttagaaatgttgggatattgcatgatagaatggttcggtggcaaacttccatggaaaaacgaaagtagtataaaagtaataaaacaaaaaaaagaatataaaaaatttatagctactttctttgaggactgttttcctgaaggaaatgaacctctggaattagttagatatatagaattagtatacacgttagattattctcaaactcctaattatgacagactacgtaaactgtttatacaagattgaaattatattcttttttttatagagtgtggtagtgttacggatatctaatattaatattagactatctctatcgcgctacacgaccaatatcgattactatggatatcttctatgaaaggagagaatgtatttatttctccagcgtcaatctcgtcagtattgacaatactgtattatggagctaatggatccactgctgaacagctatcaaaatatgtagaaacggaggagaacacggataaggttagcgctcagaatatctcattcaaatccatgaataaagtatatgggcgatattctgccgtgtttaaagattcctttttgagaaaaattggcgataagtttcaaactgttgacttcactgattgtcgcactatagatgcaatcaacaagtgtgtagatatctttactgaggggaaaatcaatccactattggatgaaccattgtctcctagcaattagtgccgtatactttaaagcaaaatggttgacgccattcgaaaaggaatttaccagtgattatcccttttacgtatctccgacggaaatggtagacgtaagtatgatgtctatgtacggcaaggcatttaatcacgcatctgtaaaagaatcattcggcaacttttcaatcatagaactgccatatgttggagatactagtatgatggtcattcttccagacaagattgatggattagaatccatagaacaaaatctaacagatacaaattttaagaaatggtgtgactttatggatgctatgtttatagatgttcacattcccaagtttaaggtaacaggctcgtataatctggtggatactctagtaaagtcaggactgacagaggtgttcggttcaactggagattatagcaatatgtgtaatttagatgtgagtgtcgacgctatgatccacaaaacgtatatagatgtcaatgaagagtatacagaagcagctgcagcaacttctgtactagtggcagactgtgcatcaacaattacaaatgagttctgtgcagatcatccgttcatctatgtgattaggcatgttgatggaaaaattcttttcgttggtagatattgctctccgacaactaattgttaaccattttttttaaaaaaaatagaaaaaacatgtggtattagtgcaggtcgttgttcttccaattgcaattggtaagatgacggccaactttagtacccacgtcttttcaccacagcactgtggatgtgacagactgaccagtattgatgacgtcaaacaatgtttgactgaatatatttattggtcgtcctatgcataccgcaacaggcaatgcgctggacaattgtattccacactcctctcttttagagatgatgcggaattagtgttcatcgacattcgcgagctggtaaaaaatatgccgtgggatgatgtcaaagattgtacagaaatcatccgttgttatataccggatgagcaaaaaaccatcagagagatttcggccatcatcggactttgtgcatatgctgctacttactggggaggtgaagaccatcccactagtaacagtctgaacgcattgtttgtgatgcttgagatgctaaattacgtggattataacatcatattccggcgtatgaattgatgagttgtacatcttgacattttctttcttctcttctccctttcttctcttctcccttcctccctcttctccctttcccagaaacaaacttttttacccactataaaataaaatgagtatactacctattatatttcttcctatatttttttattcttcattcgttcagacttttaacgcgtctgaatgtatcgacaaagggcaatattttgcatcattcatggagttagaaaacgagccagtaatcttaccatgtcctcaaataaatacgctatcatccggatataatatattagatattttatgggaaaaacgaggagcggataatgatagaattataccgatagataatggtagcaatatgctaattctgaacccgacacaatcagactctggtatttatatatgcattaccacgaacgaaacctactgtgacatgatgtcgttaaatttgacaatcgtgtctgtctcagaatcaaatatagatcttatctcgtatccacaaatagtaaatgagagatctactggcgaaatggtatgtcccaatattaatgcatttattgctagtaacgtaaacgcagatattatatggagcggacatcgacgccttagaaataagagacttaaacaacggacacctggaattattaccatagaagatgttagaaaaaatgatgctggttattatacatgtgttttagaatatatatacggtggcaaaacatataacgtaaccagaattgtaaaattagaggtacgggatagaataataccttctactatgcaattaccagatggcattgtaacttcaataggtagtaatttgactattgcatgcagagtatcgttgagacctcccacaacggacaccgacgtcttttggataagtaatggtatgtattacgaagaagatgatggggacggaaacggtagaataagtgtagcaaataaaatctatatgaccgataagagacgtgttattacatcccggttaaacattaatcctgtcaaggaagaagatgctacaacgtttacgtgtatggcgtttactattcctagcatcagcaaaacagttactgttagtataacgtgaatgtatgttgttacatttccatgtcaattgagtttataagaatttttatacattatcttccaacaaacaattgacgaacgtattgctatgattaactcccacgatactatgcatattattaatcattaacttgcagactatacctagtgctattttgacatactcgtgttcttgtgtaattgcggtatctatattattaaagtacgtaaatctagctatagttttattatttaattttagataatataccgtctccttatttttaaaaattgccacatcctttattaaatcatgaatgggaatttctatgtcatcgttagtatattgtgaacaacaagagcagatatctataggaaagggtggaatgcgatacattgatctatgtagttttaaaacacacgcgaactttgaagaatttatataaatcattccatcgatacatccttctatgttgacatgtatatatccaggaattcttttattaatgtcaggaaatgtataaactaaaacattgcccgaaagcggtgcctctatctgcgttatatccgttcttaacttacaaaatgtaaccaatacctttgcatgacttgttttgttcggcaacgttagtttaaacttgacgaatggattaattacaatagcatgatccgcgcatctattaagtttttttactttaacgcccttgtatgtttttacagagactttatctaaatttctagtgcttgtatgtgttataaatataacgggatatagaaccgaatcacctaccttagatacccaattacattttatcagatccagataataaacaaattttgtcgccctaactaattctatattgttatatattttacaattggttatgatatcatgtaataacttggagtctaacgcgcatcgtcgtacgtttatacaattgtgatttagtgtagtatatctacacatgtatttttccgcactatagtattctggactagtgataaaactatcgttatatctgtcttcaatgaactcatcgagatattgctctctgtcatattcatacacctgcataaactttctagacatcttacaatccgtgttattttaggatcatatttacatatttacgggtatatcaaagatgttagattagttaatgggaatcgtctataataatgaatattaaacaattatatgaggacttttaccacaaagcatcataaaaatgagtcgtcgtctgatttatgttttaaatatcaaccgcaaatcaactcataaaatacaagagaatgaaatatatacatattttagtcattgcaatatagaccatacttctacagaacttgattttgtagttaaaaactatgatctaaacagacgacaacctgtaactgggtatactgcactacactgctatttgtataataattactttacaaacgatgtactgaagatattattaaatcatgacgtaaatgtaacgatgaaaaccagtagcggacgtatgcctgtttatatattgcttactagatgttgtaatatttcacatgatgtagtgatagatatgatagacaaagataaaaaccacttattacatagagactattccaacctattactagagtatataaaatctcgttacatgttattgaaggaagaggatatcgatgagaacatagtatccactttattagataagggaatcgatcctaactttaaacaagacggatatacagcgttacattattattatttgtgtctcgcacacgtttataaactaggtgagtgtagaaaaccgataacgataaaaaaggccaagcgaattatttctttgtttatacaacatggagctaatctaaacgcgttagataattgtggtaatacaccattccatttgtatcttagtattgaaatgtgtaataatattcatatgactaaaatgctgttgacttttaatccgaatttcaaaatatgtaataatcatggattaacgcctatactatgttatataacttccgactacatacaacacgatattcttgttatgttaatacatcactatgaaacaaatgttggagaaatgccgatagatgagcgtcgtatgatcgtattcgagtttatcaaaacatattctacacgtccggcagattcgataacttatttgatgaataggtttaaaaatataaatatttatacccgctatgaaggaaagacattattacacgtagcatgtgaatataataatacacaagtaatagattatcttatacgtatcaacggagatataaatgcgttaaccgacaataacaaacacgctacacaactcattatagataacaaagaaaattccccatataccattaattgtttactgtatatacttagatatattgtagataagaatgtgataagatcgttggtggatcaacttccatctctacctatcttcgatataaaatcatttgagaaattcatatcctactgtatacttttagatgacacattttacgataggcacgttaagaatcgcgattctaaaacgtatcgatacgcattttcaaaatacatgtcgtttgataaatacgatggtataataactaaatgtcacgacgaaacaatgttactcaaactgtccactgttctagacactacactatatgcagttttaagatgtcataattcgagaaagttaagaagatacctcaacgagttaaaaaaatataataacgataagtcctttaaaatatattctaatattatgaatgagagataccttaatgtatattataaagatatgtacgtgtcaaaggtatatgataaactatttcctgttttcacagataaaaattgtctactaacattactaccttcagaaattatatacgaaatattatacatgctgacaattaacgatctttataatatatcgtatccacctaccaaagtatagttgtatttttctcatgcgatgtgtgtaaaaaaactgatattatataaatattttagtgccgtataataaagatgacgatgaaaatgatggtacatatatatttcgtatcattattgttattgctattccacagttacgccatagacatcgaaaatgaaatcacagaattcttcaataaaatgagagatactctaccagctaaagactctaaatggttgaatccagcatgtatgttcggaggcacaatgaatgatatagccgctctaggagagccattcagcgcaaagtgtcctcctattgaagacagtcttttatcgcacagatataaagactatgtggttaaatgggagaggctagaaaagaatagacggcgacaggtttctaataaacgtgttaaacatggtgatttatggatagccaactatacatctaaattcagtaaccgtaggtatttgtgcaccgtaactacaaagaatggtgactgtgttcagggtatagttagatctcatattaaaaaacctccttcatgcattccaaaaacatatgaactaggtactcatgataagtatggcatagacttatactgtggaattctttacgcaaaacattataataatataacttggtataaagataataaggaaattaatatcgacgacattaagtattcacaaacgggaaaggaattaattattcataatccagagttagaagatagcggaagatacgactgttacgttcattacgacgacgttagaatcaagaatgatatcgtagtatcaagatgtaaaatacttacggttataccgtcacaagaccacaggtttaaactaatactagatccgaaaatcaacgtaacgataggagaacctgccaatataacatgcactgctgtgtcaacgtcattattgatcgacgatgtactgattgaatgggaaaatccatccggatggcttataggattcgattttgatgtatactctgttttaactagtagaggcggtatcaccgaggcgaccttgtactttgaaaatgttactgaagaatatataggtaatacatataaatgtcgtggacacaactattattttgaaaaaacccttacaactacagtagtattggagtaaatatacaatgcatttttatatacattactgaattattattactgaattattattactgaattattattaattatatcgtatttgtgctatagaatggatgaagatacgcgactatctaggtatttgtatctcaccgatagagaacatataaatgtagactctattaaacagttgtgtaaaatatcagatcctaatgcatgttatagatgtggatgtacggctttacatgagtacttttataattatagatcagtcaacggaaaatacaagtatagatacaacggttactatcaatattattcatctagcgattatgaaaattataatgaatattattatgatagaactggtatgaacagtgagagtgataatatatcaatcaaaacagaatatgaattctatgatgaaacacaagatcaaagtacacaactagtaggttacgacattaaactcaaaaccaatgaggatgattttatggctatgatagatcagtgggtgtccatgattatatagatgaatcaattaataaagtagtatatggaagagagtctcacgtaagatggcgggatatatggcaagaacataatgatggcgtatacagtataggaaaggagtgcatagataatatatacgaagacaaccataccgtagacgaattctacaagatagacagcgtatcagatgtagatgacgcggaacacatatctccgataactaaaaaaccatagaatcagttgatgataatacctacatttctaatcttccgtataccatcaaatacaaaatattcgagcaacaataagtattttttatacctttaaaactgataaataaattttttctagtgatattttggcaagatgagaatcctatttctcatcgctttcatgtatgggtgtgttcactcatatgttaacgcggttgaaaccaaatgtccaaatctagacattgtaacatcttctggagaatttcattgttcaggatgtgtggaacatatgcctgagtttagctatatgtattggttggcaaaggatatgaaatcggacgaggataccaagtttatagaacatctgggtgatggcatcaaagaagatgaaaccgttcgtaccacagatagtggaatcgtcactctacgtaaagtccttcatgtgactgatactaataaatttgataattataggttcacttgtgtcctcgctacgctagatggcatttataaaaagaatgtttgctgaagtagttgtgtgctactatttttatttatgatataatctaatggaattaatttgaattgatatttatccaatactaaagattatattagaatcaaattaatcttttatacgagaaaaaataacgacatacgtcgtcaacaaattaaactttttatttattagttaactagcttatagaacttgctcattgttatgtttctaaaacgggtacggcatataggacaattatccgacgcaccggtttctcttcgtgttctatgccatatattgatgcatgttatgcaaaatatatgagtacacgaatccaataaaccaaagtatctatcgttttgagtaaacaacttcatagcaaattccacattctttttctttacttactctatacacgtcctcgtatttatttagtattttgatgatatccaactcagaaatggttgttgtattattgggtgtatttggagtataggtattattagctatgtaccaatttaccaaccctcttaatattgattgataatcacatcggttatccaattaataactaaattgtagtgtatatatagaccatatatgtttctatttttttgacagttacgtatagtttcagtaagttttgattgttgtattcctgtatctctagataagttagtcatatagtcccttccggcgatacgttttttccaagcccgaaattgattagccaaatgtgtatttatttttgtgatattgatataatatttcggataatgcatactgttagtcttatatcatttggttcatctatgtattgtaatattgttacatgatctatagatgatgtattgattttggcaggatcgaattccatatccgcgactaaacagtgaaaaaaatgtaaatactttttaaattttaaattagtaaaacttttttttattttttatgattccaaaaatactgaatacaaagtcctaaattataaatatggagatcatactaccacaacttattattatgtatacaaggccggtgtaatagatagatatatataattctattacaccggcagacaattaccgaccggtatttgtcgttaccaacataccgtataatatgtaatatacaattccataacccattgacagttgttatacatcaaaattgcaattcttttgattacgatgttataagaatgtagttaattgatgtatgatgttaatgtgtcctctttcctcttataacatcgtaatcaaaaacttttttataatatatacctaataatgtgtcttaatagttctcgtgattcgtcaaacaatcattcttataaaatataataaagcaacgtaaaaacacataaaaataagcgtaactaataagacaatggatatttacgacgataaaggtctacagactattaaactgtttaataatgaatttgattgtataaggaatgacatcagagaattatttaaacatgtaactgattccgatagtatacaacttccgatggaagacaattctgatattatagaaaatatcagaaaaatactatatagacgattaaaaaatgtagaatgtgttgacatcgataacacaataacttttatgaaatacgatccaaatgatgataataagcgtacgtgttctaattgggtacccttaactaataactatatggaatattgtctagtaatatatttggaaacaccgatatgtggaggcaaaataaaattataccaccctacaggaaatataaagtcggataaggatattatgtttgcaaagactctagactttaaatcaacgaaagtgttaactggacgtaaaacaattgccgttctagacatatccgtttcatataatagatcaatgactactattcactacaacgacgacgttgatatagatatacatactgataaaaatggaaaagagttatgttattgttatataacaatagatgatcattacttggttgatgtggaaactataggagttatagtcaatagatctggaaaatgtctgttagtaaataaccatctaggtataggtatcgttaaagataaacgtataagcgatagttttggagatgtatgtatggatacaatatttgacttttctgaagcacgagagttattttcattaactaatgatgataacaggaatatagcatgggacactgataaactagacgatgatacagatatatggactcccgtcacagaagatgattacaaatttctttctagactagtattgtatgcaaaatctcaatcggatactgtatttgactattatgttcttactggtgatacggaaccacccactgtattcattttcaaggtaactagattttactttaatatgccgaaataaaaaatttttgtataatatctagaggtagaggtattgtttagataaatacaaataacatagatacatcgcatacttagcatttttataaatatacataagacatacactttatacatttttgtaaaaatactcataaaaaaatttataaaaattatggcacaaccatatcttgtataggtagtttagttcgtcgagtgaacctataaacagataatagacaacacataataatgcctactaatacaagcataataccgggagatgggatatatgacgttgtagtgtttgggttttctgaacgttgatagtctactaatactacatgctgacatctaatgcctgtataaccatgagagcatctacaatacataccgtcaatatctctagcgtggatacagtcaccgtgtaaacaatatccatctccctctggaccgcataatctgatagctggaatatctgttgtagcgtttgtaatttctggcaatgtcgtttcgatagcgttaccactatcggcgaatgatctgattatcatagcagcgaacaacaacatcagataatttatcaacatttttgatggattctgtgtttatgctgtttctcagtgtgtgtttatgacaagattgggaattttatattattaattcagtaatataaactaataatatattgttaattgtgtaaataatataaaaataacaatacaatattgaatgtgttgctgttaaaaatgtatgtgttaatataatagaataaaataaatgagtatgatcattttagataacgattgattttatcattaccgcttcattcttatattctttgcttacggaacctatatttagaaacatctactaacaattttttatgcttgcattattaatggtatgtaatatgattgattgtgtacgcaataccaatttgttaagtatgaatacggggtacaaacataaattgaaatttaacattatttatttatgatatatatcgttatcgttaggtctataccatggatatctttaaagaactaatcttaaaacaccctgatgaaaatgttttgatttctccagtttccattttatctactttatctattctaaatcatggagcagctggttctacagctgaacaactatcaaaatatatagagaatatgaatgagaatacacccgatgacaataatgatgacatggaggtagatattccgtattgtgcgacactagctaccgcaaataaaatatacggtagcgatagtatcgagttccacgcctccttcctacaaaaaataaaagacgattttcaaactgtaaactttaataatgctaaccaaacaaaggaactaatcaacgaatgggttaagacaatgacaaatggtaaaattaattccttattgactagtccgctatccattaatactcgtatgacagttgttagcgccgtccattttaaagcaatgtggaaatatccattttctaaacatcttacatatacagacaagttttatatttctaagaatatagttaccagcgttgatatgatggtgggtaccgagaataacttgcaatatgtacatattaatgaattattcggaggattctctattatcgatattccatacgagggaaactctagtatggtaattatactaccggacgacatagaaggtatatataacatagaaaaaaatataacagatgaaaaatttaaaaaatggtgtggtatgttatctactaaaagtatagacttgtatatgccaaagtttaaagtggaaatgacagaaccgtataatctggtaccgattttagaaaatttaggacttactaatatattcggatattatgcagattttagcaagatgtgtaatgaaactatcactgtagaaaaatttctacatacgacgtttatagatgttaatgaggagtatacagaagcatcggccgttacaggagtatttacgattaacttttcgatggtatatcgtacgaaggtctacataaaccatccattcatgtacatgattaaagacaccacaggacgtatactttttatagggaaatactgctatccgcaataaatataaacaaatagacttttataaagagtcttcaacgataagtatatcgacatactacttatgctgcgaaagattctgaacgagaacgactatctcaccctcttggatcatatccgcactgctaaatactaaatctccactacactttttatcatcttatgaggaatgattgccttcgtgaaataggaataattagcaccagaatagctatggattattgtggtagagagtgcactattctatgtcgtctactggatgaagatgtgacgtacaaaaaaataaaactagaaattgaaacgtgtcacaacttatcaaaacatatagatagacgaggaaacaatgcgctacattgttacgtctccaataaatgcgatacagacattaagattgttctctcgcggagtcgagagactttgtagaaacaacgaaggattaactccgctaggagtatacagtaagcatagatacgtaaaatctcagattgtgcatctactgatatccagctattcaaattcctctaacgaactcaagtcgaatataaatgatttcgatctgtattcggataatatcgacttacgtctgctaaaatacctaattgtggataaacggatacgtccgtccaagaatacgaattatgcaatcaatggtctcggattggtggatatatacgtaacgacgcctaatccgagaccagaagtattgctatggcttcttaaatcagaatgttacagcaccggttacgtatttcgtacctgtatgtacgacagtgatatgtgtaagaactctcttcattactatatatcgtctcatagagaatctcaatctctatccaaggatgtaattaaatgtttgatcgataacaatgtttccatccatggcagagacgaaggaggatctttacccatccaatactactggtctttctcaaccatagatatagagattgttaaattattattaataaaggatgtggacacgtgtagagtatacgacgtcagccctatattagaggcgtattatctaaacaagcgatttagagtaaccccatataatgtagacatggaaatcgttaatcttcttattgagagacgtcatactcttgtcgacgtaatgcgtagtattacttcgtacgattccagagaatataaccactacatcatcgataacattctaaagagatttagacaacaggatgaatccatcgtacaagccatactgataaactacttacattacggcgatatggtcgttcgatgcatgttagataacggacaacaactatcctctacacgactactttgttaataataatctcgtcgatgtaaacgtcgtaaggtttatcgtggaaaatatggacacgcggctgtaaatcacgtatcgaacaatggccgtctatgtatgtacggtctgatattatcgagatttaataattgcgggtatcactgttatgaaaccatactgatagatgtatttgatatactaagcaagtacatggatgatatagatatgatcgataactctactatattacgcggtcgatgtcaataatatacaatttgcaaagcggttattggaatatggagcgagtatcacgctcgataatcaatacggccatccagaaaagcagttacagaagagaaaacaaaacgaaatcgttgttctacaagatgtctctccctacgacgattactacgtaaaaaagatactagcctactgcctattaagggacgagtcattcgcggaactacatagtaaattctgtttaaacgaggactataaaagtgtatttatgaaaaatatatcattcgataagatagattccatcatcgtgacataagtcgcctcaaagagattcgaatctccgacaccgacctgtatacggtatcacagctatcttaaagccatacattcagacagtcacatttcatttcccatgtacgacgatctcatagaacagtgccatctatcgatggagcgtaaaagtaaactcgtcgacaaagcactcaataaattagagtctaccatcggtcaatctagactatcgtatttgcctccggaaattatgcgcaatatcatctaaacagtatgttgtacggaaagaaccattacaaatattatccatgatagaaagaaaatatctatatgattggagaagtaggaaacaggaacaagacaacgattactacattattaaatcatgaagtccgtattatactcgtatatattgtttctctcatgtataataataaacggaagagatatagcaccgcatgcaccatccgatggaaagtgtaaagacaacgaatacaaacgccataatttgtgtccgggaacatacgcttccagattatgcgatagcaagactaacacacgatgtacgccgtgtggttcgggtaccttcacatctcgcaataatcatttacccgcttgtctaagttgtaacggaagacgcgatcgtgtaacacgactcacaatagaatctgtgaatgctctcccggatattattgtcttctcaaaggatcatccggatgcaaggcatgtgtttcccaaacaaaatgtggaataggatacggagtatccggagacgtcatctgttctccgtgtggtctcggaacatattctcacaccgtctcttccgcagataaatgcgaacccgtacccagaaatacgtttaactatatcgatgtggaaattaacctgtatccagttaacgacacgtcgtgtactcggacgaccactaccggtctcagcgaatccatctcaacgtcggaactaactattactatgaatcataaagactgtaatcccgtatttcgtgatggatacttctccgttcttaataaggtagcgacttcaggtttctttacaggagaaaggtgtgcactctgaatttcgagattaaatgcaataacaaagattcttcctccaaacagttaacgaaagcaaagaatgatactatcatgccgcattcggagacagtaactctagtgggcgacatctatatactatatagtaataccaatactcaagactacgaaactgatacaatctcttatcatgtgggtaatgttctcgatgtcgatagccatatgcccggtagttgcgatatacataaactgatcactaattccaaacccacccactttttatagtaagtttttcacccataaataataaatacaataattaatttctcgtaaaagtagaaaatatattctaatttattgcacggtaaggaagtagaatcataaagaacagtactcaatcaatagcaattatgaaacaatatatcgtcctggcatgcatgtgcctggcggcagctgctatgcctgccagtcttcagcaatcatcctcatcctcctcctcgtgtacggaagaagaaaacaaacatcatatgggaatcgatgttattatcaaagtcacaaagcaagaccaaacaccgaccaatgataagatttgccaatccgtaacggaaattacagagtccgagtcagatccagatcccgaggtggaatcagaagatgattccacatcagtcgaggatgtagatcctcctaccacttattactccatcatcggtggaggtctgagaatgaactttggattcaccaaatgtcctcagattaaatccatctcagaatccgctgatggaaacacagtgaatgctagattgtccagcgtgtccccaggacaaggtaaggactctcccgcgatcactcatgaagaagctcttgctatgatcaaagactgtgaagtgtctatcgacatcagatgtagcgaagaagagaaagacagcgacatcaagacccatccagtactcgggtctaacatctctcataagaaagtgagttacgaagatatcatcggttcaacgatcgtcgatacaaaatgcgtcaagaatctagagtttagcgttcgtatcggagacatgtgcaaggaatcatctgaacttgaggtcaaggatggattcaagtatgtcgacggatcggcatctgaaggtgcaaccgatgatacttcactcatcgattcaacaaaactcaaagcgtgtgtctgaatcgataactctattcatctgaaattggatgagtagggttaatcgaacgattcaggcacaccacgaattaaaaaagtgtaccggacactatattccggtttgcaaaacaaaaatgttcttaactacattcacaaaaagttacctctcgcgacttcttctttttctgtctcaatagtgtgatacgattatgacactattcctattcctattcctatttcctttcagagtatcacaaaaatattaaacctctttctgatggtctcataaaaaaagttttacaaaaatatttttattctctttctctctttgatggtctcataaaaaaagttttacaaaaatatttttattctctttctctctttgatggtctcataaaaaaagttttacaaaaatatttttattctctttctctctttgatggtctcataaaaaaagttttacaaaaatatttttattctctttctctctttgatggtctcataaaaaaagttttacaaaaatatttttattctctttctctctttgatggtctcataaaaaaagttttacaaaaatatttttattctctttctctctttgatggtctcataaaaaaagttttacaaaaatatttttattctctttctctctttgatggtctcataaaaaaagttttacaaaaatatttttattctctttctctctttgatggtctcataaaaaaagttttacaaaaatatttttattctctttctctctttgatggtctcataaaaaaagttttacaaaaatatttttattctctttctctctttgatggtctcataaaaaaagttttacaaaaatatttttattctctttctctctttgatggtctcataaaaaaagttttacaaaaatatttttattctctttctctctttgatggtctcataaaaaagttttacaaaaatatttttattctctttctctctttgatggtctcataaaaaagttttacaaaaatatttttattctctttctctctttgatggtctcataaaaaaagttttacaaaaatatttttattctctttctctctttgatggtctcataa

SEQ ID NO: 69 - DNA, 196182 bp, Artificial Sequence
  GLV-1h326 (SE-mTyr)
ttatgagaccatcaaagagagaaagagaataaaaatatttttgtaaaactttttttatgagaccatcaaagagagaaagagaataaaaatatttttgtaaaacttttttatgagaccatcaaagagagaaagagaataaaaatatttttgtaaaacttttttatgagaccatcaaagagagaaagagaataaaaatatttttgtaaaactttttttatgagaccatcaaagagagaaagagaataaaaatatttttgtaaaactttttttatgagaccatcaaagagagaaagagaataaaaatatttttgtaaaactttttttatgagaccatcaaagagagaaagagaataaaaatatttttgtaaaactttttttatgagaccatcaaagagagaaagagaataaaaatatttttgtaaaactttttttatgagaccatcaaagagagaaagagaataaaaatatttttgtaaaactttttttatgagaccatcaaagagagaaagagaataaaaatatttttgtaaaactttttttatgagaccatcaaagagagaaagagaataaaaatatttttgtaaaactttttttatgagaccatcaaagagagaaagagaataaaaatatttttgtaaaactttttttatgagaccatcaaagagagaaagagaataaaaatatttttgtaaaactttttttatgagaccatcaaagagagaaagagaataaaaatatttttgtaaaactttttttatgagaccatcaaagagagaaagagaataaaaatatttttgtaaaactttttttatgagaccatcagaaagaggtttaatatttttgtgatactctgaaaggaaataggaataggaataggaatagtgtcataatcgtatcacactattgagacagaaaaagaagaagtcgcgagaggtaactttttgtgaatgtagttaagaacatttttgttttgcaaaccggaatatagtgtccggtacacttttttaattcgtggtgtgcctgaatcgttcgattaaccctactcatccaatttcagatgaatagagttatcgattcagacacacgctttgagttttgttgaatcgatgagtgaagtatcatcggttgcaccttcagatgccgatccgtcgacatacttgaatccatccttgacctcaagttcagatgattccttgcacatgtctccgatacgaacgctaaactctagattcttgacgcattttgtatcgacgatcgttgaaccgatgatatcttcgtaactcactttcttatgagagatgttagacccgagtactggatgggtcttgatgtcgctgtctttctcttcttcgctacatctgatgtcgatagacacttcacagtctttgatcatagcaagagcttcttcatgagtgatcgcgggagagtccttaccttgtcctggggacacgctggacaatctagcattcactgtgtttccatcagcggattctgagatggatttaatctgaggacatttggtgaatccaaagttcattctcagacctccaccgatgatggagtaataagtggtaggaggatctacatcctcgactgatgtggaatcatcttctgattccacctcgggatctggatctgactcggactctgtaatttccgttacggattggcaaatcttatcattggtcggtgtttggtcttgctttgtgactttgataataacatcgattcccatatgatgtttgttttcttcttccgtacacgaggaggaggatgaggatgattgctgaagactggcaggcatagcagctgccgccaggcacatgcatgccaggacgatatattgtttcataattgctattgattgagtactgttctttatgattctacttccttaccgtgcaataaattagaatatattttctacttttacgagaaattaattattgtatttattatttatgggtgaaaaacttactataaaaagtgggtgggtttggaattagtgatcagtttatgtatatcgcaactaccgggcatatggctatcgacatcgagaacattacccacatgataagagattgtatcagtttcgtagtcttgagtattggtattactatatagtatatagatgtcgcccactagagttactgtctccgaatgcggcatgatagtatcattctttgctttcgttaactgtttggaggaagaatctttgttattgcatttaatctcgaaattcagagtgcacacctttctcctgtaaagaaacctgaagtcgctaccttattaagaacggagaagtatccatcacgaaatacgggattacagtctttatgattcatagtaatagttagttccgacgttgagatggattcgctgagaccggtagtggtcgtccgagtacacgacgtgtcgttaactggatacaggttaatttccacatcgatatagttaaacgtatttctgggtacgggttcgcatttatctgcggaagagacggtgtgagaatatgttccgagaccacacggagaacagatgacgtctccggatactccgtatcctattccacattttgtttgggaaacacatgccttgcatccggatgatcctttgagaagacaataatatccgggagagcattcacagattctattgtgagtcgtgttacacgatcgcgtcttccgttacaacttagacaagcgggtaaatgattattgcgagatgtgaaggtacccgaaccacacggcgtacatcgtgtgttagtcttgctatcgcataatctggaagcgtatgttcccggacacaaattatggcgtttgtattcgttgtctttacactttccatcggatggtgcatgcggtgctatatctcttccgtttattattatacatgagagaaacaatatatacgagtataatacggacttcatgatttaataatgtagtaatcgttgtcttgttcctgtttcctacttctccaatcatatagatattttctttctatcatggataatatttgtaatggttctttccgtacaacatactgtttagatgatattgcgcataatttccggaggcaaatacgatagtctagattgaccgatggtagactctaatttattgagtgctttgtcgacgagtttacttttacgctccatcgatagatggcactgttctatgagatcgtcgtacatgggaaatgaaatgtgactgtctgaatgtatggctttaagatagctgtgataccgtatacaggtcggtgtcggagattcgaatctctttgaggcgacttatgtcacgatgatggaatctatcttatcgaatgatatatttttcataaatacacttttatagtcctcgtttaaacagaatttactatgtagttccgcgaatgactcgtcccttaataggcagtaggctagtatcttttttacgtagtaatcgtcgtagggagagacatcttgtagaacaacgatttcgttttgttttctcttctgtaactgcttttctggatggccgtattgattatcgagcgtgatactcgctccatattccaataaccgctttgcaaattgtatattattgacatcgaccgcgtaatatagtagagttatcgatcatatctatatcatccatgtacttgcttagtatatcaaatacatctatcagtatggtttcataacagtgatacccgcaattattaaatctcgataatatcagaccgtacatacatagacggccattgttcgatacgtgatttacagccgcgtgtccatattttccacgataaaccttacgacgtttacatcgacgagattattattaacaaagtagtcgtgtagaggatagttgttgtccgttatctaacatgcatcgaacgaccatatcgccgtaatgtaagtagtttatcagtatggcttgtacgatggattcatcctgttgtctaaatctctttagaatgttatcgatgatgtagtggttatattctctggaatcgtacgaagtaatactacgcattacgtcgacaagagtatgacgtctctcaataagaagattaacgatttccatgtctacattatatggggttactctaaatcgcttgtttagataatacgcctctaatatagggctgacgtcgtatactctacacgtgtccacatcctttattaataataatttaacaatctctatatctatggttgagaaagaccagtagtattggatgggtaaagatcctccttcgtctctgccatggatggaaacattgttatcgatcaaacatttaattacatccttggatagagattgagattctctatgagacgatatatagtaatgaagagagttcttacacatatcactgtcgtacatacaggtacgaaatacgtaaccggtgctgtaacattctgatttaagaagccatagcaatacttctggtctcggattaggcgtcgttacgtatatatccaccaatccgagaccattgattgcataattcgtattcttggacggacgtatccgtttatccacaattaggtattttagcagacgtaagtcgatattatccgaatacagatcgaaatcatttatattcgacttgagttcgttagaggaatttgaatagctggatatcagtagatgcacaatctgagattttacgtatctatgcttactgtatactcctagcggagttaatccttcgttgtttctacaaagtctctcgactccgcgagagaacaatcttaatgtctgtatcgcatttattggagacgtaacaatgtagcgcattgtttcctcgtctatctatatgttttgataagttgtgacacgtttcaatttctagttttatttttttgtacgtcacatcttcatccagtagacgacatagaatagtgcactctctaccacaataatccatagctattctggtgctaattattcctatttcacgaaggcaatcattcctcataagatgataaaaagtgtagtggagatttagtatttagcagtgcggatatgatccaagagggtgagatagtcgttctcgttcagaatctttcgcagcataagtagtatgtcgatatacttatcgttgaagactctttataaaagtctatttgtttatatttattgcggatagcagtatttccctataaaaagtatacgtcctgtggtgtctttaatcatgtacatgaatggatggtttatgtagaccttcgtacgatataccatcgaaaagttaatcgtaaatactcctgtaacggccgatgcttctgtatactcctcattaacatctataaacgtcgtatgtagaaatttttctacagtgatagtttcattacacatcttgctaaaatctgcataatatccgaatatattagtaagtcctaaattttctaaaatcggtaccagattatacggttctgtcatttccactttaaactttggcatatacaagtctatacttttagtagataacataccacaccattttttaaatttttcatctgttatatttttttctatgttatatataccttctatgtcgtccggtagtataattaccatactagagtttccctcgtatggaatatcgataatagagaatcctccgaataattcattaatatgtacatattgcaagttattctcggtacccaccatcatatcaacgctggtaactatattcttagaaatataaaacttgtctgtatatgtaagatgtttagaaaatggatatttccacattgctttaaaatggacggcgctaacaactgtcatacgagtattaatggatagcggactagtcaataaggaattaattttaccatttgtcattgtcttaacccattcgttgattagttcctttgtttggttagcattattaaagtttacagtttgaaaatcgtcttttattttttgtaggaaggaggcgtggaactcgatactatcgctaccgtatattttatttgcggtagctagtgtcgcacaatacggaatatctacctccatgtcatcattattgtcatcgggtgtattctcattcatattctctatatattttgatagttgttcagctgtagaaccagctgctccatgatttagaatagataaagtagataaaatggaaactggagaaatcaaaacattttcatcagggtgttttaagattagttctttaaagatatccatggtatagacctaacgataacgatatatatcataaataaataatgttaaatttcaatttatgtttgtaccccgtattcatacttaacaaattggtattgcgtacacaatcaatcatattacataccattaataatgcaagcataaaaaattgttagtagatgtttctaaatataggttccgtaagcaaagaatataagaatgaagcggtaatgataaaatcaatcgttatctaaaatgatcatactcatttattttattctattatattaacacatacatttttaacagcaacacattcaatattgtattgttatttttatattatttacacaattaacaatatattattagtttatattactgaattaataatataaaattcccaatcttgtcataaacacacactgagaaacagcataaacacagaatccatcaaaaatgttgataaattatctgatgttgttgttcgctgctatgataatcagatcattcgccgatagtggtaacgctatcgaaacgacattgccagaaattacaaacgctacaacagatattccagctatcagattatgcggtccagagggagatggatattgtttacacggtgactgtatccacgctagagatattgacggtatgtattgtagatgctctcatggttatacaggcattagatgtcagcatgtagtattagtagactatcaacgttcagaaaacccaaacactacaacgtcatatatcccatctcccggtattatgcttgtattagtaggcattattatgtgttgtctattatctgtttataggttcactcgacgaactaaactacctatacaagatatggttgtgccataatttttataaatttttttatgagtatttttacaaaaatgtataaagtgtatgtcttatgtatatttataaaaatgctaagtatgcgatgtatctatgttatttgtatttatctaaacaatacctctacctctagatattatacaaaaattttttatttcggcatattaaagtaaaatctagttaccttgaaaatgaatacagtgggtggttccgtatcaccagtaagaacataatagtcaaatacagtatccgattgagattttgcatacaatactagtctagaaagaaatttgtaatcatcttctgtgacgggagtccatatatctgtatcatcgtctagtttatcagtgtcccatgctatattcctgttatcatcattagttaatgaaaataactctcgtgcttcagaaaagtcaaatattgtatccatacatacatctccaaaactatcgcttatacgtttatctttaacgatacctatacctagatggttatttactaacagacattttccagatctattgactataactcctatagtttccacatcaaccaagtaatgatcatctattgttatataacaataacataactcttttccatttttatcagtatgtatatctatatcaacgtcgtcgttgtagtgaatagtagtcattgatctattatatgaaacggatatgtctagaacggcaattgttttacgtccagttaacactttcgttgatttaaagtctagagtctttgcaaacataatatccttatccgactttatatttcctgtagggtggtataattttattttgcctccacatatcggtgtttccaaatatattactagacaatattccatatagttattagttaagggtacccaattagaacacgtacgcttattatcatcatttggatcgtatttcataaaagttattgtgttatcgatgtcaacacattctacattttttaatcgtctatatagtatttttctgatattttctataatatcagaattgtcttccatcggaagttgtatactatcggaatcagttacatgtttaaataattctctgatgtcattccttatacaatcaaattcattattaaacagtttaatagtctgtagacctttatcgtcgtaaatatccattgtcttattagttacgcttatttttatgtgtttttacgttgctttattatattttataagaatgattgtttgacgaatcacgagaactattaagacacattattaggtatatattataaaaaagtttttgattacgatgttataagaggaaagaggacacattaacatcatacatcaattaactacattcttataacatcgtaatcaaaagaattgcaattttgatgtataacaactgtcaatgggttatggaattgtatattacatattatacggtatgttggtaacgacaaataccggtcggtaattgtctgccggtgtaatagaattatatatatctatctattacaccggccttgtatacataataataagttgtggtagtatgatctccatatttataatttaggactttgtattcagtatttttggaatcataaaaaataaaaaaaagttttactaatttaaaatttaaaaagtatttacatttttttcactgtttagtcgcggatatggaattcgatcctgccaaaatcaatacatcatctatagatcatgtaacaatattacaatacatagatgaaccaaatgatataagactaacagtatgcattatccgaaatattatatcaatatcacaaaaataaatacacatttggctaatcaatttcgggcttggaaaaaacgtatcgccggaagggactatatgactaacttatctagagatacaggaatacaacaatcaaaacttactgaaactatacgtaactgtcaaaaaaatagaaacatatatggtctatatatacactacaatttagttattaattggataaccgatgtgattatcaatcaatattaagagggttggtaaattggtacatagctaataatacctatactccaaatacacccaataatacaacaaccatttctgagttggatatcatcaaaatactaaataaatacgaggacgtgtatagagtaagtaaagaaaaagaatgtggaatttgctatgaagttgtttactcaaaacgatagatactttggtttattggattcgtgtactcatatattttgcataacatgcatcaatatatggcatagaacacgaagagaaaccggtgcgtcggataattgtcctatatgccgtacccgttttagaaacataacaatgagcaagttctataagctagttaactaataaataaaaagtttaatttgttgacgacgtatgtcgttattttttctcgtataaaagattaatttgattctaatataatctttagtattggataaatatcaattcaaattaattccattagattatatcataaataaaaatagtagcacacaactacttcagcaaacattctttttataaatgccatctagcgtagcgaggacacaagtgaacctataattatcaaatttattagtatcagtcacatgaaggactttacgtagagtgacgattccactatctgtggtacgaacggtttcatcttctttgatgccatcacccagatgttctataaacttggtatcctcgtccgatttcatatcctttgccaaccaatacatatagctaaactcaggcatatgttccacacatcctgaacaatgaaattctccagaagatgttacaatgtctagatttggacatttggtttcaaccgcgttaacatatgagtgaacacacccatacatgaaagcgatgagaaataggattctcatcttgccaaaatatcactagaaaaaatttatttatcagttttaaaggtataaaaaatacttattgttgctcgaatattttgtatttgatggtatacggaagattagaaatgtaggtattatcatcaactgattctatggttttatgtattctatcatgtttcactattgcgttggaaataatatcatatgcttccacatatattttattttgttttaactcataatactcacgtaattctggattattggcatatctatgaataattttagctccatgatcagtaaatattaatgagaacatagtattaccacctaccattatttttttcatctcattcaattcttaattgcaaagatctatataatcattatagcgttgacttatggactctggaatcttagacgatgtacagtcatctataatcatggcatatttaatacattgttttatagcatagtcgttatctacgatgttagatatttctctcaatgaatcaatcacacaatctaatgtaggtttatgacataatagcattttcagcagttcaatgtttttagattcgttgatggcaatggctatacatgtatatccgttatttgatctaatgttgacatctgaaccggattctagcagtaaagatactagagattgtttattatatctaacagccttgtgaagaagtgtttctcctcgtttgtcaatcatgttaatgtctttaagataaggtaggcaaatgtttatagtactaagaattgggcaagcataagacatgtcacaaagacccttttttgtatgtataagtgtaaaaattataacatccatagttggatttacataggtgtccaatcgggatctctccatcatcgagataattgatggcatctcccttccttttttagtagatatttcatcgtgtaagaatcaatattaatatttctaaagtatccgtgtatagcctctttatttaccacagctccatattccactagagggatatcgccgaatgtcatatactcaattagtatatgttggaggacatccgagttcattgttttcaatatcaaagagatggtttccttatcatttctccatagtggtacaatactacacattattccgtgcggctttccattttccaaaaacaatttgaccaaatctaaatctacatctttattgtatctataatcactatttagataatcagccataattcctcgagtgcaacatgttagatcgtctatatatgaataagcagtgttatctattcctttcattaacaatttaacgatgtctatatctatatgagatgacttaatataatattgaagagctgtacaatagtttttatctataaaagacggcttgattccgtgattaattagacatttaacaacttccggacgcacatatgctctcgtatccgactctgaatacagatgagagatgatatacagatgcaatacggtaccgcaatttcgtagttgataatcatcatacgcgtatcagtactcgtcctcataaagaacactgcagccattttctatgaacaaatcaataattttagaaacaggatcattgtcattacataattttctataactgaacgatggttttcacatttaacactcaagtcaaatccatgttctaccaacacctttatcaagtcaacgtctacatttttggatttcatatagctgaatatattaaagttatttatgttgctaaatccagtggcttctagtagagccatcgctatatccttattaactttaacatgtctactatttgtgtattcttctaatggggtaagctgtctccaatttttgcgtaatggattagtgccactgtctagtagtagtttgacgacctcgacattattacaatgctcattaaaaaggtatgcgtgtaaagcattattcttgaattggttcctggtatcattaggatctctgtctttcaacatctgtttaagttcatcaagagccacctcctcattttccaaatagtcaaacattttgactgaatgagctactgtgaactctatacacccacacaactaatgtcattaaatatcatgtcaaaaacttgtacaattattaataaaaataatttagtgtttaaattttaccagttccagattttacacctccgttaatacctccattaaccccactggacgatcctcctccccacattccaccgccaccagatgtataagttttagatcctttattactaccatcatgtccatggataaagacactccacatgccgccactaccccctttagaagacatattaataagacttaaggacaagtttaacaataaaattaatcacgagtaccctactaccaacctacactattatatgattatagtttctatttttacagtaccttgactaaagtttctagtcacaagagcaatactaccaacctacactattatatgattatagtttctatttttataggaacgcgtacgagaaaatcaaatgtctaatttctaacggtagtgttgataaacgattgttatccgcggatacctcctctatcatgtcgtctattttcttactttgttctattaacttattagcattatatattatttgattataaaacttatattgcttattagcccaatctgtaaatatcggattattaacatatcgtttctttgtaggtttatttaacatgtacatcactgtaagcatgtccttaccatttattttaatttgacgcatatccgcaatttctttttcgcagtcggttataaattctatatatgatggatacatgctacatgtgtacttataatcgactaatatgaagtacttgatacatattttcagtaacgatttattattaccacctatgaataagtacctgtgatcgtctaggtaatcaactgttttcttaatacattcgatggttggtaatttactcagaataatttccaatatcttaatatataattctgctatttctgggatatatttatctgccagtataacacaaatagtaatacatgtaaacccatattttgttattatattaatgtctgcgccattatctattaaccattctactaggctgacactatgcgactcaatacaatgataaagtatactacatccatgtttatctattttgtttatatcatcaatatacggcttacaaagttttagtatcgataacacatccaactcacgcatagagaaggtagggaataatggcataatatttattaggttatcatcattgtcattatctacaactaagtttccattttttaaaatatactcgacaactttaggatctctattgccaaatttttgaaaatatttatttatatgcttaaatctatataatgtagctccttcatcaatcatacatttaataacattgatgtatactgtatgataagatacatattctaacaatagatcttgtatagaatctgtatatcttttaagaattgtggatattaggatattattacataaactattacacaattctaaaatataaaacgtatcacggtcgaataatagttgatcaactatataattatcgattttgtgatttttcttcctaaactgtttacgtaaatagttagatagaatattcattagttcatgaccactatagttactatcgaataacgcgtcaaatatttcccgtttaatatcgcatttgtcaagataataatagagtgtggtatgttcacgataagtataataacgcatctctttttcgtgtgaaattaaatagtttattacgtccaaagatgtagcataaccatcttgtgacctagtaataatataataatagagaactgttttacccattctatcatcataatcagtggtgtagtcgtaatcgtaatcgtctaattcatcatcccaattataatattcaccagcacgtctaatctgttctattttgatcttgtatccatactgtatgttgctacatgtaggtattcctttatccaataatagtttaaacacatctacattgggatttgatgttgtagcgtatttttctacaatattaataccatttttgatactatttatttctatacctttcgaaattagtaatttcaataagtctatattgatgttatcagaacatagatattcgaatatatcaaaatcattgatatttttatagtcgactgacgacaataacaaaatcacaacatcgtttttgatattattatttttcttggtaacgtatgcctttaatggagtttcaccatcatactcatataatggatttgcaccactttctatcaatgattgtgcactgctggcatcgatgttaaatgttttacaactatcatagagtatcttatcgttaaccatgattggttgttgatgctatcgcattttttggtttctttcatttcagttatgtatggatttagcacgtttgggaagcatgagctcatatgatttcagtactgtagtgtcagtactattagtttcaataagatcaatctctagatctatagaatcaaaacacgataggtcagaagataatgaatatctgtaggcttcttgttgtactgtaacttctggttttgttagatggttgcatcgtgctttaacgtcaatggtacaaattttatcctcgctttgtgtatcatattcgtccctactataaaattgtatattcagattatcatgcgatgtgtatacgctaacggtatcaataaacggagcacaccatttagtcataaccgtaatccaaaaatttttaaagtatatcttaacgaaagaagttgtgtcattgtctacggtgtatggtactagatcctcataagtgtatatatctagagtaatgtttaatttattaaatggttgataatatggatcctcgtgacaatttccgaagatggaaataagacataaacacgcaataaatctaattgcggacatggttactccttaaaaaaatacgaataatcaccttggctatttagtaagtgtcatttaacactatactcatattaatccatggactcataatctctatacgggattaacggatgttctatatacggggatgagtagttctcttctttaactttatactttttactaatcatatttagactgatgtatgggtaatagtgtttgaagagctcgttctcatcatcagaataaatcaatatctctgtttttttgttatacagatgtattacagcctcatatattacgtaatagaacgtgtcatctaccttattaactttcaccgcatagttgtttgcaaatacggttaatcctttgacctcgtcgatttccgaccaatctgggcgtataatgaatctaaactttaattgcttgtaatcattcgaaataatttttagtttgcatccgtagttatcccctttatgtaactgtaaatttctcaacgcgatatctccattaataatgatgtcgaattcgtgctgtatacccatactgaatggatgaacgaataccgacggcgttaatagtaatttactttttcatctttacatattgggtactagttttactatcataagtttataaattccacaagctactatggaataagccaaccatcttagtataccacacatgtcttaaagtttattaattaattacatgttgttttatatatatcgctacgaatttaaagagaaattagtttaggaagaaaaattatctatctacatcatcacgtctctgtattctacgatagagtgctactttaagatgcgacagatccgtgtcatcaaatatatactccattaaaatgattattccggcagcgaacttgatattggatatatcacaacctttgttaatatctacgacaatagacagcagtcccatggttccataaacagtgagtttatctttctttgaagagatattttgtagagatcttataaaactgtcgaatgacatcgcatttatatctttagctaaatcgtatatgttaccatcgtaatatctaaccgcgtctatcttaaacgtttccatcgctttaaagacgtttccgatagatggtctcatttcatcagtcatactgagccaacaaatataatcgtgtataacatctttgatagaatcagactctaaagaaaacgaatcggctttattatacgcattcatgataaacttaatgaaaaatgtttttcgttgtttaagttggatgaatagtatgtcttaataattgttattatttcattaattaatatttagtaacgagtacactctataaaaacgagaatgacataactaatcataactagttatcaaagtgtctaggacgcgtaattttcatatggtatagatcctgtaagcattgtctgtattctggagctattttctctatcgcattagtgagttcagaatatgttataaatttaaatcgaataacgaacataactttagtaaagtcgtctatattaactcttttattttctagccatcgtaataccatgtttaagatagtatattctctagttactacgatctcatcgttgtctagaatatcacatactgaatctacatccaattttagaaattggtctgtgttacatatctcttctatattattgttgatgtattgtcgtagaaaactattacgtagaccattttctttataaaacgaatatatagtactccaattatctttaccgatatatttgcacacataatccattctctcaatcactacatctttaagattttcgttgttaagatatttggctaaactatataattctattagatcatcaacagaatcagtatatatttttctagatccaaagacgaactctttggcgtcctctataatattcccagaaaagatattttcgtgttttagtttatcgagatctgatctgttcatatacgccatgattgtacggtacgttatgataaccgcataaaataaaaatccattttcatttttaaccaatactattcataattgagattgatgtaatactttgttactttgaacgtaaagacagtacacggatccgtatctccaacaagcacgtagtaatcaaatttggtgttgttaaacttcgcaatattcatcaatttagatagaaacttatactcatcatctgttttaggaatccatgtattattaccactttccaacttatcattatcccaggctatgtttcgtccatcatcgttgcgcagagtgaataattcttttgtattcggtagttcaaatatatgatccatgcatagatcggcaaagctattgtagatgtgatttttcctaaatctaatataaaactcgtttactagcaaacactttcctgatttatcgaccaagacacatatggtttctaaatctatcaagtggtggggatccatagttatgacgcagtaacatatattattacattcttgactgtcgctaatatctaaatatttattgttatcgtattggattctgcatatagatggcttgtatgtcaaagatatagaacacataaccaatttatagtcgcgctttacattctcgaatctaaagttaagagatttagaaaacattatatcctcggatgatgttatcactgtttctggagtaggatatattaaagtctttacagatttcgtccgattcaaataaatcactaaataatatcccacattatcatctgttagagtagtatcattaaatctattatattttatgaaagatatatcactgctcacctctatatttcgtacatttttaaactgtttgtataatatctctctgatacaatcagatatatctattgtgtcggtagacgataccgttacatttgaattaatggtgttccattttacaacttttaacaagttgaccaattcatttctaatagtatcaaactctccatgattaaatattttaatagtatccattttatatcactacggacacaaagtagctgacataaaccattgtataatttttatgttttatgtttattagcgtacacattttggaagttccggcttccatgtatttcctggagagcaagtagatgatgaggaaccagatagtttatatccgtacttgcacttaaagtctacattgtcgttgtatgagtatgatcttttaaacccgctagacaagtatccgtttgatattgtaggatgtggacatttaacaatctgacacgtgggtggatcggaccattctcctcctgaacacaggacactagagttaccaatcaacgaatatccactattgcaactataagttacaacgctcccatcggtataaaaatcctcgtatccgttatgtcttccgttggatatagatggaggggattggcatttaacagattcacaaataggtgcctcgggattccataccatagatccagtagatcctaattcacaatacgatttagattcaccgatcaactgatatccgctattacaagagtacgttatactagagccaaagtctactccaccaatatcaagttggccattatcgatatctcgaggcgatgggcatctccgtttaatacattgattaaagagtgtccatccagtacctgtacatttagcatatataggtcccattttttgctttctgtatccaggtagacatagatattctatagtgtctcctatgttgtaattagcattagcatcagtctccacactattcttaaatttcatattaatgggtcgtgacggaatagtacagcatgatagaacgcatcctattcccaacaatgtcaggaacgtcacgctctccaccttcatatttatttatccgtaaaaatgttatcctggacatcgtacaaataataaaaagcccatatatgttcgctattgtagaaattgtttttcacagttgctcaaaaacgatggcagtgacttatgagttacgttacactttggagtctcatctttagtaaacatatcataatattcgatattacgagttgacatatcgaacaaattccaagtatttgattttggataatattcgtattttgcatctgctataattaagatataatcaccgcaagaacacacgaacatctttcctacatggttaaagtacatgtacaattctatccatttgtcttccttaactatatatttgtatagataattacgagtctcgtgagtaattccagtaattacatagatgtcgccgtcgtactctacagcataaactatactatgatgtctaggcatgggagacttttttatccaacgatttttagtgaaacattccacatcgtttaatactacatatttctcatacgtggtataaactccacccattacatatatatcatcgtttacgaataccgacgcgcctgaatatctaggagtaattaagtttggaagtcttatccatttcgaagtgccgtgtttcaaatattctgccacacccgttgaaatagaaaattctaatcctcctattacatataactttccatcgttaacacaagtactaacttctgattttaacgacgacatattagtaaccgttttccattttttcgttttaagatctacccgcgatacggaataaacatgtctattgttaatcatgccgccaataatgtatagacaattatgtaaaacatttgcattatagaattgtctatctgtattaccgactatcgtccaatattctgttctaggagagtaatgggttattgtggatatataatcagagtttttaatgactactatattatgttttataccatttcgtgtcactggctttgtagatttggatatagttaatcccaacaatgatatagcattgcgcatagtattagtcataaacttgggatgtaaaatgttgatgatatctacatcgtttggatttttatgtatccactttaataatatcatagctgtaacatcctcatgatttacgttaacgtcttcgtgggataagatagttgtcagttcatcctttgataattttccaaattctggatcggatgtcaccgcagtaatattgttgattatttctgacatcgacgcattatatagttttttaattccatatcttttagaaaagttaaacatccttatacaatttgtgaaattaatattatgaatcatagtttttacacatagatctactacaggcggaacatcaattattatggcagcaactagtatcatttctacattgtttatggtgatgtttatcttcttccagcgcatatagtctaatagcgattcaaacgcgtgatagtttataccattcaatataatcgcttcatcctttagatggtgatcctgaatgcgtttaaaaaaattatacggagacgccgtaataatttccttattcacttgtataatttccccattgatagaaaatattacgctttccattcttaaagtactataagtaattatagtataatgtaaacgtttatatattcaatatttttataaaaatcattttgacattaattcctttttaaatttccgtctatcatctatagaaacgtattctatgaatttataaaatgcttttacgtgtcctatcgtaggcgatagaaccgctaaaaagcctatcgaatttctacaaaagaatctgttatatggtatagggagagtataaaacattaaatgtccgtacttattaaagtattcagtagccaatcctaactctttcgaatacttattaatggctcttgttctgtacgaatctatttttttgaacaacggacctagtggtatatcttgttctatgtatctaaaataatgtctgactagatccgttagtttaatatccgcagtcatcttgtctagaatggcaaatctaactgcgggtttaggctttagtttagtttctatatctacatctatgtctttatctaacaccaaaaatataatagctaatattttattacaatcatccggatattcttctacgatctcactaactaatgtttctttggttatactagtatagtcactatcggacaaataaagaaaatcagatgatcgatgaataatacatttaaattcatcatctgtaagatttttgagatgtctcattagaatattattagggttagtactcattatcattcggcagctattacttattttattatttttcaccatatagatcaatcattagatcatcaaaatatgtttcaatcatcctaaagagtatggtgaatgactcttcccatctaatttctgaacgttcaccaatgtctctagccactttggcactaatagcgatcattcgcttagcgtcttctatattattaactggttgatttaatctatctagcaatggaccgtcggacagcgtcattctcatgttcttaatcaatgtacatacatcgccgtcatctaccaattcatccaacaacataagctttttaaaatcatcattataataggtttgatcgttgtcatttctccaaagaatatatctaataagtagagtcctcatgcttagttaacaactattttttatgttaaatcaattagtacaccgctatgtttaatacttattcatattttagtttttaggattgagaatcaatacaaaaattaatgcatcattaattttagaaatacttagtttccacgtagtcaatgaaacatttgaactcatcgtacaggacgttctcgtacaggacgtaactataaaccggtttatatttgttcaagatagatacaaatccgataactttttttacgaattctacgggatccactttaaaagtgtcataccgggttctttttatttttttaaacagatcaatggtgtgatgttgattaggtcttttacgaatttgatatagaatagcgtttacatattctccataatggtcaatcgccatttgttcgtatgtcataaattctttaattatatgacactgtgtattatttagttcatccttgttcattgttaggaatctatccaaaatggcaattatactagaactataggtgcgttgtatacacatattgatgtgtctgtttatacaatccatgatatttggatccatgctactaccttcgggtaaaattgtagcatcatataccatttctagtactttaggttcattattatccattgcagaggacgtcatgatcgaatcataaaaaaatatattatttttatgttattttgttaaaaataatcatcgaatacttcgtaagatactccttcatgaacataatcagttacaaaacgtttatatgaagtaaagtatctacgatttttacaaaagtccggatgcataagtacaaagtacgcgataaacggaataataatagatttatctagtctatctttttctatagctttcatagttagatacatggtctcagaagtaggattatgtaacatcagcttcgataaaatgactgggttatttagtcttacacattcgctcatacatgtatgaccgttaactacagagtctacactaaaatgattgaacaatagatagtctaccattgtttcgtattcagatagtacagcgtagtacatggcatcttcacaaattatatcattgtctaatagatatttgacgcatcttatggatcccacttcaacagccatcttaaaatcatattgctttcctttatcattaataatttctagaacatcatctctatcataaaagatacaaatattaactgtttgatccgtaataacattgctagtcaatagcaatttgttaataagatgcgctgggctcaatgtcttaataagaagtgtaagaggactatctccgaatttgttttgtttattaacatccgttgatggaagtaaaagatctataatgtctacattcttgactgttttagagcatacaatatggagaggtgtatttccatcatgatctggttttgagggactaattcctagtttcatcatccatgagattgtagaagcttttggattgtctgacataagatgtctatgaatatgatttttgccaaatttatccactatcctggcttcgaatccgatggacattatttttttaaacactctttctgaaggatctgtacacgccaacaacggaccacatccttcttcatcaaccgagttgttaatcttggctccatactgtaccaataaatttattctctctatgacttcatcatctgttcccgagagataatatagaggtgttttatgctgtttatcacacgcgtttggatctgcgccgtgcgtcagcagcatcgcgactattctattattattaattttagaagctatatgcaatggataatttccatcatcatccgtctcatttggagagtatcctctatgaagaagttcttcgacaaatcgttcatctagtcctttaattccacaatacgcatgtagaatgtgataattatttccagaaggttcgatagcttgtagcatattcctaaatacatctaaatttttactattatatttggcataaagagatagataatactcggccgacataatgttgtccattgtagtataaaaattaatatttctatttctatttctgtatatttgcaacaatttactctctataacaaatatcataacttagtttttttatgtcaagaaggcactggtttagttcatctataaatgtcacgccataactaccacgcatgccatactcagaattatgataaagatatttatccttggggtgtaggtaatggggattaatctttgttggatcagtctctaagttaacacatgtcacacatgatccatttatagttatatcacacgatgatgatttatgaattgattccggaagatcgctatcgtattttgtggttccacaattcatttccatacatgttattgtcacactaatattatgatgaactttatctagccgctgagtggtaaacaacagaacagatagtttattatctttaccaacaccctcagccgctgccacaaatctctgatccgtatccatgatggtcatgtttatttctagtccgtatccagtcaacactatgttagcatttctgtcgatatagctttcactcatatgacactcaccaataatagtagaattaatgtcgtaatttacaccaatagtgagttcggcggcaaagtaccaataccggtaatcttgtcgaggaggacatatagtattcttgtattctaccgaatacccgagagatgcgatacaaaagagcaagactaatttgtaaaccatcttactcaaaatatgtaacaatagtacgatgcaatgagtaagacaataggaaatctatcttatatacacataattattctatcaattttaccaattagttagtgtaatgttaacaaaaatgtgggagaatctaattagtttttctttacacaattgacgtacatgagtctgagttccttgtttttgctaattatttcatccaatttattattcttgacgatatcgagatcttttgtataggagtcaaacttgtattcaacatgcttttctataatcattttagctatttcggcatcatccaatagtacattttccagattagcagaatagatattaatgtcgtatttgaacagagcctgtaacatctcaatgtctttattatctatagccaatttaatgtccggaatgaagagaagggaattattggtgtttgtcgacgtcatatagtcgagcaagagaatcatcatatccacgtgtccattttttatagtgatgtgaatacaactaaggagaatagccagatcaaaagtagatggtatctctgaaagaaagtaggaaacaatacttacatcattaagcatgacggcatgataaaatgaagttttccatccagttttcccatagaacatcagtctccaatttttcttaacaaacagttttaccgtttgcatgttaccactatcaaccgcataatacaatgcggtgtttcccttgtcatcaaattgtgaatcatccagtccactgaatagcaaaatctttactattttggtatcttccaatgtggctgcctgatgtaatggaaattcattctctagaagatttttcaatgctccagcgttcaacaacgtacatactagacgcacgttattatcagctattgcataatacaaggcactatgtccatggacatccgccttaaatgtatctttactagagagaaagcttttcagctgcttagacttccaagtattaattcgtgacagatccatgtctgaaacgagacgctaattagtgtatattttttcattttttataattttgtcatattgcaccagaattaataatatctttaatagatctgattagtagatacatggctatcgcaaaacaacatatacacatttaataaaaataatatttattaagaaaattcagatttcacgtacccatcaatataaataaaataatgattccttacaccgtacccatattaaggagattccaccttacccataaacaatataaatccagtaatatcatgtctgatgatgaacacaaatggtgtattaaattccagtttttcaggagatgatctcgccgtagctaccataatagtagatgcctctgctacagttccttgttcgtcgacatctatctttgcattctgaaacattttataaatatataatgggtccctagtcatatgtttaaacgacgcattatctggattaaacatactaggagccatcatttcggctatcgacttaatatccctcttattttcgatagaaaatttagggagtttaagattgtacactttattccctaattgagacgaccaatagtctaattttgcagccgtgatagaatctgtgaaatgggtcatattatcacctattgccaggtacatactaatattagcatccttatacggaaggcgtaccatgtcatattctttgtcatcgattgtgattgtatttccttgcaatttagtaactacgttcatcatgggaaccgttttcgtaccgtacttattagtaaaactagcattgcgtgttttagtgatatcaaacggatattgccatatacctttaaaatatatagtattaatgattgcccatagagtattattgtcgagcatattagaatctactacattagacataccggatctacgttctactatagaattaattttattaaccgcatctcgtctaaagtttaatctatataggccgaatctatgatattgttgataatacgacggtttaatgcacacagtattatctacgaaactttgataagttagatcagtgtacgtatatttagatgttttcagcttagctaatcctgatattaattctgtaaatgctggacccagatctctttttctcaaatccatagtcttcaataattctattctagtattacctgatgcaggcaatagcgacataaacatagaaaacgaataaccaaacggtgagaagacaatattatcatcttgaatatttttatacgctactataccggcattggtaaatccttgtagacgataggcggacgctgaacacgctaacgatagtatcaataacgcaatcatgattttatggtattaataattaaccttatttttatgttcggtataaaaaaattattgatgtctacacatccttttgtaattgacatctatatatccttttgtataatcaactctaatcactttaacttttacagttttccctaccagtttatccctatattcaacatatctatccatatgcatcttaacactctctgccaagatagcttcagagtgaggatagtcaaaaagataaatatatagagcataatcattctcgtatactctgccctttattacatcacccgcattgggcaacgaataacaaaatgcaagcatcttgttaacgggctcgtaaattgggataaaaattatgtttttattgtcttatatctattttattcaagagaatattcaggaatttctttttccggttgtatctcgtcgcagtatatatcatttgtacattgtttcatattttttaatagtttacaccttttagtaggactagtatcgtacaattcatagctgtattttgaattccaatcacgcataaaaatatcttccaattgttgacgaagacctaatccatcatccggtgtaatattaatagatgctccacatgtatccgtaaagtaatttcctgtccaatttgaggtacctatataggccgttttatcggttaccatatatttggcatggtttaccctagaatacggaatgggaggatcagcatctggtacaataaatagctttacttctatatttatgtttttagattttagcatagcgatagatcttaaaaagtttctcatgataaacgaagatcgttgccagcaactaatcaatagcttaacggatacttgtctgtctatagcggatcttcttaattcatcttctatataaggccaaaacaaaattttacccgccttcgaataaataatagggataaagttcataacagatacataaacgaatttactcgcatttctaatacatgacaataaagcggttaaatcattggttctttccatagtacatagttgttgcggtgcagaagcaataaatacagagtgtggaacgccgcttacgttaatactaagaggatgatctgtattataatacgacggataaaagtttttccaattatatggtagattgttaactccaagataccagtatacctcaaaaatttgagtgagatccgctgccaagttcctattattgaagatcgcaatacccaattccttgacctgagttagtgatctccaatccatgttagcgcttcctaaataaatatgtgtattatcagatatccaaaattttgtatgaagaactcctcctaggatatttgtaatatctatgtatcgtacttcaactccggccatttgtagtctttcaacatcctttaatggtttgttagatttattaacggctactctaactcgtactcctcttttgggtaattgtacaatctcgtttaatattatcgtgccgaaattcgtacccacttcatccgataaactccaataaaaagatgatatatctagtgtttttgtggtattggatagaatttccctccacatgttaaatgtagacaaatatactttatcaaattgcatacctataggaatagtttctgtaatcactgcgattgtattatccggattcattttatttgttaaaagaataatcctatatcacttcactctattaaaaatccaagtttctatttctttcatgactgattttttaacttcatccgtttccttatgaagatgatgtttggcaccttcataaatttttatttctctattacaatttgcatgttgcatgaaataatatgcacctaaaacatcgctaatcttattgtttgttccctggagtatgagagtcggggggtgttaatcttggaaattatttttctaaccttgttggtagccttcaagacctgactagcaaatccagccttaattttttcatgattgactaatgggtcgtattggtatttataaactttatccatatctctagatactgattctggacatagctttccgactggcgcatttggtgtgatggttcccataagtttggcagctagcagattcagtcttgaaacagcatctgcattaactagaggagacattagaatcattgctgtaaacaagtttggattatcgtaagaggctagctcccatggaatgacccaataagtagatttaatagttaccacgtgctgtaccaaagtcatcaatcatcattttttcaccattacttcttccatgtccaatatgatcatgtgagaatactaaaattcctaacgatgatatgttttcagctagttcgtcataacgtccagaatgtttaccagctccatgacttatgaatactaatgccttaggatatgtaataggtttccaatatttacaatatatgtaatcattgtccagattgaacatacagtttgcactcatgattcacgttatataactatcaatattaacagttcgtttgatgatcatattatttttatgttttattgataattgtaaaaacatacaattaaatcaatatagaggaaggagacggctactgtcttttgtaagatagtcatggcgactaaattagattatgaggatgctgttttttactttgtggatgatgataaaatatgtagtcgcgactccatcatcgatctaatagatgaatatattacgtggagaaatcatgttatagtgtttaacaaagatattaccagttgtggaagactgtacaaggaattgatgaagttcgatgatgtcgctatacggtactatggtattgataaaattaatgagattgtcgaagctatgagcgaaggagaccactacatcaattttacaaaagtccatgatcaggaaagtttattcgctaccataggaatatgtgctaaaatcactgaacattggggatacaaaaagatttcagaatctagattccaatcattgggaaacattacagatttgatgaccgacgataatataaacatcttgatactttttctagaaaaaaaattgaattgatgatataggggtcttcataacgcataattattacgttagcattctatatccgtgttaaaaaaaattatcctatcatgtatttgagagttttatatgtagcaaacatgatagctgtgatgccaataagctttagatattcacgcgtgctagtgttagggatggtattatctggtggtgaaatgtccgttatataatctacaaaacaatcatcgcatatagtatgcgatagtagagtaaacatttttatagtttttactggattcatacatcgtctacccaattcggttataaatgaaattgtcgccaatcttacacccaaccccttgttatccattagcatagtattaacttcgttatttatgtcataaactgtaaatgattttgtagatgccatatcatacatgatattcatgtccctattataatcattactaactttatcacaatatatgttgataatatctatatatgatctagtctttgtgggcaactgtctatacaagtcgtctaaacgttgtttactcatatagtatcgaacagccatcattacatggtcccgttccgttgatagataatcgagtatgttagtggacttgtcaaatctatataccatattttctggaagtggatatacatagtcgtgatcaacattattgctagcctcatcttctatatcctgtactataccattatctatatcatctacataatctatgatattattacacataaacatcgacaacatactattgtttattatctaagtcctgttgatccaaacccttgatctcctctatttgtactatctagagattgtacttcttccagttctggataatatatacgttgatagattagctgagctattctatctccagtatttacattaaacgtacattttccattattaataagaatgactcctatgtttcccctataatcttcgtctattacaccacctcctatatcaatgccttttagtgacagaccagacctaggagctattctaccatagcagaacttaggcatggacatactaatatctgtcttaattaactgtctttctcctggagggatagtataatcgtaagcgctatacaaatcatatccggcagcacccggcgattgcctagtaggagatttagctctgttagtttccttaacaaatctaactggtgagttaatattcatgttgaacataaaactaatattttatttcaaaattatttaccatcccatatattccatgaataagtgtgatgattgtacacttctatagtatctatatacgatccacgataaaatcctcctatcaatagcagtttattatccactatgatcaattctggattatccctcggataaataggatcatctatcagagtccatgtattgctggattcacaataaaattccgcatttctaccaaccaagaataaccttctaccgaacactaacgcgcatgatttataatgaggataataagtggatggtccaaactgccactgatcatgattgggtagcaaatattctgtagttgtatcagtttcagaatgtcctcccattacgtatataacattgtttatggatgccactgctggattacatctaggtttcagaagactcggcatattaacccaagcagcatccccgtggaaccaacgctcaacagatgtgggatttggtagacctcctactacgtataatttattgttagcgggtatcccgctagcatacagtctggggctattcatcggaggaattggaatccaattgtttgatatataatttacagctatagcattgttatgtatttcattgttcatccatccaccgatgagatatactacttctccaacatgagtacttgtacacatatggaatatatctataatttgatccatgttcataggatactctatgaatggatacttgtatgatttgcgtggttgtttatcacaatgaaatattttggtacagtctagtatccattttacattatttatacctctgggagaaagataatttgacctgattacatttttgataaggagtagcagatttcctaatttatttcttcgcctcatataccacttaatgacaaaatcaactacataatcctcatctggaacatttagttcatcgctttctagaataagtttcatagatagataatcaaaattgtctatgatgtcatcttccagttccaaaaagtgtttggcaataaagtttttagtatgacataagagattggatagtccgtattctatacccatcatgtaacactcgacacaatattcctttctaaaatctcgtaagataaagtttatacaagtgtagatgataaattctacagaggttaatatagaagcacgtaataaattgacgacgttatgactatctatatatacctttccagtatatgagtaaataactatagaagttaaactgtgaatgtcaaggtctagacaaacccttgtaactggatctttatttttcgtgtatttttgacgtaaatgtgtgcgaaagtaaggagataactttttcaatatcgtagaattgactattatattgcctcctatggcatcaataattgttttgaatttcttagtcatagacaatgctaatatattcttacagtacacagtattgacaaatatcggcatttatgtttctttaaaagtcaacatctagagaaaaatgattatctttttgagacataactcccattttttggtattcacccacacgtttttcgaaaaaattagtttttccttccaatgatatattttccatgaaatcaaacggattggtaacattataaatttttttaaatcccaattcagaaatcaatctatccgcgacgaattctatatatgttttcatcatttcacaattcattcctataagtttaactggaagagccgcagtaagaaattcttgttcaatggatactgcatctgttataatagatctaacggtttcttcactcggtggatgcaataaatgtttaaacatcaaacatgcgaaatcgcagtgcagaccctcgtctctactaattagttcgttggaaaacgtgagtccgggcattaggccacgctttttaagccaaaatatggaagcgaatgatccagaaaagaaaattccttctactgcagcaaaggcaataagtctctctccataaccggcgctgtcatgtatccacttttgagcccaatcggccttcttttttacacaaggcatcgtttctatggcattaaagagatagtttttttcattactatctttaacataagtatcgatcaaaagactatacatttccgaatgaatgttttcaatggccatctgaaatccgtagaaacatctagcctcggtaatctgtacttctgtacaaaatcgttccgccaaattttcattcactattccgtcactggctgcaaaaaacgccaatacatgttttataaaatatttttcgtctggtgttagtttattccaatcattgatatctttagatatatctacttcttccactgtccaaaatgatgcctctgcctttttatacatgttccagatgtcatgatattggattgggaaaataacaaatctatttggatttggtgcaaggatgggttccataactaaattaacaataacaataaattttttttcagttatctatatgcctgtacttggattttttgtacatcgatatcgccgcaatcactacaataattacaagtattattgatagcattgttattagtactatcataattaaattatctacattcatgggtgctgaataatcgttattatcatcattatcattttgtaattgtgacatcatactagataaatcgtttgcgagattgttgtgggaagcgggcatggaggatgcattatcattattatttaacgccttccatttggattcacaaatgttacgcacattcaacattttatggaaactataattttgtgaaaacaaataacaagaaaactcgtcatcgttcaaatttttaacgatagtaaaccgattaaacgtcgagctaatttctaacgctagcgactctgttggatatgggtttccagatatatatcttttcagttcccctacgtatctataatcatctgtaggaaatggaagatatttccatttatctactgttcctaatatcatatgtggtggtgtagtagaaccattaagcgcgaaagatgttatttcgcatcgtattttaacttcgcaataatttctggttagataacgcactctaccagtcaagtcaatgatattagcctttacagatatattcatagtagtcgtaacgatgactccatcttttagatgcgatactcctttgtatgtaccagaatcttcgtacctcaaactcgatatatttaaacaagttaatgagatattaacgcgttttatgaatgatgatatataaccagaagttttatcctcggtggctagcgctataaccttatcattataataccaactagtgtgattaatatgtgacacgtcagtgtgggtacaaatatgtacattatcgtctacgtcgtattcgatacatccgcatacagccaacaaatataaaatgacaaatactctaacgccgttcgtacccatcttgatgcggtttaataaatgttttgatttcaatttattgtaaaaaaagattcggttttatactgttcgatattctcattgcttatattttcatctatcatctccacacagtcaaatccgtggttagcatgcacctcatcaaccggtaaaagactatcggactcttctatcattataactctagaatatttaatttggtcattattaatcaagtcaattatcttatttttaacaaacgtgagtattttactcattttttataaaaacttttagaaatatacagactctatcgtgtgtctatatcttctttttatatccaatgtatttatgtctgatttttcttcatttatcatatataatggtccaaattctacacgtgcttcggattcatccagatcattaaggttcttataattgtaacatccttctcttccctcttctacatcttccttcttattcttattcttagcgtcacagaatctaccacagcaggatcccatgacgagcgtcatattaaactaatccattttcaattataatatatgattagtaatgaccattaaaataaaaaatattcttcataaccggcaagaaagtgaaaagttcacattgaaactatgtcagtagtatacatcatgaaatgatgatatatatatactctattttggtggaggattatatgatataattcgtggataatcatttttaagacacatttctttattcgtaaatcttttcacgttaaatgagtgtccatattttgcaatttcttcatatgatggcggtgtacgtggacgaggctgctcctgttcttgttgtggtcgccgactgtcgtgtctgcgtttagatccctccattatcgcgattgcgtagatggagtactattttataccttgtaattaaatttttttattaattaaacgtataaaaacgttccgtatctgtatttaagagccagatttcgtctaatagaacaaatagctacagtaaaaataactagaataattgctacacccactagaaaccacggatcgtaatacggcaatcggttttcgataataggtggaacgtatattttatttaaggacttaacaattgtctgtaaaccacaatttgcttccgcggatcctgtattaactatctgtaaaagcatatgttgaccgggcggagccgaacattctccgatatctaatttctgtatatctataatattattaacctccgcatacgcattacagttcttttctagcttggataccgcactaggtacatcgtctagatctattcctatttcctcagcgatagctcttctatccttttccggaagcaatgaaatcacttcaataaatgattcaaccatgagtgtgaaactaagtcgagaattactcatgcatttgttagttattcggagcgcgcaatttttaaactgtcctataacctctcctatatgaatagcacaagtgacattagtagggatagaatgttgagctaatttttgtaaataactatctataaaaagattatacaaagttttaaactctttagtttccgccatttatccagtctgagaaaatgtctctcataataaatttttccaagaaactaattgggtgaagaatggaaacctttaatctatatttatcacagtctgttttggtacacatgatgaattcttccaatgccgtactaaattcgatatctttttcgatttctggatatgtttttaataaagtatgaacaaagaaatggaaatcgtaataccagttatgtttaactttgaaattgttttttattttcttgttaatgattccagccacttgggaaaagtcaaagtcgtttaatgccgatttaatacgttcattaaaaacaaactttttatcctttagatgaattattattggttcattggaatcaaaaagtaagatattatcgggtttaagatctgcgtgtaaaaagttgtcgcaacagggtagttcgtagattttaatgtataacagagccatctgtaaaaagataaactttatgtattgtaccaaagatttaaatcctaatttgatagctaactcggtatctactttatctgccgaatacagtgctaggggaaaaattataatgtttcctctttcatattcgtagttagttctcttttcatgttcgaaaaagtgaaacatgcggttaaaatagtttataacattaatattactgttaataactgccggataaaagtgggatagtaatttcacgaatttgatactgtcctttctctcgttaaacgcctttaaaaaaactttagaagaatatctcaatgagagttcctgaccatccatagtttgtatcaataatagcaacatatgaagaacacgtttatacagagtatgtaaaaatgttaatttatagtttaatcccatggcccacgcacacacgattaattttttttcatctccctttagattgttgtatagaaatttgggtactgtgaactccgccgtagtttccatgggactatataattttgtggcctcgaatacaaattttactacatagttatctatcttaaagactataccatatcctcctgtagatatgtgataaaaatcgtcgtttataggataaaatcgtttatccttttgttggaaaaaggatgaattaatgtaatcattctcttctatctttagtagtgtttccttattaaaattcttaaaataatttaacaatctaactgacggagcccaattttggtgtaaatctaattgggacattatattgttaaaatacaaacagtctcctaatataacagtatctgataatctatggggagacatccattgatattcaggggatgaatcattggcaacacccatttattgtacaaaaagccccaatttacaaacgaaagtccaggtttgatagagacaaacaattaactattttgtctctgtttttaacacctccacagtttttaatttctttagtaatgaaattattcacaatatcagtatcttctttatctaccagagattttactaacttgataaccttggctgtctcattcaatagggtagtaatatttgtatgtgtgatattgatatctttttgaattgtttcttttagaagtgattctttgatggtgccagcatacgaattacaataatgcagaaactcggttaacatgcaggaattatagtaagccaattccaattgttgcctgtgttgtattagagtgtcaatatgagcaatggtgtccttgcgtttctctgatagaatgcgagcagcgattttggcgttatcatttgacgatatttctggaatgacgaatcctgtttctactaactttttggtaggacaaagtgaaacaatcaagaagatagcttctcctcctatttgtggaagaaattgaactcctctagatgatctactgacgatagtatctccttgacagatattggaccgaattacagaagtacctggaatgtaaagccctgaaaccccctcattttttaagcagattgttgccgtaaatcctgcactatgcccaagatagagagctcctttggtgaatccatctctatgtttcagtttaaccaagaaacagtcagctggtctaaaatttccatctctatctaatacagcatctaacttgatgtcaggaactatgaccggtttaatgttatatgtaacattgagtaaatccttaagttcataatcatcactgtcatcagttatgtacgatccaaacaatgtttctaccggcatagtggatacgaagatgctatccatcagaatgtttccctgattagtattttctatatagctattcttctttaaacgattttccaaatcagtaactatgttcatttttttaggagtaggacgcctagccagtatggaagaggattttctagatcctctcttcaacatctttgatctcgatggaatgcaaaaccccatagtgaaacaaccaacgataaaaataatattgtttttcactttttataattttaccatctgactcatggattcattaatatctttataagagctactaacgtataattctttataactgaactgagatatatacaccggatctatggtttccataattgagtaaatgaatgctcggcaataactaatggcaaatgtatagaacaacgaaattatactagagttgttaaagttaatattttctatgagctgttccaataaattatttgttgtgactgcgttcaagtcataaatcatcttgatactatccagtaaaccgtttttaagttctggaatattatcatcccattgtaaagcccctaattcgactatcgaatatcctgctctgatagcagtttcaatatcgacggacgtcaatactgtaataaaggtggtagtattgtcatcatcgtgataaactacgggaatatggtcgttagtaggtacggtaactttacacaacgcgatatataactttccttttgtaccatttttaacgtagttgggacgtcctgcagggtattgttttgaagaaatgatatcgagaacagatttgatacgatatttgttggattcctgattattcactataatataatctagacagatagatgattcgataaatagagaaggtatatcgttggtaggataatacatccccattccagtattctcggatactctattgatgacactagttaagaacatgtcttctattctagaaaacgaaaacatcctacatggactcattaaaacttctaacgctcctgattgtgtctcgaatgcctcgtacaaggatttcaaggatgccatagattctttgaccaacgatttagaattgcgtttagcatctgatttttttattaaatcgaatggtcggctctctggtttgctaccccaatgataacaatagtcttgtaaagataaaccgcaagaaaatttatacgcatccatccaaataaccctagcaccatcggatgatattaatgtattattatagattttccatccacaattattgggccagtatactgttagcaacggtatatcgaatagattactcatgtaacctactagaatgatagttcgtgtactagtcataatatctttaatccaatctaaaaaatttaaaattagattttttacactgttaaagttaacaaaagtattacccgggtacgtggatatcatatatggcattggtccattatcagtaatagctccataaactgatacggcgatggtttttatatgtgtttgatctaacgaggaagaaattcgcgcccacaattcatctctagatatgtatttaatatcaaacggtaacacatcaatttcgggacgcgtatatgtttctaaatttttaatccaaatataatgatgacctatatgccctattatcatactgtcaactatagtacacctagggaacttacgatacatctgtttcctataatcgttaaattttacaaatctataacatgctaaaccttttgacgacagccattcattaatttctgatatggaatctgtattctcgataccgtatcgttctaaagccagtgctatatctccctgttcgtgggaacgctttcgtataatatcgatcaacggataatctgaagtttttggagaataatatgactcatgatctatttcgtccataaacaatctagacataggaattggaggcgatgatcttaattttgtgcaatgagtcgtcaatcctataacttctaatcttgtaatattcatcatcgacataatactatctatgttatcatcgtatattagtataccatgaccttcttcatttcgtgccaaaatgatatacagtcttaaatagttacgcaatatctcaatagtttcataattgttagctgttttcatcaaggtttgtatcctgtttaacatgatggcgttctataacgtctctattttctatttttaattttttaaatttttaacgatttactgtggctagatacccaatctctctcaaatatttttttagcctcgcttacaagctgtttatctatactattaaaactgacgaatccgtgattttggtaatgggttccgtcgaaatttgccgaagtgatatgaacatattcgtcgtcgactatcaacaattttgtattattctgaatagtgaaaaccttcacagatagatcattttgaacacacaacgcatctagacttttggcggttgccatagaatatacgtcgttcttatcccaattaccaactagaagtctgatcttaactcctctattaatggctgcttctataatggagttgtaaatgtcgggccaatagtagctattaccgtcgacacgtgtagtgggaactatggccaaatgttcaatatctatactagtcttagctgacctgagtttatcaataactacatcggtatctagatctctagaatatcccaataggtgttccggagaatcagtaaagaacactccacctataggattcttaatatgatacgcagtgctaactggcaaacaacaagccgcagagcataaattcaaccatgaattttttgcgctattaaaggctttaaaagtatcaaatcttctacgaagatctgtggccagcgggggataatcagaatatacacctaacgttttaatcgtatgtatagatcctccagtaaatgacgcgtttcctacataacatctttcatcatctgacacccaaaaacaaccgagtagtagtcccacattattttttttatctatattaacggttataaaatttatatccgggcagtgactttgtagctctcccagatttcttttccctcgttcatctagcaaaactattattttaatccctttttcagatgcctcttttagtttatcaaaaataagcgctcccctagtcgtactcagaggattacaacaaaaagatgctatgtatatatatttcttagctagagtgataatttcgttaaaacattcaaatgttgttaaatgatcggatctaaaatccatattttctggtagtgtttctaccagcctacattttgctcccgcaggtaccgatgcaaatggccacatttagttaacataaaaacttatacatcctgttctatcaacgattctagaatatcatcggctatatcgctaaaattttcatcaaagtcgacatcacaacctaactcagtcaatatattaagaagttccatgatgtcatcttcgtctatttctatatccgtatccattgtagattgttgaccgattatcgagtttaaatcattactaatactcaatccttcagaatacaatctgtgtttcattgtaaatttataggcggtgtatttaagttggtagattttcaattatgtattaatatagcaacagtagttcttgctcctccttgattctagcatcctcttcattattttcttctacgtacataaacatgtccaatacgttagacaacacaccgacgatggcggccgcagatctcgagttatgatctacttccttaccgtgcaataaattagaatatattttctacttttacgagaaattaattattgtatttattatttatgggtgaaaaacttactataaaaagcgggtgggtttggaattagtgaaagcttaaaaattgaaattttattttttttttttggaatataaataagctcgaagtcgacagatctaggcctggtaccaggaggaggaattcagcttaaagatgacttcgaaagtttatgatccagaacaaaggaaacggatgataactggtccgcagtggtgggccagatgtaaacaaatgaatgttcttgattcatttattaattattatgattcagaaaaacatgcagaaaatgctgttatttttttacatggtaacgcggcctcttcttatttatggcgacatgttgtgccacatattgagccagtagcgcggtgtattataccagatcttattggtatgggcaaatcaggcaaatctggtaatggttcttataggttacttgatcattacaaatatcttactgcatggtttgaacttcttaatttaccaaagaagatcatttttgtcggccatgattggggtgcttgtttggcatttcattatagctatgagcatcaagataagatcaaagcaatagttcacgctgaaagtgtagtagatgtgattgaatcatgggatgaatggcctgatattgaagaagatattgcgttgatcaaatctgaagaaggagaaaaaatggttttggagaataacttcttcgtggaaaccatgttgccatcaaaaatcatgagaaagttagaaccagaagaatttgcagcatatcttgaaccattcaaagagaaaggtgaagttcgtcgtccaacattatcatggcctcgtgaaatcccgttagtaaaaggtggtaaacctgacgttgtacaaattgttaggaattataatgcttatctacgtgcaagtgatgatttaccaaaaatgtttattgaatcggatccaggattcttttccaatgctattgttgaaggcgccaagaagtttcctaatactgaatttgtcaaagtaaaaggtcttcatttttcgcaagaagatgcacctgatgaaatgggaaaatatatcaaatcgttcgttgagcgagttctcaaaaatgaacaagcggccgccgccaccatgagcaagggcgaggaactgttcactggcgtggtcccaattctcgtggaactggatggcgatgtgaatgggcacaaattttctgtcagcggagagggtgaaggtgatgccacatacggaaagctcaccctgaaattcatctgcaccactggaaagctccctgtgccatggccaacactggtcactaccttcacctatggcgtgcagtgcttttccagatacccagaccatatgaagcagcatgactttttcaagagcgccatgcccgagggctatgtgcaggagagaaccatctttttcaaagatgacgggaactacaagacccgcgctgaagtcaagttcgaaggtgacaccctggtgaatagaatcgagctgaagggcattgactttaaggaggatggaaacattctcggccacaagctggaatacaactataactcccacaatgtgtacatcatggccgacaagcaaaagaatggcatcaaggtcaacttcaagatcagacacaacattgaggatggatccgtgcagctggccgaccattatcaacagaacactccaatcggcgacggccctgtgctcctcccagacaaccattacctgtccacccagtctgccctgtctaaagatcccaacgaaaagagagaccacatggtcctgctggagtttgtgaccgctgctgggatcacacatggcatggacgagctgtacaagtgagcggccgccctgctagcaagcttgctagcggccgctcgagatctgcggccgctacagacacgaatatgactaaaccgatgaccatttaaaaacccctctctagctttcacttaaactgtatcgatcattcttttagcacatgtataatataaaaacattattctatttcgaatttaggcttccaaaaatttttcatccgtaaaccgataataatatatatagacttgttaatagtcggaataaatagattaatgcttaaactatcatcatctccacgattagagatacaatatttacattctttttgctgtttcgaaactttatcaatacacgttaatacaaacccaggaaggagatattgaaactgaggctgttgaaaatgaaacggtgaatacaataattcagataatgtaaaatcatgattccgtattctgatgatattagaactgctaatggatgtcgatggtatgtatctaggagtatctattttaacaaagcatcgatttgctaatatacaattatccttttgattaattgttattttattcatattcttaaaaggtttcatatttatcaattcttctacattaaaaatttccatttttaatttatgtagccccgcaatactcctcattacgtttcattttttgtctataatatccattttgttcatctcggtacatagattatccaattgagaagcgcatttagtagttttgtacattttaagtttattgacgaatcgtcgaaaactagttatagttaacattttattatttgataccctgatattaatacccctgccgttactattatttataactgatgtaatccacgtaacattggaattaactatcgatagtaatgcatcgacgcttccaaaattgtctattataaactcaccgataatttttttattgcatgttttcatattcattaggattatcaaatctttaatcttattacgattgtatgcgttgatattacaagacgtcattctaaaagacggaggatctccatcaaatgccagacaatcacgtacaaagtacatggaaataggttttgttctattgcgcatcatagatttatatagaacacccgtagaaatactaatttgttttactctataaaatactaatgcatctatttcatcgttttgtataacgtctttccaagtgtcaaattccaaatttttttcattgatagtaccaaattcttctatctctttaactacttgcatagataggtaattacagtgatgcctacatgccgttttttgaaactgaatagatgcgtctagaagcgatgctacgctagtcacaatcaccactttcatatttagaatatatatatgtaaaaatatagtagaatttcattttgtttttttctatgctataaatgaattctcattttgcatctgctcatactccgttttatattaataccaaagaaggaagatatctggttctaaaagccgttaaagtatgcgatgttagaactgtagaatgcgaaggaagtaaagcttcctgcgtactcaaagtagataaaccctcatcgcccgcgtgtgagagaagaccttcgtccccgtccagatgcgagagaatgaataaccctggaaaacaagttccgtttatgaggacggacatgctacaaaatatgttcgcggctaatcgcgataatgtagcttctagacttttgtcctaaaatactattatatccttttcgatattaataaatccgtgtcgtccaggttttttatctctttcagtatgtgaatagataggtattttatctctattcatcatcgaatttaagagatccgataaacattgtttgtattctccagatgtcagcatctgatacaacaatatatgtgcacataaacctctggcacttatttcatgtaccttccccttatcactaaggagaatagtatttgagaaatatgtatacatgatattatcatgaattagatatacagaatttgtaacactctcgaaatcacacgatgtgtcggcgttaagatctaatatatcactcgataacacattttcatctagatacactagacattttttaaagctaaaatagtctttagtagtaacagtaactatgcgattattttcatcgatgatacatttcatcggcatattattacgcttaccatcaaagactataccatgtgtatatctaacgtattctagcatggttgccatacgcgcattaaacttttcaggatctttggatagatcttccaatctatctatttgagaaaacatttttatcatgttcaatagttgaaacgtcggatccactatatagatattatctataaagattttaggaactacgttcatggtatcctggcgaatattaaaactatcaatgatatgattatcgttttcatcttttatcaccatatagtttctaagatatgggattttacttaatataatattatttcccgtgataaattttattagaaaggccaaatctataagaaaagtcctagaattagtctgaagaatatctatatcgccgtatagtatatttggattaattagatatagagaatatgatccgtaacatatacaacttttattatggcgtctaagatattcttccatcaacttattaacatttttgactagggaagatacattatgacgtcccattacttttgccttgtctattactgcgacgttcatagaatttagcatatctcttgccaattcttccattgatgttacattataagaaattttagatgaaattacatttggagctttaatagtaagaactcctaatatgtccgtgtatgtggtcactaatacagattgtagttctataatcgtaaataatttacctatattatatgtttgagtctgtttagaaaagtagctaagtatacgatcttttatttctgatgcagatgtattaacatcggaaaaaaatctttttttattcttttttactaaagatacaaatatgtctttgttaaaaacagttattttctgaatatttctagcttgtaattttaacatatgatattcgttcacactaggtactctgcctaaataggtttctataatctttaatgtaatattaggaaaagtattctgatcaggattcctattcattttgaggatttaaaactctgattattgtctaatatggtctctacgcaaactttttcacagagcgatagagtttttgataactcgtttttcttaagaaatataaaactactgtctccagagctcgctctatcttttattttatctaattcgatacaaactcctgatactggttcagaaagtaattcattaattttcagtcctttatagaagatatttaatatagataatacaaaatcttcagtttttgatatcgatctgattgatcctagaactagatatattaataacgtgctcattaggcagtttatggcagcttgataattagatatagtatattccagttcatatttattagataccgcattgcccagattttgatattctatgaattcctctgaaaataaatccaaaataactagacattctattttttgtggattagtgtactctcttccctctatcatgttcactactggtgtccacgatgataaatatctagagggaatataatatagtccataggatgccaatctagcaatgtcgaataactgtaattttattcttcgctcttcattatgaattgattcttgaggtataaacctaacacaaattatattattagacttttcgtatgtaatgtctttcatgttataagtttttaatcctggaatagaatctattttaatgaggcttttaaacgcagagttctccaacgagtcaaagcataatactctgttgtttttcttatatacgatgttacgattttcttctttgaatggaataggtttttgaattagtttataattacaacataatagataaggaagtgtgcaaatagtacgcggaaaaaacataatagctcccctgttttcatccatggttttaagtaaatgatcactggcttctttagtcaatggatattcgaacattaaccgtttcatcatcattggacagaatccatatttcttaatgtaaagagtgatcaaatcattgtgtttattgtaccatcttgttgtaaatgtgtattcggttatcggatctgctcctttttctattaaagtatcgatgtcaatctcgtctaagaattcaactatatcgacatatttcatttgtatacacataaccattactaacgtagaatgtataggaagagatgtaacgggaacagggtttgttgattcgcaaactattctaatacataattcttctgttaatacgtcttgcacgtaatctattatagatgccaagatatctatataattattttgtaagatgatgttaactatgtgatctatataagtagtgtaataattcatgtattttgatatatgttccaactctgtctttgtgatgtctagtttcgtaatatctatagcatcctcaaaaaatatattcgcatatattcccaagtcttcagttctatcttctaaaaaatcttcaacgtatggaatataataatctattttacctcttctgatatcattaatgatatagtttttgacactatcttctgtcaattgattcttattcactatatctaagaaacggatagcgtccctaggacgaactactgccattaatatctctattatagcttctggacataattcatctattataccagaattaatgggaactattccgtatctatctaacatagttttaagaaagtcagaatctaagacttgatgttcatatattggttcatacatgaaatgatctctattgatgatagtgactatttcattctctgaaaattggtaactcattctatatatgctttccttgttgatgaaggatagaatatactcaatagaatttgtaccaacaaactgttctcttatgaatcgtatatcatcatctgaaataatcatgtaaggcatacatttaacaattagagacttgtctcctgttatcaatatactattcttgtgataatttatgtgtgaggcaaatttgtccacgttctttaattttgttatagtagatatcaaatccaatggagctacagttcttggcttaaacagatatagtttttctggaacaaattctacaacattattataaaggactttgggtagataagtgggatgaaatcctattttaattaatgcgatagccttgtcctcgtgcagatatccaaacgcttttgtgatagtatggcattcattgtctagaaacgctctacgaatatctgtgacagatatcatctttagagaatatactagtcgcgttaatagtactacaatttgtattttttaatctatctcaataaaaaaattaatatgtatgattcaatgtataactaaactactaactgttattgataactagaatcagaatctaatgatgacgtaaccaagaagtttatctactgccaatttagctgcattatttttagcatctcgtttagattttccatcggccttatcgaatactcttccgtcgatgtctacacaggcataaaatgtaggagagttactaggcccaactgattcaatacgaaaagaccaatctctcctagtaatttggcagtactcattaataacggtgacagggttagcatctttccaatcaataatttttttagccggaataacatcatcaaaagacttatgatcctctctcattgatttttcgcgggatacatcatctattatgacgtcagccatagcatcagcatccggcttatccgcctccgttgtcataaaccaacgaggaggaatatcgtcggagctgtacaccatagcactacgttgaagatcgtacagagctttattaacttctcgcttctccatattaagttgtctagttagttgtgcagcagtagctccttcgattccaatgtttttaatagccgcacacacaatctctgcgtcagaacgctcgtcaatatagatcttagacatttttagagagaactaacgcaaccagcaataaaactgaacctactttatcatttttttattcatcatcctctggtggttcgtcgttcctatcaaatgtagctctgattaacccgtcatctataggtgatgctggttctggagattctggaggagatggattattatctggaagaatctctgttatttccttgttttcatgtatcgattgcgttgtaacattaagattgcgaaatgctctaaatttgggaggcttaaagtgttgtttgcaatctctacacgcgtgtctaactagtggaggttcgtcagctgctctagtttgaatcatcatcggcgtagtattcctacttttacagttaggacacggtgtattgtatttctcgtcgagaacgttaaaataatcgttgtaactcacatcctttattttatctatattgtattctactcctttcttaatgcattttataccgaataagagatagcgaaggaattctttttcggtgccgctagtacccttaatcatatcacatagtgttttatattccaaatttgtggcaatagacggtttatttctatacgatagtttgtttctggaatcctttgagtattctataccaatattattctttgattcgaatttagtttcttcgatattagattttgtattacctatattcttgatgtagtactttgatgatttttccatggcccattctattaagtcttccaagttggcatcatccacatattgtgatagtaattctcggatatcagtagcggctaccgccattgatgtttgttcattggatgagtaactactaatgtatacattttccatttataacacttatgtattaactttgttcatttatattttttcattattatgttgatattaacaaaagtgaatatatatatgttaataattgtattgtggttatacggctacaattttataatgagtgaaagtcagtgtccgatgatcaatgacgatagctttactctgaaaagaaagtatcaaatcgatagtgcggagtcaacaataaaaatggataagaagaggataaagtttcagaatagagccaaaatggtaaaagaaataaatcagacaataagagcagcacaaactcattacgagacattgaaactaggatacataaaatttaagagaatgattatgactactactctagaagatatagcaccatctattccaaataatcagaaaacttataaactattctcggacatttcagccatcggcaaagcatcacagaatccgagtaagatggtatatgctctgctgctttacatgtttcccaatttgtttggagatgatcatagattcattcgttatagaatgcatccaatgagtaaaatcaaacacaagatcttctctcctttcaaacttaatcttattagaatattagtggaagaaagattctataataatgaatgcagatctaataaatggagaataattggaacacaagttgataaaatgttgatagctgaatctgataaatatacaatagatgcaaggtataacctaaaacccatgtatagaatcaagggagaatctgaagaagataccctctttatcaaacagatggtagaacaatgtgtgacatcccaggaattggtggaaaaagtgttgaagatactgtttagagatttgttcaagagtggagaatacaaagcgtacagatacgatgatgatgtagaaaatggatttattggattggatacactaaaattaaacattgttcatgatatagttgaaccatgtatgcctgttcgtaggccagtggctaagatactgtgtaaagaaatggtaaataaatactttgagaatccgctacatattattggtaaaaatcttcaagagtgcattgactttgttagtgaataggcatttcatctttctccaatactaattcaaattgttaaattaataatggatagtataaatagttattagttataagatagtaaaaataattattagaataagagtgtagtatcatagataactctcttctataaaaatggattttattcgtagaaagtatcttatatacacagtagaaaataatatagattttttaaaggatgatacattaagtaaagtaaacaattttaccctcaatcatgtactagctctcaagtatctagttagcaattttcctcaacacgttattactaaggatgtattagctaataccaatttttttgttttcatacatatggtacgatgttgtaaagtgtacgaagcggttttacgacacgcatttgatgcacccacgttgtacgttaaagcattgactaagaattatttatcgtttagtaacgcaatacaatcgtacaaggaaaccgtgcataaactaacacaagatgaaaaatttttagaggttgccgaatacatggacgaattaggagaacttataggcgtaaattatgacttagttcttaatccattatttcacggaggggaacccatcaaagatatggaaatcatttttttaaaactgtttaagaaaacagacttcaaagttgttaaaaaattaagtgttataagattacttatttgggcatacctaagcaagaaagatacaggcatagagtttgcggataatgatagacaaaatatatacactctatttcaacaaactggtagaatcgtccatagcaatctaacagaaacgtttagagattatatctttcccggagataagactagctattgggtgtggttaaacgaaagtatagctaatgatgcggatatcgttcttaatagacacgccattaccatgtatgataaaattcttagttatatatactctgagataaaacaaggacgcgttaataaaaacatgcttaagttagtttatatctttgagcctgaaaaagatatcagagaacttctgctagaaatcatatatgatattcctggagatatcctatctattattgatgcaaaaaacgacgattggaaaaaatattttattagtttttataaagctaattttattaacggtaatacatttattagtgatagaacgtttaacgaggacttattcagagttgttgttcaaatagatcccgaatatttcgataatgaacgaattatgtctttattctctacgagtgctgcggacattaaacgatttgatgagttagatattaataacagttatatatctaatataatttatgaggtgaacgatatcacattagatacaatggatgatatgaagaagtgtcaaatctttaacgaggatacgtcgtattatgttaaggaatacaatacatacctgtttttgcacgagtcggatcccatggtcatagagaacggaatactaaagaaactgtcatctataaaatccaagagtagacggctgaacttgtttagcaaaaacattttaaaatattatttagacggacaattggctcgtctaggtcttgtgttagatgattataaaggagacttgttagttaaaatgataaaccatcttaagtctgtggaggatgtatccgcattcgttcgattttctacagataaaaaccctagtattcttccatcgctaatcaaaactattttagctagttataatatttccatcatcgtcttatttcaaaggtttttgagagataatctatatcatgtagaagaattcttggataaaagcatccatctaaccaagacggataagaaatatatacttcaattgataagacacggtagatcatagaacagaccaaatatattattaataatttgtatatacatagatataattatcacacatttttgataaatgggaactgctgcaacaattcagactcccaccaaattaatgaataaagaaaatgcagaaatgattttggaaaaaattgttgatcatatagttatgtatattagtgacgaatcaagtgattcagaaaataatcctgaatatattgattttcgtaacagatacgaagactatagatctctcattataaaaagtgatcacgagtttgtaaagctatgtaaaaatcatgcggagaaaagttctccagaaacgcaacaaatgattatcaaacacatatacgaacaatatcttattccagtatctgaagtactattaaaacctataatgtccatgggtgacataattacatataacggatgtaaagacaatgaatggatgctagaacaactctctaccctaaactttaacaatctccgcacatggaactcatgtagcataggcaatgtaacgcgtctgttttatacattttttagttatctgatgaaagataaactaaatatataagtataatcccattctaatactttaacctgatgtattagcatcttattagaatattaacctaactaaaagacataacataaaaactcattacatagttgataaaaagcggtaggatataaatattatggctgccaccgttccgcgttttgacgacgtgtacaaaaatgcacaaagaagaattctagatcaagaaacattttttagtagaggtctaagtagaccgttaatgaaaaacacatatctatttgataattacgcgtatggatggataccagaaactgcaatttggagtagtagatacgcaaacctagatgctagtgactattatcccatttcgttgggattacttaaaaagttcgagtttctcatgtctctatataaaggtcctattcccgtatatgaagaaaaagtaaatactgaattcatagccaatggatcgttctctggtagatacgtatcatatcttcgaaagttttctgcccttccaacaaacgagtttattagttttttgttactgacttccattccaatctataatatcttgttctggtttaaaaacacacagtttgatattactaaacacacattattcagatacgtctatacagataatgccaaacacctggcgttggctaggtatatgcatcaaacaggagactataagcctttgtttagtcgtctcaaagagaattatatatttaccggtcccgttccaataagtatcaaagatatagatcaccctaatcttagtagagcaagaagtccatccgattatgagacattagctaatattagtactatattgtactttaccaagtatgatccggtattaatgtttttattgttttacgtacctgggtattcaattactacaaaaattactccagccgtagaatatctaatggataaactgaatctaacaaagagcgacgtacaactgttgtaaattattttatgcttcgtaaaatgtaggttttgaaccaaacattctttcaaagaatgagatgcataaaactttattatccaatagattgactatttcggacgtcaatcgtttaaagtaaacttcgtaaaatattctttgatcactgccgagtttaaaacttctatcgataattgtctcatatgttttaatatttacaagttttttggtccatggtacattagccggacaaatatatgcaaaataatatcgttctccaagttctatagtttctggattatttttattatattcagtaactaaatacatattagggttatctgcggatttataatttgagtgatgcattctactcaacataaataattctagaggagacgatctactatcaaattcggatcgtaaatctgtttctaaagaacggagaatatctatacatacctgattagaattcatccgtccttcagacaacatctcagacagtctggttttgtacatcttaatcatattcttatgaaacttggaaacatctcttctagtttcactagtacctttattaattctctcaggtacagattttgaattcgacgatgctgagtatttcatcgttgtatatttcttcttcgattgcataatcagattcttatataccgcctcaaactctattttaaaattattaaacaatactctattattaatcagtcgttctaactctttcgctatttctatagacttatctacatcttgactgtctatctctgtaaacacggagtcggtatctccatacacgctacgaaaacgaaatctgtaatctataggcaacgatgttttcacaatcggattaatatctctatcgtccatataaaatggattacttaatggattggcaaaccgtaacataccgttagataactctgctccatttagtaccgattctagatacaagatcattctacgtcctatggatgtgcaactcttagccgaagcgtatgagtatagagcactatttctaaatcccatcagaccatatactgagttggctactatcttgtacgtatattgcatggaatcatagatggccttttcagttgaactggtagcctgttttagcatctttttatatctggctctctctgccaaaaatgttcttaatagtctaggaatggttccttctatcgatctatcgaaaattgctatttcagagatgaggttcggtagtctaggttcacaatgaaccgtaatatatctaggaggtggatatttctgaagcaatagctgattatttatttcttcttccaatctattggtactaacaacgacaccgactaatgtttccggagatagatttccaaagatacacacattaggatacagactgttataatcaaagattaatacattattactaaacattttttgttttggagcaaataccttaccgccttcataaggaaacttttgttttgtttctgatctaactaagatagttttagtttccaacaatagctttaacagtggacccttgatgactgtactcgctctatattcgaataccatggattgaggaagcacatatgttgacgcacccgcgtctgtttttgtttctactccataatactcccacaaatactgacacaaacaagcatcatgaatacagtatctagccatatctaaagctatgtttagattataatccttatacatctgagctaaatcaacgtcatcctttccgaaagataatttatatgtatcattaggtaaagtaggacataatagtacgactttaaatccattttcccaaatatctttacgaattactttacatataatatcctcatcaacagtcacataattacctgtggttaaaacctttgcaaatgcagcggctttgcctttcgcgtctgtagtatcgtcaccgatgaacgtcatttctctaactcctctatttaatactttacccatgcaactgaacgcgttcttggatatagaatccaatttgtacgaatccaatttttcaaatttttgaatgaatgaatatagatcgaaaaatatagttccattattgttattaacgtgaaacgtagtattggccatgccgcctactcccttatgactagactgatttctctcataaatacagagatgtacagcttcctttttgtccggagatctaaagataattttctctcctgttaataactctagacgattagtaatatatctcagatcaaagttatgtccgttaaaggtaacgacgtagtcgaacgttagttccaacaattgtttagctattcgtaacaaaactatttcagaacatagaactagttctcgttcgtaatccatttccattagtgactgtatcctcaaacatcctctatcgacggcttcttgtatttcctgttccgttaacatctcttcattaatgagcgtaaacaataatcgtttaccacttaaatcgatataacagtaacttgtatgcgagattgggttaataaatacagaaggaaacttcttatcgaagtgacactctatatctagaaataagtacgatcttgggatatcgaatctaggtatttttttagcgaaacagttacgtggatcgtcacaatgataacatccattgttaatctttgtcaaatattgctcgtccaacgagtaacatccgtctggagatatcccgttagaaatataaaaccaactaatattgagaaattcatccatggtggcattttgtatgctgcgtttctttggctcttctatcaaccacatatctgcgacggagcattttctatctttaatatctagattataacttattgtctcgtcaatgtctatagttctcatctttcccaacggcctcgcattaaatggaggaggagacaatgactgatatatttcgtccgtcactacgtaataaaagtaatgaggaaatcgtataaatacggtctcgccatttcgacatctggatttcagatataaaaatctgttttcaccgtgactttcaaaccaattaatgcaccgaacatccatttatagaatttagaaatatattttcatttaaatgaatcccaaacattggggaagagccgtatggaccattatttttatagtactttcgcaagcgggtttagacggcaacatagaagcgtgtaaacgaaaactatatactatagttagcactcttccatgtcctgcatgtagacggcacgcgactatcgctatagaggacaataatgtcatgtctagcgatgatctgaattatatttattattttttcatcagattatttaacaatttggcatctgatcccaaatacgcgatcgatgtgacaaaggttaaccctttataaacttaacccattataaaacttatgattagtcacaactgaaataaccgcgtgattattttttggtataattctacacggcatggtttctgtgactatgaattcaacccccgttacattagtgaaatctttaacaaacagcaagggttcgtcaaagacataaaactcattgtttacaatcgaaatagaccccctatcacacttaaaataaaaaatatccttatcctttaccaccaaataaaattctgattggtcaatgtgaatgtattcacttaacagttccacaaatttatttattaactccgaggcacatacatcgtcggtattttttatggcaaactttactcttccagcatccgtttctaaaaaaatattaacgagttccatttatatcatccaatattattgaaatgacgttgatggacagatgatacaaataagaaggtacggtacctttgtccaccatctcctccaattcatgctctattttgtcattaactttaatgtatgaaaacagtacgccacatgcttccatgacagtgtgtaacactttggatacaaaatgtttgacattagtataattgtccaagactgtcaatctataatagatagtagctataatatattctatgatggtattgaagaagatgacaaccttggcatattgatcatttaacacagacatggtatcaacagatagcttgaatgaaagagaatcagtaattggaataagcgtcttctcgatagagtgtccgtataccaacatgtctgatattttgatgtattccattaaattatttagttttttctttttattctcgttaaacagcatttctgtcaacggaccccaacatcgttgaccgattaagttttgattgatttttccgtgtaaggcgtatctagtcagatcgtatagcctatccaataatccatcgtctgtgtgtagatcacatcgtacactttttaattctctatagaagagcgacagacatctggagcaattacagacagcaatttctttattctctacagatgtaagatacttgaagacattcctatgatgatgcagaattttggataacacggtattgatggtatctgttaccataattcctttgatggctgatagtgtcagagcacaagatttccaatctttgacaatttttagcaccattatctttgttttgatatctatatcagacagcatggtgcgtctgacaacacagggattaagacggaaagatgaaatgattctctcaacatcttcaatagataccttgctattttttctggcattatctatatgtgcgagaatatcctctagagaatcagtatcctttttgatgatagtggatctcaatgacatgggacgtttaaaccttcttattctatcaccagattgcatggtgatttgtcttctttcttttatcataatgtaatctctaaattcatcggcaaattgtctatatctaaaatcataatatgagatgtttacctctacaaatatctgttcgtccaatgttagagtatttacatcagttttgtattccaaattaaacatggcaacggatttaattttatattcctctattaagtcctcgtcgataataacagaatgtagataatcatttaatccgtcgtacatggttggaagatgcttgttgacaaaatctttaattgtcttgatgaaggtgggactatatctaacatcttgattaataaaatttataacattgtccataggatactttgtaactagttttatacacatctcttcatcggtaagtttagacagaatatcgtgaacaggtggtatattatattcatcagatatacgaagaacaatgtccaaatctatattgtttaatatattatatagatgtagcgtagctcctacaggaatatctttaactaagtcaatgatttcatcaaccgttagatctattttaaagttaatcatataggcattgatttttaaaaggtatgtagccttgactacattctcattaattaaccattccaagtcattgtgtgtaagaagattatattctatcataagcttgactacatttggtcccgataccattaaagaattcttatgatataaggaaacagattttaggtactcatctactctacaagaattttggagagccttaacgatatcagtgacgtttattatttcaggaggaaagaatctaacattgagaatatcggaattaatagcttccagatacagtgattttggcaatagtccgtgtaatccataatccagtaacacgagctggtgcttgctagacaccttttcaatgtttaatttttttgaaataagctttgataaagccttcctcgcaaattccggatacatgaacatgtcggcgacatgattaagtattgttttttcattatttttatattttctcaacaagttctcaataccccaatagatgatagaatatcacccaatgcgtccatgttgtctatttccaacaggtcgctatatccaccaatagaagtttttccaaaaaagattctaggaacagttctaccaccagtaatttgttcaaaataatcccgcaattcattttcgggtttaaattctttaatatcgacaatttcatacgctcctcttttgaaactaaacttatttagaatatccagtgcatttctacaaaaaggacatgtatacttgacaaaaattgtcactttgttattggccaacctttgttgtacaaattcctcggccattttaatatttaagtgatataaaactatctcgacttatttaactctttagtcgagatatatggacgcagatagctatatgatagccaactacagaaggcaaacgctataaaaaacataattacgacgagcatatttataaatatttttattcagcattacttgatatagtaatattaggcacagtcaaacattcaaccactctcgatacattaactctctcattttctttaacaaattctgcaatatcttcgtaaaaagattcttgaaactttttagaatatctatcgactctagatgaaatagcgttcgtcaacatactatgttttgtatacataaaggcgcccattttaacagtttctagtgacaaaatgctagcgatcctaggatcctttagaatcacatagattgacgattcgtctctcttagtaactctagtaaaataatcatacaatctagtacgcgaaataatattatccttgacttgaggagatctaaacaatctagttttgagaacatcgataagttcatcgggaatgacatacatactatctttaatagaactcttttcatccagttgaatggattcgtccttaaccaactgattaatgagatcttctattttatcattttccagatgatatgtatgtccattaaagttaaattgtgtagcgcttctttttagtctagcagccaatactttaacatcactaatatcgatatacaaaggagatgatttatctatggcattaagaattcgtttttcgacatccgtcaaaaccaattcctttttgcctgtatcatccagttttccatcctttgtaaagaaattattttctactagactattaataagactgataaggattcctccataattgcacaatccaaactttttaacaaaactagactttacgagatctacaggaatgcgtacttcaggttttttagcttgtgattttttcttttgcggacattttctagtaaccaactcatctaccatttcattgattttagcagtgaaataagctttcaatgcacgggcactgatactattgaaaacgagttgatcttcaaattccgccatttaagttcaccaaacaacttttaaatacaaatatatcaatagtagtagaataagaactataaaaaaaataataattaaccaaccccaacaaccggtattattagttgatgtggtagttttctcatcacttagaacagatttaacaatttctataaagtctgtcaaatcatcttccggagaccccataaatacaccaaatatagcggcgtacaacttatccatttatacattgaatattggcttttctttatcgctatcttcatcatattcatcatcaatatcaacaagtcccagattacgagccagatcttcttctacattttcagtcattgatacacgttcactatctccagagagtccgataacgttagccaccacttctctatcaatgattagtttcttgagcgcgaaagtaatttttgtttccgttccggatctatagaagacgataggtgtgataattgccttggccaattgtctttctcttttactgagtgattctagttcaccttctatagatctgagaatggatgattctccagtcgaaacatattctaccatggatccgtttaatttgttgatgaagatggattcatccttaaatgttttctctgtaatagtttccaccgaaagactatgcaaagaatttggaatgcgttccttgtgcttaatgtttccatagacggcttctagaagttgatacaacataggactagccgcggtaacttttatttttagaaagtatccatcgcttctatcttgtttagatttatttttataaagtttagtctctccttccaacataataaaagtggaagtcatttgactagataaactatcagtaagttttatagagatagacgaacaattagcgtattgagaagcatttagtgtaacgtattcgatacattttgcattagatttactaatcgattttgcatactctataacacccgcacaagtctgtagagaatcgctagatgcagtaggtcttggtgaagtttcaactctcttcttgattaccttactcatgattaaacctaaataattgtactttgtaatataatgatatatattttcactttatctcatttgagaataaaaatgtttttgtttaaccactgcatgatgtacagatttcggaatcgcaaaccaccagtggttttattttatccttgtccaatgtgaattgaatgggagcggatgcgggtttcgtacgtagatagtacattcccgtttttagaccgagactccatccgtaaaaatgcatactcgttagtttggaataactcggatctgctatatggatattcatagattgactttgatcgatgaaggctcccctgtctgcagccatttttatgatcgtcttttgtggaatttcccaaatagttttataaactcgcttaatatcttctggaaggtttgtattctgaatggatccaccatctgccataatcctattcttgatctcatcattccataattttctctcggttaaaactctaaggagatgcggattaactacttgaaattctccagacaatactctccgagtgtaaatattactggtatacggttccaccgactcattatttcccaaaatttgagcagttgatgcagtcggcataggtgccaccaataaactatttctaagaccgtatgttctgattttatcttttagaggttcccaattccaaagatccgacggtacaacattccaaagatcatattgtagaataccgttactggcgtacgatcctacatatgtatcgtatggtccttccttctcagctagttcacaactcgcctctaatgcaccgtaataaatggtttcgaagatcttcttatttagatcttgtgcttccaggctatcaaatggataatttaagagaataaacgcgtccgctaatccttgaacaccaataccgataggtctatgtctcttattagagatttcagcttctggaataggataataattaatatctataattttattgagatttctgacaattactttgaccacatccttcagtttgagaaaatcaaatcgcccatctattacaaacatgttcaaggcaacagatgccagattacaaacggctacctcattagcatccgcatattgtattatctcagtgcaaagattactacacttgatagttcctaaattttgttgattactctttttgttacacgcatccttataaagaatgaatggagtaccagtttcaatctgagattctataatcgctttccagacgactcgagcctttattatagatttgtatctcctttctctttcgtatagtgtatacaatcgttcgaactcgtctccccaaacattgtccaatccaggacattcatccggacacatcaacgaccactctccgtcatccttcactcgtttcataaagagatcaggaatccaaagagctataaatagatctctggttctatgttcctcgtttcctgtattctttttaagatcgaggaacgccataatatcagaatgccacggttccaagtatatggccataactccaggccgtttgtttcctccctgatctatgtatctagcggtgttattataaactctcaacattggaataataccgtttgatataccattggtaccggagatatagcttccactggcacgaatattactaattgatagacctattccccctgccattttagagattaatgcgcatcgttttaacgtgtcatagataccctctatgctatcatcgatcatgttaagtagaaaacagctagacatttggtgacgactagttcccgcattaaataaggtaggagaagcgtgcgtaaaccatttttcagaaagtagattgtacgtctcaatagctgagtctatatcccattgatgaattcctactgcgacacgcattaacatgtgctgaggtctttcaacgatcttgttgtttattttcaacaagtaggatttttccaaagttttaaaaccaaaatagttgtatgaaaagtctcgttcgtaaataataaccgagttgagtttatccttatatttgttaactatatccatggtgatacttgaaataatcggagaatgtttcccatttttaggattaacatagttgaataaatcctccatcacttcactaaatagtttttttgtttccttgtgtagatttgatacggctattctggcggctagaatggcataatccggatgttgtgtagtacaagtggctgctatttcggctgccagagtgtccaattctaccgttgttactccattatatattccttgaataaccttcatagctattttaataggatctatatgatccgtgtttaagccataacataattttctaatacgagacgtgattttatcaaacatgacattttccttgtatccatttcgtttaatgacaaacatttttgttggtgtaataaaaaaattatttaacttttcattaatagggatttgacgtatgtagcgtacaaaatgattgttcctggtatatagataaagagtcctatatatttgaaaatcgttacggctcgattaaactttaatgattgcatagtgaatatatcattaggatttaactccttgactatcatggcggcgccagaaattaccatcaaaagcattaatacagttataccgatcgcagttagaacggttatagcatccaccatttatatctaaaaattagatcaaagaatatgtgacaaagtcctagttgtatactgagaattgacgaaacaatgtttcttacatatttttttcttattagtaaccgacttaatagtaggaactggaaaactagacttgattattctataagtatagatacccttccaaataatattctctttgataaaagttccagaaaatgtagaattttttaaaaagttatcttttgctattaccaagattgtgtttagacgcttattattaatatgagtgatgaaatccacaccgcctctagatatcgcctttatttccacattagatggtaaatccaatagtgaaactatctttttaggaatgtatggactcgcgtttagaggagtaaacgtcttaggcgtcggaaaggatgattcatcaaacgaataaacaatttcacaaatggatgttaatgtattagtaggaaattttttgacgctattggaattgaagattctaatggatgatgttctacctatttcatccgataacatgttaatttccgacaccaacggttttaatatttcgatgatatacggtagtctctctttcggacttatatagcttattccacaatacgagtcattatatactccaaaaaacaaaataactagtataaaatctgtatcgaatgggaaaaacgaaattatcgacataggtatagaatccggaacattgaacgtattaatacttaattctttttctgtggtaagtaccgataggttattgacattgtatggttttaaatattctataacttgagacttgatagatattagtgatgaattgaaaattatttttatcaccacgtgtgtttcaggatcatcgtcgacgcccgtcaaccaaccgaacggagtaaaataaatatcattaatatatgctctagatattagtatttttatcaatcctttgattatcatcttctcgtaggcgaatgattccatgatcaagagtgatttaagaacatcctccggagtattaatgggcttagtaaacagtccatcgttgcaataataaaagttatccaagttaaaggatattatgcattcgtttaaagatatcacctcatctgacggagacaattttttggtaggttttagagactttgaagctacttgtttaacaaagttattcatcgtcgtctactattctatttaattttgtagttaatttatcacatatcacattaattgactttttggtccacttttccatacgtttatattcttttaatcctgcgttatccgtttccgttatatccagggatagatcttgcaagttaaatagaatgctcttaaataatgtcattttcttatccgctaaaaatttaaagaatgtataaacctttttcagagatttgaaactcttaggtggtgtcctagtacacaatatcataaacaaactaataaacattccacattcagattccaacagctgattaacttccacattaatacagcctattttcgctccaaatgtacattcgaaaaatctgaataaaacatcgatgtcacaatttgtattatccaatacagaatgtttgtgattcgtgttaaaaccatcggagaaggaatagaaataaaaattattatagtggtggaattcagttggaatattgcctccggagtcataaaaggatactaaacattgttttttatcataaattacacatttccaatgagacaaataacaaaatccaaacattacaaatctagaggtagaacttttaattttgtctttaagtatatacgataagatatgtttattcataaacgcgtcaaatttttcatgaatcgctaaggagtttaagaatctcatgtcaaattgtcctatataatccacttcggatccataagcaaactgagagactaagttcttaatacttcgattgctcatccaggctcctctctcaggctctattttcatcttgacgacctttggattttcaccagtatgtattcctttacgtgataaatcatcgattttcaaatccatttgtgagaagtctatcgccttagatactttttcccgtagtcgaggtttaaaaaaatacgctaacggtatactagtaggtaactcaaagacatcatatatagaatggtaacgcgtctttaactcgtcggttaactctttcttttgatcgagttcgtcgctactattgggtctgctcaggtgccccgactctactagttccaacatcataccgataggaatacaagacactttgccggcggttgtagatttatcatatttttccactacatatccgttacaatttgttaaaaatttagatacatctatattgctacataatccagctagtgaatatatatgacataataaattggtaaatcctagttctggtattttactaattactaaatctgtatatctttccatttatcatggaaaagaatttaccagatatcttcttttttccaaactgcgttaatgtattctcttacaaatattcacaagatgaattcagtaatatgagtaaaacggaacgtgatagtttctcattggccgtgtttccagttataaaacatagatggcataacgcacacgttgtaaaacataaaggaatatacaaagttagtacagaagcacgtggaaaaaaagtatctcctccatcactaggaaaacccgcacacataaacctaaccgcgaagcaatatatatacagtgaacacacaataagctttgaatgttatagttttctaaaatgtataacaaatacagaaatcaattcgttcgatgagtatatattaagaggactattagaagctggtaatagtttacagatattttccaattccgtaggtaaacgaacagatactataggtgtactagggaataagtatccatttagcaaaattccattggcctcattaactcctaaagcacaacgagagatattttcagcgtggatttctcatagacctgtagttttaactggaggaactggagtgggtaagacgtcacaggtacccaagttattgctttggtttaattatttatttggtggattctctactctagataaaatcactgactttcacgaaagaccagtcattctatctcttcctaggatagctttagttagattgcatagcaataccattttaaaatcattgggatttaaggtactagatggatctcctatttctttacggtacggatctataccggaagaattaataaacaaacaaccaaaaaaatatggaattgtattttctacccataagttatctctaacaaaactatttagttatggcactcttattatagacgaagttcatgagcatgatcaaataggagatattattatagcagtagcgagaaagcatcatacgaaaatagattctatgtttttaatgactgccacgttagaggatgacagggaacggctaaaagtatttttacctaatcccgcatttatacatattcctggagatacactgtttaaaattagcgaggtatttattcataataagataaatccatcttccagaatggcatacatagaagaagaaaagagaaatttagttactgctatacagatgtatactcctcctgatggatcatccggtatagtctttgtggcatccgttgcacagtgtcacgaatataaatcatatttagaaaaaagattaccgtatgatatgtatattattcatggtaaggtcttagatatagacgaaatattagaaaaagtgtattcatcacctaatgtatcgataattatttctactccttatttggaatccagcgttactatacgcaatgttacacacatttatgatatgggtagagtttttgtccccgctccttttggaggatcgcaacaatttatttctaaatctatgagagatcaacgaaaaggaagagtaggaagagttaatcctggtacatacgtctatttctatgatctgtcttatatgaagtctatacagcgaatagattcagaatttctacataattatatattgtacgctaataagtttaatctaacactccccgaagatttgtttataatccctacaaatttggatattctatggcgtacaaaggaatatatagactcgttcgatattagtacagaaacatggaataaattattatccaattattatatgaagatgatagagtatgctaaactttatgtactaagtcctattctcgctgaggagttggataactttgagaggacgggagaattaactagtattgtacgagaagccattttatctctaaatttacaaattaagattttaaattttaaacataaagatgatgatacgtatatacacttttgtaaaatattattcggtgtctataacggaacaaacgctactatatattatcatagacctctaacgggatatatgaatatgatttcagatactatatttgttcctgtagataataactaaaaatcaaactctaatgaccacatctttttttagagatgaaaaattttccacatctccttttgtagacacgactaaacattttgcagaaaaaagtttattagtgtttagataatcgtatacttcatcagtgtagatagtaaatgtgaacagataaaaggtattcttgctcaatagattggtaaattccatagaatatattaatcctttcttcttgagatcccacatcatttcaaccagagacgttttatccaatgatttacctcgtactataccacatacaaaactagattttgcagtgacgtcgtacctggtattcctaccaaacaaaattttacttttagttcttttagaaaattctaaggtagaatctctatttgccaatatgtcatctatggaattaccactagcaaaaaatgatagaaatatatattgatacatcgcagctggttttgatctactatactttaaaaacgaatcagattccataattgcctgtatatcatcagctgaaaaactatgttttacacgtattccttcggcatttctttttaatgatatatcttgtttagacaatgataaagttatcatgtccatgagagacgcgtctccgtatcgtataaatatttcattagatgttagacgcttcattaggggtatacttctataaggtttcttaatcagtccatcattggttgcgtcaagaactactatcggatgttgttgggtatctctagtgttacacatggccttactaaagtttgggtaaataactatgatatctctattaattatagatgcatatatttcattcgtcaaggatattagtatcgacttgctatcgtcattaatacgtgtaatgtaatcatataaatcatgcgatagccaaggaaaatttaaatagatgttcatcatataatcgtcgctataattcatattaatacgttgacattgactaatttgtaatatagcctcgccacgaagaaagctctcgtattcagtttcatcgataaaggataccgttaaatataactggttgccgatagtctcatagtctattaagtggtaagtttcgtacaaatacagaatccctaaaatattatctaatgttggattaatctttaccataactgtataaaatggagacggagtcataactattttaccgtttgtacttactggaatagatgaaggaataatctccggacatgctggtaaagacccaaatgtctgtttgaagaaatccaatgttccaggtcctaatctcttaacaaaaattacgatattcgatcccgatatcctttgcattctatttaccagcatatcacgaactatattaagattatctatcatgtctattctcccaccgttatataaatcgcctccgctaagaaacgttagtatatccatacaatggaatacttcatttctaaaatagtattcgttttctaattctttaatgtgaaatcgtatactagaaagggaaaaattatctttgagttttccgttagaaaagaaccacgaaactaatgttctgattgcgtccgattccgttgctgaattaatggatttacaccaaaaactcatataacttctagatgtagaagcattcgctaaaaaattagtagaatcaaaggatataagtagatgttccaacaagtgagcaattcccaagatttcatctatatcattctcgaatccgaaattagaaattcccaagtagatatcctttttcatccgatcgttgatgaaaatacgaactttattcggtaagacaatcatttactaaggagtaaaataggaagtaatgttcgtatgtcgttatcatcgtataaattaaaggtgtgttttttaccattaagtgacattataattttaccaatattggaattataatataggtgtatttgcgcactcgcgacggttgatgcatcggtaaatatagctgtatctaatgttctagtcggtatttcatcatttcgctgtctaataatagcgttttctctatctgtttccattacagctgcctgaagtttattggtcggataatatgtaaaataataagaaatacatacgaataacaaaaataaaataagatataataaagatgccatttagagatctaattttgtttaacttgtccaaattcctacttacagaagatgaggaatcgttggagatagtgtcttccttatgtagaggatttgaaatatcttataatgacttgataacttactttccagataggaaataccataaatatatttataaagtatttgaacatgtagatttatcggaggaattaagtatggaattccatgatacaactctgagagatttagtctatcttagattgtacaagtattccaagtgtatacggccgtgttataaattaggagataatctaaaaggcatagttgttataaaggacaggaatatttatattagggaagcaaatgatgacttgatagaatatctcctcaaggaatacactcctcagatttatacatattctaatgagcgcgtccccataactggttcaaaattaattctttgtggattttctcaagttacatttatggcgtatacaacgtcgcatataacaacaaataaaaaggtagatgttctcgtttccaaaaaatgtatagatgaactagtcgatccaataaattatcaaatacttcaaaatttatttgataaaggaagcggaacaataaacaaaatactcaggaagatattttattcggtaacaggtggccaaactccataggtagctttttctatttcggattttagaatttccaaattcaccagcgatttatcggttttggtgaaatccaaggatttattaatgtccacaaatgccatttgttttgtctgtggattgtatttgaaaatggaaacgatgtagttagatagatgcgctgcgaagtttcctattagggttccgcgcttcacgtcacccagcatacttgaatcaccatcctttaaaaaaaatgataagatatcaacatggagtatatcatactcgaattttaattcttctactgactcactgacattttcacaaatactacaatacggtttaccgaaaataatcagtacgttcttcatttatgggtatcaaaaacttaaaatcgttactgctggaaaataaatcactgacgatattagatgataatttatacaaagtatacaatggaatatttgtggatacaatgagtatttatatagccgtcgccaattgtgtcagaaacttagaagagttaactacggtattcataaaatacgtaaacggatgggtaaaaaagggagggcatgtaaccctttttatcgatagaggaagtataaaaattaaacaagacgttagagacaagagacgtaaatattctaaattaaccaaggacagaaaaatgttagaattagaaaagtgtacatccgaaatacaaaatgttaccggatttatggaagaagaaataaaggcagaaatgcaattaaaaatcgataaactcacatttcaaatatatttatctgattctgataacataaaaatatcattgaatgagatactaacacatttcaacaataatgagaatgttacattattttattgtgatgaacgagacgcagaattcgttatgtgtctcgaggctaaaacacatttctctaccacaggagaatggccgttgataataagtaccgatcaggatactatgctatttgcatctgctgataatcatcctaagatgataaaaaacttaactcaactgtttaaatttgttccctcggcagaggataactatttagcaaaattaacggcgttagtgaatggatgtgatttctttcctggactctatggggcatctataacacccaccaacttaaacaaaatacaattgtttagtgattttacaatcgataatatagtcactagtttggcaattaaaaattattatagaaagactaactctaccgtagacgtgcgtaatattgttacgtttataaacgattacgctaatttagacgatgtctactcgtatattcctccttgtcaatgcactgttcaagaatttatattttccgcattagatgaaaaatggaatgaatttaaatcatcttatttagaaagcgtgccgttaccctgccaattaatgtacgcgttagaaccacgcaaggagattgatgtttcagaagttaaaactttatcatcttatatagatttcgaaaatactaaatcagatatcgatgttataaaatctatatcctcgatcttcggatattctaacgaaaactgtaacacgatagtattcggcatctataaggataatttactactgagtataaataattcattttactttaacgatagtctgttaataaccaatactaaaagtgataatataataaatataggttactagattaaaaatggtgttccaactcgtgtgctctacatgcggtaaagatatttctcacgaacgatataaattgattatacgaaaaaaatcattaaaggatgtactcgtcagtgtaaagaacgaatgttgtaggttaaaattatctacacaaatagaacctcaacgtaacttaacagtgcaacctctattggatataaactaatatggatccggttaattttatcaagacatatgcgcctagaggttctattatttttattaattataccatgtcattaacaagtcatttgaatccatcgatagaaaaacatgtgggtatttattatggtacgttattatcggaacacttggtagttgaatctacctatagaaaaggagttcgaatagtcccattggatagtttttttgaaggatatcttagtgcaaaagtatacatgttagagaatattcaagttatgaaaatagcagctgatacgtcattaactttattgggtattccgtatggatttggtcatgatagaatgtattgttttaaattggtagctgactgttataaaaatgccggtattgatacatcgtctaaacgaatattgggcaaagatatttttctgagccaaaacttcacagacgataatagatggataaagatatatgattctaataatttaacattttggcaaattgattaccttaaagggtgagttaatatgcataactactcctccgttgttttttccctcgttctttttcttaacgttgtttgccatcactctcataatgtaaagatattctaaaatggtaaacttttgcatatcggacgcagaaattggtataaatgttgtaattgtattatttcccgtcaatggactagtcacagctccatcagttttatatcctttagagtatttctcactcgtgtctaacattctagagcattccatgatctgtttatcgttgatattggccggaaagatagattttttattttttattatattactattggcaattgtagatataacttctggtaaatatttttctaccttttcaatctcttctattttcaagccggctatatattctgctatattgttgctagtatcaataccttttctggctaagaagtcatatgtggtattcactatatcagttttaactggtagttccattagcctttccacttctgcagaataatcagaaattggttctttaccagaaaatccagctactataataggctcaccgatgatcattggcaaaatcctatattgtaccagattaatgagagcatatttcatttccaataattctgctagttcttgagacattgatttatttgatgaatctagttggttctctagatactctaccatttctgccgcatacaataacttgttagataaaatcagggttatcaaagtgtttagcgtggctagaatagtgggcttgcatgtattaaagaatgcggtagtatgagtaaaccgttttaacgaattatatagtctccagaaatctgtggcgttacatacatgagccgaatgacatcgaagattgtccaatatttttaatagctgctctttgtccattatttctatatttgactcgcaacaattgtagataccattaatcaccgattcctttttcgatgccggacaatagcacaattgtttagctttggactctatgtattcagaattaatagatatatctctcaatacagattgcactatacattttgaaactatgtcaaaaattgtagaacgacgctgttctgcagccatttaactttaaataatttacaaaaatttaaaatgagcatccgtataaaaatcgataaactgcgccaaattgtggcatatttttcagagttcagtgaagaagtgtctataaatgtagactcgacggatgagttaatgtatatttttgccgccttgggcggatctgtaaacatttgggcaattatacctctaagtgcatcagtgttttaccgaggagccgaaaatattgtgtttaatcttcctgtgtccaaggtaaaatcgtgtttgtgtagttttcacaatgatgccatcatagatatagaacctgatctggaaaataatctagtaaaactttctagttatcatgtagtaagtgtcgattgtaacaaggaactgatgcctattaggacagatactactatttgtctaagtatagatcaaaagaaatcttacgtgtttaattttcacaagtatgaagaaaaatgttgtggtagaaccgtcattcatctagaatggttgttgggctttatcaagtgtattagtcagcatcagcatctggctattatgtttaaagatgacaatattattatgaagactcctggtaatactgatgcgttttccagggaatattctatgactgaatgttctcaagaactacaaaagttttctttcaaaatagctatctcgtctctcaacaaactacgaggattcaaaaagagagtcaatgtttttgaaactagaatcgtaatggataatgacgataacattttaggaatgttgttttcggatagagttcaatcctttaagatcaacatctttatggcgtttttagattaatactttcaatgagataaatatgggtggcggagtaagtgttgagctccctaaacgggatccgcctccgggagtacccactgatgagatgttattaaacgtggataaaatgcatgacgtgatagctcccgctaagcttttagaatatgtgcatataggaccactagcaaaagataaagaggataaagtaaagaaaagatatccagagtttagattagtcaacacaggacccggtggtctttcggcattgttaagacaatcgtataatggaaccgcacccaattgctgtcgcacttttaatcgtactcattattggaagaaggatggaaagatatcagataagtatgaagagggtgcagtattagaatcgtgttggccagacgttcacgacactggaaaatgcgatgttgatttattcgactggtgtcagggggatacgttcgatagaaacatatgccatcagtggatcggttcagcctttaataggagtaatagaactgtagagggtcaacaatcgttaataaatctgtataataagatgcaaacattatgtagtaaagatgctagtgtaccaatatgcgaatcatttttgcattatttacgcgcacacaatacagaagatagcaaagagatgatcgattatattctaagacaacagtctgcggactttaaacagaaatatatgagatgtagttatcccactagagataagttagaagagtcattaaaatatgcggaacctcgagaatgttgggatccagagtgttcgaatgccaatgttaatttcttactaacacgtaattataataatttaggactttgcaatattgtacgatgtaataccagcgtgaacaacttacagatggataaaacttcctcattaagattgtcatgtggattaagcaatagtgatagattttctactgttcccgtcaatagagcaaaagtagttcaacataatattaaacactcgttcgacctaaaattgcatttgatcagtttattatctctcttggtaatatggatactaattgtagctatttaaatgggtgccgcggcaagcatacagacgacggtgaatacactcagcgaacgtatctcgtctaaattagaacaagaagcgaacgctagtgctcaaacaaaatgtgatatagaaatcggaaatttttatatccgacaaaaccatggatgtaacctcactgttaaaaatatgtgctctgcggacgcggatgctcagttggatgctgtgttatcagccgctacagaaacatatagtggattaacaccggaacaaaaagcatacgtgccagctatgtttactgctgcgttaaacattcagacgagtgtaaacactgttgttagagattttgaaaattatgtgaaacagacttgtaattctagcgcggtcgtcgataacaaattaaagatacaaaacgtaatcatagatgaatgttacggagccccaggatctccaacaaatttggaatttattaatacaggatctagcaaaggaaattgtgccattaaagcgttgatgcaattgacgactaaggccactactcaaatagcacctagacaagttgctggtacaggagttcagttttatatgattgttatcggtgttataatattggcagcgttgtttatgtactatgccaagcgtatgttgttcacatccaccaatgataaaatcaaacttattttagccaataaggaaaacgtccattggactacttacatggacacattctttagaacttctccgatggttattgctaccacggatatgcaaaactgaaaatatattgataatattttaatagattaacatggaagttatcgctgatcgtctagacgatatagtgaaacaaaatatagcggatgaaaaatttgtagattttgttatacacggtctagagcatcaatgtcctgctatacttcgaccattaattaggttgtttattgatatactattatttgttatagtaatttatatttttacggtacgtctagtaagtagaaattatcaaatgttgttggtggtgctagtcatcacattaactattttttattactttatactataatagtactagactgacttctaacaaacatctcacctgccataaataaatgcttgatattaaagtcttctatttctaacactattccatctgtggaaaataatactctgacattatcgctaattgacacatcggtgagtgatatgcctataaagtaataatcttctttgggcacatataccagtgtaccaggttctaacaacctatttactggtgctcctgtagcatactttttctttaccttgagaatatccatcgtttgcttggtcaatagcgatatgtgattttttatcaaccactcaaaaaagtaattggagtgttcatatcctctacgggctattgtctcatggccgtgtatgaaatttaagtaacacgactgtggtagatttgttctatagagccgattgccgcaaatagatagaactaccaatatgtctgtacaaatgttaaacattaattgattaacagaaaaaacaatgttcgttctgggaatagaaaccagatcaaaacaaaattcgttagaatatatgccacgtttatacatggaatataaaataactacagtttgaaaaataacagtatcatttaaacatttaacttgcggggttaatctcacaactttactgtttttgaactgttcaaaatatagcatcgatccgtgagaaatacgtttagccgcctttaatagaggaaatcccaccgcctttctggatctcaccaacgacgatagttctgaccagcaactcatttcttcatcatccacctgttttaacatataataggcaggagatagatatccgtcattgcaatattccttctcgtaggcacacaatctaatattgataaaatctccattctcttctctgcatttattatcttgtctcggtggctgattaggctgtggtcttggtttaggccttggtctatcgttgttgaatctattttggtcattaaatctttcatttcttcctggtatatttctatcacctcgtttggttggatttttgtctatattatcgtttgtaacatcggtacgggtattcatttatcacaaaaaaaacttctctaaatgagtctactgctagaaaacctcatcgaagaagataccatattttttgcaggaagtatatctgagtatgatgatttacaaatggttattgccggcgcaaaatccaaatttccaagatctatgctttctatttttaatatagtacctagaacgatgtcaaaatatgagttggagttgattcataacgaaaatatcacaggagcaatgtttaccacaatgtataatataagaaacaatttgggtctaggagatgataaactaactattgaagccattgaaaactatttcttggatcctaacaatgaagttatgcctcttattattaataatacggatatgactgccgtcattcctaaaaaaagtggtaggagaaagaataagaacatggttatcttccgtcaaggatcatcacctatcttgtgcattttcgaaactcgtaaaaagattaatatttataaagaaaatatggaatccgcgtcgactgagtatacacctatcggagacaacaaggctttgatatctaaatatgcgggaattaatgtcctgaatgtgtattctccttccacatccataagattgaatgccatttacggattcaccaataaaaataaactagagaaacttagtactaataaggaactagaatcgtatagttctagccctcttcaagaacccattaggttaaatgattttctgggactattggaatgtgttaaaaagaatattcctctaacagatattccgacaaaggattgattactataaatggagaatgttcctaatgtatactttaatcctgtgtttatagagcccacgtttaaacattctttattaagtgtttataaacacagattaatagttttatttgaagtattcgttgtattcattctaatatatgtattttttagatctgaattaaatatgttcttcatgcctaaacgaaaaatacccgatcctattgatagattacgacgtgctaatctagcgtgtgaagacgataaattaatgatctatggattaccatggatgacaactcaaacatctgcgttatcaataaatagtaaaccgatagtgtataaagattgtgcaaagcttttgcgatcaataaatggatcacaaccagtatctcttaacgatgttcttcgcagatgatgattcattttttaagtatttggctagtcaagatgatgaatcttcattatctgatatattgcaaatcactcaatatctagactttctgttattattattgatccaatcaaaaaataaattagaagctgtgggtcattgttatgaatctctttcagaggaatacagacaattgacaaaattcacagactttcaagattttaaaaaactgtttaacaaggtccctattgttacagatggaagggtcaaacttaataaaggatatttgttcgactttgtgattagtttgatgcgattcaaaaaagaatcctctctagctaccaccgcaatagatcctgttagatacatagatcctcgtcgcaatatcgcattttctaacgtgatggatatattaaagtcgaataaagtgaacaataattaattctttattgtcatcatgaacggcggacatattcagttgataatcggccccatgttttcaggtaaaagtacagaattaattagacgagttagacgttatcaaatagctcaatataaatgcgtgactataaaatattctaacgataatagatacggaacgggactatggacgcatgataagaataattttgaagcattggaagcaactaaactatgtgatgtcttggaatcaattacagatttctccgtgataggtatcgatgaaggacagttctttccagacattgtttaattctgtgagcgtatggcaaacggtaccgagctcaaaaattgaaaaactagcgtctttttttgctcgaagtcgaccaccatgttcttggctgttttgtattgccttctgtggagtttccagatctctgatggccattttcctcgagcctgtgcctcctctaagaacttgttggcaaaagaatgctgcccaccatggatgggtgatgggagtccctgcggccagctttcaggcagaggttcctgccaggatatccttctgtccagtgcaccatctggacctcagttccccttcaaaggggtggatgaccgtgagtcctggccctctgtgttttataataggacctgccagtgctcaggcaacttcatgggtttcaactgcggaaactgtaagtttggatttgggggcccaaattgtacagagaagcgagtcttgattagaagaaacatttttgatttgagtgtctccgaaaagaataagttcttttcttacctcactttagcaaaacatactatcagctcagtctatgtcatccccacaggcacctatggccaaatgaacaatgggtcaacacccatgtttaatgatatcaacatctacgacctctttgtatggatgcattactatgtgtcaagggacacactgcttgggggctctgaaatatggagggacattgattttgcccatgaagcaccagggtttctgccttggcacagacttttcttgttattgtgggaacaagaaattcgagaactaactggggatgagaacttcactgttccatactgggattggagagatgcagaaaactgtgacatttgcacagatgagtacttgggaggtcgtcaccctgaaaatcctaacttactcagcccagcatccttcttctcctcctggcagatcatttgtagcagatcagaagagtataatagccatcaggttttatgcgatggaacacctgagggaccactattacgtaatcctggaaaccatgacaaagccaaaacccccaggctcccatcttcagcagatgtggaattttgtctgagtttgacccagtatgaatctggatcaatggatagaactgccaatttcagctttagaaacacactggaaggatttgccagtccactcacagggatagcagatccttctcaaagtagcatgcacaatgccttacatatctttatgaatggaacaatgtcccaagtacagggatcggccaacgatcccatttttcttcttcaccatgcttttgtggacagtatttttgaacaatggctgcgaaggcaccgccctcttttggaagtttacccagaagccaatgcacctatcggccataacagagactcttacatggttcctttcataccgctctatagaaatggtgatttcttcataacatccaaggatctgggatatgactacagctacctccaagagtcagatccaggcttttacagaaattatattgagccttacttggaacaagccagtcgtatctggccatggcttcttggggcagcactggtgggagctgttattgctgcagctctctctgggcttagcagtaggctatgccttcagaagaagaagaagaagaagcaaccccaggaggaaaggcagccactcctcatggacaaagacgactaccacagcttgctgtatcagagccatctgtgattaattaatttttatcgatctaattcaacaatgtctggagagctcggatccttctgtgagcgtatggcaaacgaaggaaaaatagttatagtagccgcactcgatgggacatttcaacgtaaaccgtttaataatattttgaatcttattccattatctgaaatggtggtaaaactaactgctgtgtgtatgaaatgctttaaggaggcttccttttctaaacgattgggtgaggaaaccgagatagaaataataggaggtaatgatatgtatcaatcggtgtgtagaaagtgttacatcgactcataatattatattttttatctaaaaaactaaaaataaacattgattaaattttaatataatacttaaaaatggatgttgtgtcgttagataaaccgtttatgtattttgaggaaattgataatgagttagattacgaaccagaaagtgcaaatgaggtcgcaaaaaaactgccgtatcaaggacagttaaaactattactaggagaattattttttcttagtaagttacagcgacacggtatattagatggtgccaccgtagtgtatataggatctgctcccggtacacatatacgttatttgagagatcatttctataatttaggagtgatcatcaaatggatgctaattgacggccgccatcatgatcctattttaaatggattgcgtgatgtgactctagtgactcggttcgttgatgaggaatatctacgatccatcaaaaaacaactgcatccttctaagattattttaatttctgatgtgagatccaaacgaggaggaaatgaacctagtacggcggatttactaagtaattacgctctacaaaatgtcatgattagtattttaaaccccgtggcgtctagtcttaaatggagatgcccgtttccagatcaatggatcaaggacttttatatcccacacggtaataaaatgttacaaccttttgctccttcatattcagctgaaatgagattattaagtatttataccggtgagaacatgagactgactcgagttaccaaattagacgctgtaaattatgaaaaaaagatgtactaccttaataagatcgtccgtaacaaagtagttgttaactttgattatcctaatcaggaatatgactattttcacatgtactttatgctgaggaccgtgtactgcaataaaacatttcctactactaaagcaaaggtactatttctacaacaatctatatttcgtttcttaaatattccaacaacatcaactgaaaaagttagtcatgaaccaatacaacgtaaaatatctagcaaaaattctatgtctaaaaacagaaatagcaagagatccgtacgcggtaataaatagaaacgtactactgagatatactaccgatatagagtataatgatttagttactttaataaccgttagacataaaattgattctatgaaaactgtgtttcaggtatttaacgaatcatccataaattatactccggttgatgatgattatggagaaccaatcattataacatcgtatcttcaaaaaggtcataacaagtttcctgtaaattttctatacatagatgtggtaatatctgacttatttcctagctttgttagactagatactacagaaactaatatagttaatagtgtactacaaacaggcgatggtaaaaagactcttcgtcttcccaaaatgttagagacggaaatagttgtcaagattctctatcgccctaatataccattaaaaattgttagatttttccgcaataacatggtaactggagtagagatagccgatagatctgttatttcagtcgctgattaatcaattagtagagatgagataagaacattataataatcaataatatatcttatatcttatatcttatatcttatatcttgtttagaaaaatgctaatattaaaatagctaacgctagtaatccaatcggaagccatttgatatctataatagggtatctaatttcctgatttaaatagcggacagctatattctcggtagctactcgtttggaatcacaaacattatttacatctaatttactatctgtaatggaaacgtttcccaatgaaatggtacaatccgatacattgcattttgttatatttttttttaaagaggctggtaacaacgcatcgcttcgtttacatggctcgtaccaacaataatagggtaatcttgtatctattcctatccgtactatgcttttatcaggataaatacatttacatcgtatatcgtctttgttagcatcacagaatgcataaatttgttcgtccgtcatgataaaaatttaaagtgtaaatataactattatttttatagttgtaataaaaagggaaatttgattgtatactttcggttctttaaaagaaactgacttgataaaaatggctgtaatctctaaggttacgtatagtctatatgatcaaaaagagattaatgctacagatattatcattagtcatgttaaaaatgacgacgatatcggtaccgttaaagatggtagactaggtgctatggatggggcattatgtaagacttgtgggaaaacggaattggaatgtttcggtcactggggtaaagtaagtatttataaaactcatatagttaagcctgaatttatttcagaaattattcgtttactgaatcatatatgtattcactgcggattattgcgttcacgagaaccgtattccgacgatattaacctaaaagagttatcgggacacgctcttaggagattaaaggataaaatattatccaagaaaaagtcatgttggaacagtgaatgtatgcaaccgtatcaaaaaattactttttcaaagaaaaaggtttgtttcgtcaacaagttggatgatattaacgttcctaattctctcatctatcaaaagttaatttctattcatgaaaagttttggccattattagaaattcatcaatatccagctaacttattttatacagactactttcccatccctccgttgattattagaccggctattagtttttggatagatagtatacccaaagagaccaatgaattaacttacttattaggtatgatcgttaagaattgtaacttgaatgctgatgaacaggttatccagaaggcggtaatagaatacgatgatattaaaattatttctaataacactaccagtatcaatttatcatatattacatccggcaaaaataatatgattagaagttatatcgtcgcccgacgaaaagatcagaccgctagatctgtaattggtcccagtacatctatcaccgttaatgaggtaggaatgcccgcatatattagaaatacacttacagaaaagatatttgttaatgcctttacagtggataaagttaaacaactattagcgtcaaaccaagttaaattttactttaataaacgattaaaccaattaacaagaatacgccaaggaaagtttattaaaaataaaatacatttattgcctggtgattgggtagaagtagctgttcaagaatatacaagtattatttttggaagacagccgtctctacatagatacaacgtcatcgcttcatctatcagagctaccgaaggagatactatcaaaatatctcccggaattgccaactctcaaaatgctgatttcgacggggatgaggaatggatgatattagaacaaaatcctaaagctgtaattgaacaaagtattcttatgtatccgacgacgttactcaaacacgatattcatggagcccccgtttatggatctattcaagatgaaatcgtagcagcgtattcattgtttaggatacaagatctttgtttagatgaagtattgaacatcttggggaaatatggaagagagttcgatcctaaaggtaaatgtaaattcagcggtaaagatatctatacttacttgataggtgaaaagattaattatccgggtctcttaaaggatggtgaaattattgcaaacgacgtagatagtaattttgttgtggctatgaggcatctgtcattggctggactcttatccgatcataagtcgaacgtggaaggtatcaactttattatcaagtcatcttatgtttttaagagatatctatctatttacggttttggggtgacattcaaagatctgagaccaaattcgacgttcactaataaattggaggccatcaacgtagaaaaaatagaacttatcaaagaagcatacgccaaatatctcaacgatgtaagagacgggaaaatagttccattatctaaagctttagaggcggactatgtggaatccatgttatccaacttgacaaatcttaatatccgagagatagaagaacatatgagacaaacgctgatagatgatccagataataacctcctgaaaatggccaaagcgggttataaagtaaatcccacagaactaatgtatattctaggtacgtatggacaacaaaggattgatggtgaaccagcagagactcgagtattgggtagagttttaccttactatcttccagactctaaggatccagaaggaagaggttacattcttaattctttaacaaaaggattaacgggttctcaatattacttttcgatgctggttgccagatctcaatctactgatatcgtctgtgaaacatcacgtaccggaacactggctagaaaaatcattaaaaagatggaggatatggtggtcgacggatacggacaagtagttataggtaatacgctcatcaagtacgccgccaattataccaaaattctaggctcagtatgtaaacctgtagatcttatctatccagatgagtccatgacttggtatttggaaattagtgctctgtggaataaaataaaacagggattcgtttactctcagaaacagaaacttgcaaagaagacattggcgccgtttaatttcctagtattcgtcaaacccaccactgaggataatgctattaaggttaaggatctgtacgatatgattcataacgtcattgatgatgtgagagagaaatacttctttacggtatctaatatagattttatggagtatatattcttgacgcatcttaatccttctagaattagaattacaaaagaaacggctatcactatctttgaaaagttctatgaaaaactcaattatactctaggtggtggaactcctattggaattatttctgcacaggtattgtctgagaagtttacacaacaagccctgtccagttttcacactactgaaaaaagtggtgccgtcaaacaaaaacttggtttcaacgagtttaataacttgactaatttgagtaagaataagaccgaaattatcactctggtatccgatgatatctctaaacttcaatctgttaagattaatttcgaatttgtatgtttgggagaattaaatccaaacatcactcttcgaaaagaaacagataaatatgtagtagatataatagtcaatagattatacatcaagagagcagaaataaccgaattagtcgtcgaatatatgattgaacgatttatctcctttagcgtcattgtaaaggaatggggtatggagacattcattgaggacgaggataatattagatttactgtctacctaaatttcgttgaaccggaagaattgaatcttagtaagtttatgatggttcttccgggggcagccaacaagggaaagattagtaaattcaagattcctatctctgattatacgggatatgacgacttcaatcaaacaaaaaagctcaataagatgactgtagaactcatgaatctaaaagaattgggttctttcgatttggaaaacgtcaacgtgtatcctggagtatggaatacatacgatatcttcggtatcgaggccgctcgtgaatacttgtgcgaagccatgttaaacacctatggagaagggttcgattatctgtatcagccttgtgatcttctcgctagtttactatgtgctagttacgaaccagaatcagtgaataaattcaagttcggcgcagctagtactcttaagagagctacgttcggagacaataaagcattgttaaacgcggctcttcataaaaagtcagaacctattaacgataatagtagctgccacttttttagcaaggtccctaatataggaactggatattacaaatactttatcgacttgggtcttctcatgagaatggaaaggaaactatctgataagatatcttctcaaaagatcaaggaaatggaagaaacagaagacttttaattcttatcaataacatatttttctatgatctgtcttttaaacgatggattttccacaaatgcgcctctcaagtccctcatagaatgatacacgtataaaaaatatagcataggcaatgactccttatttttagacattagatatgccaaaatcatagccccgcttctatttactcccgcagcacaatgaaccaacacgggctcgtttcgttgatcacatttagataaaaaggcggttacgtcgtcaaaatatttactaatatcggtagttgtatcatctaccaacggtatatgaataatattaatattagagttaggtaatgtatatttatccatcgtcaaatttaaaacatatttgaacttaacttcagatgatggtgcatccatagcatttttataatttcccaaatacacattattggttacccttgtcattatagtgggagatttggctttgtgcatatctccagttgaacgtagtagtaagtatttatacaaacttttcttatccatttataacgtacaaatggataaaactactttatcggtaaacgcgtgtaatttagaatacgttagagaaaaggctatagtaggcgtacaagcagccaaaacatcaacacttatattctttgttattatattggcaattagtgcgctattactctggtttcagacgtctgataatccagtctttaatgaattaacgagatatatgcgaattaaaaatacggttaacgattggaaatcattaacggatagcaaaacaaaattagaaagtgatagaggtagacttctagccgctggtaaggatgatatatttgaattcaaatgtgtggatttcggcgcctattttatagctatgcgattggataagaaaacatatctgccgcaagctattaggcgaggtactggagacgcgtggatggttaaaaaggcggcaaaggtcgatccatctgctcaacaattttgtcagtatttgataaaacacaagtctaataatgttattacttgtggtaatgagatgttaaatgaattaggttatagcggttattttatgtcaccgcattggtgttccgattttagtaatatggaatagtgttagataaatgcggtaacgaatgttcctgtaaggaaccataacagcttagatttaacgttaaagatgagcataaacataataaacaaaattacaatcaaacttataacattaatatcaaacaatccaaaaaatgaaatcagtggagtagtaaacgcgtacataactcctggataacgtttagcagctgccgttcctattctagaccaaaaattcggtttcatgttttcgaaacggtattctgcaacaagtcgaggatcgtgttctacatatttggcggcattatccagtatctgcctattgatcttcatttcgttttcgattctggctatttcaaaataaaatcccgatgatagacctccagactttataatttcatctacgatgttcagcgccgtagtaactctaataatataggctgataagctaacatcataccctcctgtatatgtgaatatggcatgatttttgtccattacaagctcggttttaactttattgcctgtaataatttctctcatctgtaggatatctatttttttgtcatgcattgccttcaagacgggacgaagaaacgtaatatcctcaataacgttatcgttttctacaataactacatattctacctttttattttctaactcggtaaaaaaattagaatcccatagggctaaatgtctagcgatatttcttttcgtttcctctgtacacatagtgttacaaaaccctgaaaagaagtgagtatacttgtcatcatttctaatgtttcctccagtccactgtataaacgcataatccttgtaatgatctggatcatccttgactaccacaacatttcttttttctggcataacttcgttgtcctttacatcatcgaacttctgatcattaatatgctcatgaacattaggaaatgtttctgatggaggtctatcaataactggcacaacaataacaggagttttcaccgccgccatttagttattgaaattaatcatatacaactctttaatacgagttatattttcgtctatccattgtttcacattgacatatttcgacaaaaagatataaaatgcgtattccaatgcttctctgtttaatgaattactaaaatatacaaacacgtcactgtctggcaataaatgatatcttagaatattgtaacaatttattttgtattgcacatgttcgtgatctatgagttcttcttcgaatggcataggatctccgaatctgaaaacgtataaataggagttagaataataatatttgagagtattggtaatatataaactctttagcggtataattagtttttttctctcaatttctatttttagatgtgatggaaaaatgactaattttgtagcattagtatcatgaactctaatcaaaatcttaatatcttcgtcacacgttagctctttgaagtttttaagagatgcatcagttggttctacagatggagtaggtgcaacaattttttgttctacacatgtatgtactggagccattgttttaactataatggtgcttgtatcgaaaaactttaatgcagatagcggaagctcttcgccgcgactttctacgtcgtaattgggttctaacgccgatctctgaatggatactagttttctaagttctaatgtgattctctgaaaatgtaaatccaattcctccggcattatagatgtgtatacatcggtaaataaaactatagtatccaacgatcccttctcgcaaattctagtcttaaccaaaaaatcgtatataaccacggagatggcgtatttaagagtggattcttctaccgttttgttcttggatgtcatataggaaactataaagtccgcactactgttaagaatgattactaacgcaactatatagtttaaattaagcattttggaaacataaaataactctgtagacgatacttgactttcgaataagtttgcagacaaacgaagaaagaacagacctctcttaatttcagaagaaaactttttttcgtattcctgacgtctagagtttatatcaataagaaagttaagaattagtcggttaatgttgtatttcattacccaagtttgagatttcataatattatcaaaagacatgataatattaaagataaagcgctgactatgaacgaaatagctatatggttcgctcaagaatatagtcttgttaaacgtggaaacgataactgtatttttaatcacgtcagcggcatctaaattaaatataggtatatttattccacacactctacaatatgccacaccatcttcataataaataaattcgttagcaaaattattaattttagtgaaatagttagcgtcaactttcatagcttccttcaatctaatttgatgctcacacggtgcgaattccactctaacatcccttttccatgcctcaggttcatcgatctctataatatctagttttttgcgtttcacaaacacaggctcgtctctcgcgatgagatctgtatagtaactatgtaaatgataactagatagaaagatgtagctatatagatgacgatcctttaagagaggtataataactttaccccaatcagatagactgttgttatggtcttcggaaaaagaatttttataaatttttccagtattttccaaatatacgtacttaacatctaaaaaatccttaatgataataggaatggataatccgtctattttataaagaaatacatatcgcacattatacttttttttggaaatgggaataccgatgtgtctacataaatatgcaaagtctaaatattttttagagaatcttagttggtccaaattcttttccaagtacggtaatagatttttcatattgaacggtatcttcttaatctctggttctagttccgcattaaatgatgaaactaagtcactatttttataactaacgattacatcacctctaacatcatcatttaccagaatactgatcttcttttgtcgtaaatacatgtctaatgtgttaaaaaaaagatcatacaagttatacgtcatttcatctgtggtattcttgtcattgaaggataaactcgtactaatctcttctttaacagcctgttcaaatttatatcctatatacgaaaaaatagcaaccagtgtttgatcatccgcgtcaatattctgttctatcgtagtgtataacaatcgtatatcttcttctgtgatagtcgatacgttataaaggttgataacgaaaatatttttatttcgtgaaataaagtcatcgtaggattttggacttatattcgcgtctagtagatatgcttttatttttggaatgatctcaattagaatagtctctttagagtccatttaaagttacaaacaactaggaaattggtttatgatgtataatttttttagtttttatagattctttattctatacttaaaaaatgaaaataaatacaaaggttcttgagggttgtgttaaattgaaagcgagaaataatcataaattatttcattatcgcgatatccgttaagtttgtatcgtaatggcgtggtcaattacgaataaagcggatactagtagcttcacaaagatggctgaaatcagagctcatctaaaaaatagcgctgaaaataaagataaaaacgaggatattttcccggaagatgtaataattccatctactaagcccaaaaccaaacgagccactactcctcgtaaaccagcggctactaaaagatcaaccaaaaaggaggaagtggaagaagaagtagttatagaggaatatcatcaaacaactgaaaaaaattctccatctcctggagtcagcgacattgtagaaagcgtggccgctgtagagctcgatgatagcgacggggatgatgaacctatggtacaagttgaagctggtaaagtaaatcatagtgctagaagcgatctctctgacctaaaggtggctaccgacaatatcgttaaagatcttaagaaaattattactagaatctctgcagtatcgacggttctagaggatgttcaagcagctggtatctctagacaatttacttctatgactaaagctattacaacactatctgatctagtcaccgagggaaaatctaaagttgttcgtaaaaaagttaaaacttgtaagaagtaaatgcgtgcacttttttataaagatggtaaactctttaccgataataattttttaaatcctgtatcagacgataatccagcgtatgaggttttgcaacatgttaaaattcctactcatttaacagatgtagtagtatatgaacaaacgtgggaggaggcgttaactagattaatttttgtgggaagtgattcaaaaggacgtagacaatacttttacggaaaaatgcatgtacagaatcgcaacgctaaaagagatcgtatttttgttagagtatataacgttatgaaacgaattaattgttttataaacaaaaatataaagaaatcgtccacagattccaattatcagttggcggtttttatgttaatggaaactatgttttttattagatttggtaaaatgaaatatcttaaggagaatgaaacagtagggttattaacactaaaaaataaacacatagaaataagtcccgatgaaatagttatcaagtttgtaggaaaggacaaagtttcacatgaatttgttgttcataagtctaatagactatataaaccgctattgaaactgacggatgattctagtcccgaagaatttctgttcaacaaactaagtgaacgaaaggtatacgaatgtatcaaacagtttggtattagaatcaaggatctccgaacgtatggagtcaattatacgtttttatataatttttggacaaatgtaaagtccatatctcctcttccgtcaccaaaaaagttaatagcattaactatcaaacaaactgctgaagtggtaggtcatactccatcaatttcaaaaagagcttatatggcaacgactattttagaaatggtaaaggataaaaattttttagatgtagtatctaaaactacgttcgatgaattcctatctatagtcgtagatcacgttaaatcatctacggatggatgatatagatctttacacaaataattacaagaccgataaatggaaatggataagcgtatgaaatctctcgcaatgacagctttcttcggagagctaagcacattagatattatggcattgataatgtctatatttaaacgccatccaaacaataccattttttcagtggataaggatggtcagtttatgattgatttcgaatacgataattataaggcttctcaatatttggatctgaccctcactccgatatctggagatgaatgcaagactcacgcatcgagtatagccgaacaattggcgtgtgcggatattattaaagaggatattagcgaatatatcaaaactactccccgtcttaaacgatttataaaaaaataccgcaatagatcagatactcgtatcagtcgagatacagaaaagcttaaaatagctctagctaaaggcatagattacgaatatataaaagacgcttgttaataagtaaatgaaaaaaaactagtcgtttataataaaacacgatatggatgccaacgtagtatcattttctactattgcgacgtatatagacgctttagcgaagaatgcttcggaattagaacagaggtctaccgcatacgaaataaataatgaattggaactagtatttattaagccgccattgattactttgacaaatgtagtgaatatctctacgattcaggaatcgtttattcgatttaccgttactaataaggaaggtgttaaaattagaactaagattccattatctaaggtacatggtctagatgtaaaaaatgtacagttagtagatgctatagataacatagtttgggaaaagaaatcattagtgacggaaaatcgtcttcacaaagaatgcttgttgagactatcgacagaggaacgtcatatatttttggattacaagaaatatggatcctctatccgactagaattagtcaatcttattcaagcaaaaacaaaaaactttacgatagactttaagctaaaatattttctaggatccggtgcccagtctaaaagttctttgttgcacgctattaatcatccaaagtcaaggcctaatacatctctggaaatagaattcacacctagagacaatgaaacagttccatatgatgaactaataaaggaattgacgactctctcgcgtcatatatttatggcttctccagagaatgtaattctttctccgcctattaacgcgcctataaaaacctttatgttgcctaaacaagatatagtaggtttggatctggaaaatctatatgccgtaactaagactgacggcattcctataactatcagagttacatcaaacgggttgtattgttattttacacatcttggttatattattagatatcctgttaagagaataatagattccgaagtagtagtctttggtgaggcagttaaggataagaactggaccgtatatctcattaagctaatagagcctgtgaatgcaatcaatgatagactagaagaaagtaagtatgttgaatctaaactagtggatatttgtgatcggatagtattcaagtcaaagaaatacgaaggtccgtttactacaactagtgaagtcgtcgatatgttatctacatatttaccaaagcaaccagaaggtgttattctgttctattcaaagggacctaaatctaacattgattttaaaattaaaaaggaaaatactatagaccaaactgcaaatgtagtatttaggtacatgtccagtgaaccaattatctttggagaatcgtctatctttgtagagtataagaaatttagcaacgataaaggctttcctaaagaatatggttctggtaagattgtgttatataacggcgttaattatctaaataatatctattgtttggaatatattaatacacataatgaagtgggtattaagtccgtggttgtacctattaagtttatagcagaattcttagttaatggagaaatacttaaacctagaattgataaaaccatgaaatatattaactcagaagattattatggaaatcaacataatatcatagtcgaacatttaagagatcaaagcatcaaaataggagatatctttaacgaggataaactatcggatgtgggacatcaatacgccaataatgataaatttagattaaatccagaagttagttattttacgaataaacgaactagaggaccgttgggaattttatcaaactacgtcaagactcttcttatttctatgtattgttccaaaacatttttagacgattccaacaaacgaaaggtattggcgattgattttggaaacggtgctgacctggaaaaatacttttatggagagattgcgttattggtagcgacggatccggatgctgatgctatagctagaggaaatgaaagatacaacaaattaaactctggaattaaaaccaagtactacaaatttgactacattcaggaaactattcgatccgatacatttgtctctagtgtcagagaagtattctattttggaaagtttaatatcatcgactggcagtttgctatccattattcttttcatccgagacattatgctaccgtcatgaataacttatccgaactaactgcttctggaggcaaggtattaatcactaccatggacggagacaaattatcaaaattaacagataaaaagacttttataattcataagaatttacctagtagcgaaaactatatgtctgtagaaaaaatagctgatgatagaatagtggtatataatccatcaacaatgtctactccaatgactgaatacattatcaaaaagaacgatatagtcagagtgtttaacgaatacggatttgttcttgtagataacgttgatttcgctacaattatagaacgaagtaaaaagtttattaatggcgcatctacaatggaagatagaccgtctacaaaaaactttttcgaactaaatagaggagccattaaatgtgaaggtttagatgtcgaagacttacttagttactatgttgtttatgtcttttctaagcggtaaataataatatggtatgggttctgatctcccagttctaaatgcattaaataattccaatagagcgatttttgttcctataggaccttccaactgtggatactctgtattgttaatagatatattaatacttttgtcgggtaacagaggttctacgtcttctaaaaataaaagttttataacatctggcctgttcataaataaaaacttggcgattctatatatactcttattatcaaatctagccattgtcttatagatgtgagctactgtaggtgtaccatttgattttctttctaatactatatatttctctcgaagaagttcttgcacatcatctgggaataaaatactactgttgagtaaatcagttattttttttatatcgatattgatggacatttttatagttaaggataataagtatcccaaagtcgataacgacgataacgaagtatttatacttttaggaaatcacaatgactttatcagattaaaattaacaaaattaaaggagcatgtatttttttctgaatatattgtgactccagatacatatggatctttatgcgtcgaattaaatgggtctagttttcagcacggcggtagatatatagaggtggaggaatttatagatgctggaagacaagttagatggtgttctacatccaatcatatatctaaagatatacccgaagatatgcacactgataaatttgtcatttatgatatttatacgtttgattcgttcaagaataaacgattggtattcgtacaggtacctccgtcgttaggagatgatagtcatttgactaatccgttattgtcaccgtattatcgtaattcagtagccagacaaatggtcaatgatatgatttttaatcaagattcatttttaaaatatttattagaacatctgattagaagccactatagagtttctaaacatataacaatagttagatacaaggataccgaagaattaaatctaacgagaatatgttataatagagataagtttaaggcgtttgtattcgcttggtttaacggcgtttcggaaaatgaaaaggtactagatacgtataaaaaggtatctaatttgatataatgaattcagtgactgtatcacacgcgccatatactattacttatcacgatgattgggaaccagtaatgagtcaattggtagagttttataacgaagtagccagttggctgctacgagacgagacgtcgcctattcctgataagttctttatacagttgaaacaaccgcttagaaataaacgagtatgtgtgtgtggtatagatccgtatccgaaagatggaactggtgtaccgttcgaatcaccaaattttacaaaaaaatcaattaaggagatagcttcatctatatctagattaaccggagtaattgattataaaggttataaccttaatataatagacggggttataccctggaattattacttaagttgtaaattaggagaaacaaaaagtcacgcgatttactgggataagatttccaagttactgctgcagcatataactaaacacgttagtgttctttattgtttgggtaaaacagatttctcgaatatacgggccaagttagaatccccggtaactaccatagtcggatatcatccagcggctagagaccgccaattcgagaaagatagatcatttgaaattatcaacgttttactggaattagacaacaaggcacctataaattgggctcaagggtttatttattaatgctttagtgaaattttaacttgtgttctaaatggatgcggctattagaggtaatgatgttatctttgttcttaagactataggtgtcccgtcagcgtgcagacaaaatgaagatccaagatttgtagaagcatttaaatgcgacgagttagaaagatatattgagaataatccagaatgtacactattcgaaagtcttagggatgaggaagcatactctatagtcagaattttcatggatgtagatttagacgcgtgtctagacgaaatagattatttaacggccattcaagattttattatcgaggtgtcaaactgtgtagctagattcgcgtttacagaatgcggcgccattcatgaaaatgtaataaaatccatgagatctaatttttcattgactaagtctacaaatagagataaaacaagttttcatattatctttttagatacgtataccactatggatacattgatagctatgaaacgaacactattagaattaagtagatcatctgaaaatccactaaccagatcgatagacactgccgtatataggagaaaaacaactcttcgggttgtaggtactaggaaaaatccaaattgcgacactattcatgtaatgcaaccaccgcatgataatatagaagattacctattcacttacgtggatatgaacaacaatagttattacttttctctacaacaacgattggaggatttagttcctgataagttatgggaaccagggtttatttcattcgaagacgctataaaaagagtttcaaaaatattcattaattctataataaactttaatgatctcgatgaaaataattttacaacggtaccactggtcatagattacgtaacaccttgtgcattatgtaaaaaacgatcgcataaacatccgcatcaactatcgttggaaaatggtgctattagaatttacaaaactggtaatccacatagttgtaaagttaaaattgttccgttggatggtaataaactgtttaatattgcacaaagaattttagacactaactctgttttattaaccgaacgaggagaccatatagtttggattaataattcatggaaatttaacagcgaagaacccttgataacaaaactaattttgtcaataagacatcaactacctaaggaatattcaagcgaattactctgtccaagaaaacgaaagactgtagaagctaacatacgagacatgttagtagattcagtggagaccgatacctatccggataaacttccgtttaaaaatggtgtattggacctggtagacggaatgttttactctggagatgatgctaaaaaatatacgtgtactgtatcaaccggatttaaatttgacgatacaaagttcgtcgaagacagtccagaaatggaagagttaatgaatatcattaacgatatccaaccattaacggatgaaaataagaaaaatagagagctatatgaaaaaacattatctagttgtttatgcggtgctaccaaaggatgtttaacattcttttttggagaaactgcaactggaaagtcgacaaccaaacgtttgttaaagtctgctatcggtgacctgtttgttgagacgggtcaaacaattttaacagatgtattggataaaggacctaatccatttatcgctaacatgcatttgaaaagatctgtattctgtagcgaactacctgattttgcctgtagtggatcaaagaaaattagatctgacaatattaaaaagttgacagaaccttgtgtcattggaagaccgtgtttctccaataaaattaataatagaaaccatgcgacaatcattatcgatactaattacaaacctgtttttgataggatagataacgcattaatgagaagaattgccgtcgtgcgattcagaacacacttttctcaaccttctggtagagaggctgctgaaaataatgacgcgtacgataaagtcaaactattagacgaggggttagatggtaaaatacaaaataatatatatagatttgcatttctatacttgttggtgaaatggtacaaaaaatatcatgttcctattatgaaactatatcctacacccgaagagattcctgactttgcattctatctcaaaataggtactctgttggtatctagctctgtaaagcatattccattaatgacggacctctccaaaaagggatatatattgtacgataatgtggtcactcttccgttgactactttccaacagaaaatatccaagtattttaattctagactatttggacacgatatagagagcttcatcaatagacataagaaatttgccaatgttagtgatgaatatctgcaatatatattcatagaggatatttcatctccgtaaatatatgctcatatatttatagaagatatcacatatctaaatgaataccggaatcatagatttatttgataatcatgttgatagtataccaactatattacctcatcagttagctactctagattatctagttagaactatcatagatgagaacagaagcgtgttattgttccatattatgggatcaggtaaaacaataatcgctttgttgttcgccttggtagcttccagatttaaaaaggtttacattctagtgccgaacatcaacatcttaaaaattttcaattataatatgggtgtagctatgaacttgtttaatgacgaattcatagctgagaatatctttattcattccacaacaagtttttattctcttaattataacgataacgtcattaattataacggattatctcgctacaataactctatttttatcgttgatgaggcacataatatctttgggaataatactggagaacttatgaccgtgataaaaaataaaaacaagattccttttttactattgtctggatctcccattactaacacacctaatactctgggtcatattatagatttaatgtccgaagagacgatagattttggtgaaattattagtcgtggtaagaaagtaattcagacacttcttaacgaacgcggtgtgaatgtacttaaggatttgcttaaaggaagaatatcatattacgaaatgcctgataaagatctaccaacgataagatatcacggacgtaagtttctagatactagagtagtatattgtcacatgtctaaacttcaagagagagattatatgattactagacgacagctatgttatcatgaaatgtttgataaaaatatgtataacgtgtcaatggcagtattgggacaacttaatctgatgaataatttagatactttatttcaggaacaggataaggaattgtacccaaatctgaaaataaataatggcgtgttatacggagaagaattggtaacgttaaacattagttccaaatttaaatactttattaatcggatacagacactcaacggaaaacattttatatacttttctaattctacatatggcggattggtaattaaatatatcatgctcagtaatggatattctgaatataatggttctcagggaactaatccacatatgataaacggcaaaccaaaaacatttgctatcgttactagtaaaatgaaatcgtctttagaggatctattagatgtgtataattctcctgaaaacgatgatggtagtcaattgatgtttttgttttcatcaaacattatgtccgaatcctatactctaaaagaggtaaggcatatttggtttatgactatcccagatactttttctcaatacaaccaaattcttggacgatctattagaaaattctcttacgccgatatttctgaaccagttaatgtatatcttttagccgccgtatattccgatttcaatgacgaagtgacgtcattaaacgattacacacaggatgaattaattaatgttttaccatttgacatcaaaaagctgttgtatctaaaatttaagacgaaagaaacgaatagaatatactctattcttcaagagatgtctgaaacgtattctcttccaccacatccatcaattgtaaaagttttattgggagaattggtcagacaatttttttataataattctcgtattaagtataacgataccaagttacttaaaatggttacatcagttataaaaaataaagaagacgctaggaattacatagatgatattgtaaacggtcacttctttgtatcgaataaagtatttgataaatctcttttatacaaatacgaaaacgatattattacagtaccgtttagactttcctacgaaccatttgtttggggagttaactttcgtaaagaatataacgtggtatcttctccataaaactgatgagatatataaagaaataaatgtcgagctttgttaccaatggatacctttccgttacattggaaccacacgagctgacgttagacataaaaactaatattaggaatgccgtatataagacgtatctccatagagaaattagtggtaaaatggccaagaaaatagaaattcgtgaagacgtggaattacctctcggcgaaatagttaataattctgtagttataaacgttccgtgtgtaataacctacgcgtattatcacgttggggatatagtcagaggaacattaaacatcgaagatgaatcaaatgtaactattcaatgtggagatttaatctgtaaactaagtagagattcgggtactgtatcatttagcgattcaaagtactgcttttttcgaaatggtaatgcgtatgacaatggcagcgaagtcactgccgttctaatggaggctcaacaaggtatcgaatctagttttgtttttctcgcgaatatcgtcgactcataaaaaagagaatagcggtaagtataaacacgaatactatggcaataattgcgaatgttttattctcttcgatatatttttgataatatgaaaaacatgtctctctcaaatcggacaaccatctcataaaatagttctcgcgcgctggagaggtagttgccgctcgtataatctctccagaataatatacttgcgtgtcgtcgttcaatttatacggatttctatagttctctgttatataatgcggtttgccctcatgattagacgacgacaatagtgttctaaatttagatagttgatcagaatgaatgtttattggcgttggaaaaattatccatacagcgtctgcagagtggttgatagttgttcctagatatgtaaaataatccaacttactaggcagcaaattgtctagataaaatactgaatcaaacggtgcagacgtattggcggatctaatggaatccaattgattaactatcttttgaaaatatacatttttatgatccaatacttgtaagaatatagaaataatgataagtccatcatcgtgtttttttgcctcttcataagaactatattttttcttattccaatgaacaagattaatctctccagagtatttgtacacatctatcaagtgattggatccataatcgtcttcctttccccaatatatatgtagtgatgataacacatattcattggggagaaaccctccacttatatatcctcctttaaaattaatccttactagttttccagtgttctggatagtggttggtttcgactcattataatgtatgtctaacggcttcaatcgcgcgttagaaattgcttttttagtttctatattaataggagatagttgttgcggcatagtaaaaatgaaatgataactgtttaaaaatagctcttagtatgggaattacaatggatgaggaagtgatatttgaaactcctagagaattaatatctattaaacgaataaaagatattccaagatcaaaagacacgcatgtgtttgctgcgtgtataacaagtgacggatatccgttaataggagctagaagaacttcattcgcgttccaggcgatattatctcaacaaaattcagattctatctttagagtatccactaaactattacggtttatgtactacaatgaactaagagaaatctttagacggttgagaaaaggttctatcaacaatatcgatcctcactttgaagagttaatattattgggtggtaaactagataaaaaggaatctattaaagattgtttaagaagagaattaaaagaggaaagtgatgaacgtataacagtaaaagaatttggaaatgtaattctaaaacttacaacacgggataaattatttaataaagtatatataagttattgcatggcgtgttttattaatcaatcgttggaggatttatcgcatactagtatttacaatgtagaaattagaaagattaaatcattaaatgattgtattaacgacgataaatacgaatatctgtcttatatttataatatgctagttaatagtaaatgaacttttacagatctagtataattagtcagattattaagtataatagacgactagctaagtctattatttgcgaggatgactctcaaattattacactcacggcattcgttaaccaatgcctatggtgtcataaacgagtatccgtgtccgctattttattaactactgataacaaaatattagtatgtaacagacgagatagttttctctattctgaaataattagaactagaaacatgtttagaaagaaacgattatttctgaattattccaattatttgaacaaacaggaaagaagtatactatcgtcatttttttctctagatccagctactactgataatgatagaatagacgctatttatccgggtggcatacccaaaaggggtgagaatgttccagagtgtttatccagggaaattaaagaagaagttaatatagacaattcttttgtattcatagacactcggttttttattcatggcatcatagaagataccattattaataaattttttgaggtaatcttctttgtcggaagaatatctctaacgagtgatcaaatcattgatacatttaaaagtaatcatgaaatcaaggatctaatatttttagatccgaattcaggtaatggactccaatacgaaattgcaaaatatgctctagatactgcaaaacttaaatgttacggccatagaggatgttattatgaatcattaaaaaaattaactgaggatgattgattaaaaaatataaattaatttaccatcgtgtatttttataacgggattgtccggcatatcatgtagatagttaccgtctacatcgtatactcgaccatctacgcctttaaatcctctatttattgacattaatctattagaattggaataccaaatattagtaccctcaattagtttattggtaatattttttttagacgatagatcgatggctcttgaaaccaaggttttccaaccggactcattgtcgatcggtgagaagtctttttcattagcatgaatccattctaatgatgtatgtttaaacactctaaacaattggacaaattcttttgatttgctttgaatgatttcaaataggtcttcgtctacagtaggcataccattagataatctagccattataaagtgcacgtttacatatctacgttctggaggagtaagaacgtgactattgagacgaatggctcttcctactatctgacgaagagacgcctcgttccatgtcatatctaaaatgaagatatcattaattgagaaaaaactaataccctcgcctccactagaagagaatacgcatgttttaatgcattctccgttagtgtttgattcttggttaaactcagccaccgccttgattctagtatcttttgttctagatgagaactctatattagagataccaaagactttgaaatatagtaataagatttctattcctgactgattaacaaatggttcaaagactagacatttaccatgggatgctaatattcccaaacatacatctataaatttgacgcttttctcttttaattcagtaaatagagagatatcagccgcactagcatcccctttcaatagttctccctttttaaaggtatctaatgcggatttagaaaactctctatctcttaatgaatttttaaaatcattatatagtgttgctatctcttgcgcgtattcgcccggatcacgattttgtctttcaggaaagctatcgaacgtaaacgtagtagccatacgtctcagaattctaaatgatgatatacctgtttttatttcagcgagtttagccttttgataaatttcttcttgctttttcgacatattaacgtatcgcattaatactgttttcttagcgaatgatgcagacccttctacgtcatcaaaaatagaaaactcgttattaactatatacgaacatagtcctcctagtttggagactaattctttttcatcgactagacgtttattctcaaatagcgattggtgttgtaaggatcctggtcgtagtaagttaaccaacatggtgaattcttgcacactattgacgataggtgtagccgataaacaaatcatcttatggttttttaacgcaatggtcttagataaaaaattatatactgaacgagtaggacggatcttaccatcttctttgattaatgatttagaaatgaagttatgacattcatcaataatgacgcatattctactcttggaattaatagttttgatattagtaaaaaatttatttctaaaattttgatcatcgtaattaataaaaatacaatccttcgttatctctggagcgtatctgagtatagtgttcatccaaggatcttctatcaaagcctttttcaccaataagataatagcccaattcgtataaatatccttaagatgtttgagaatatatacagtagtcattgttttaccgacacccgtttcatggaacaataaaagagaatgcatactgtctaatcctaagaaaactcttgctacaaaatgttgataatccttgaggcgtactacgtccgaccccatcatttcaacgggcatattagtagttctgcgtaaggcataatcgatataggccgcgtgtgatttactcatttatgagtgataagtaataactatgttttaaaaatcacagcagtagtttaactagtcttctctgatgtttgttttcgatactttttgaatcagaagtcatactagaataaagcaacgagtgaacgtaatagagagcttcgtatactctattcgaaaactctaagaacttattaatgaattccgtatccactggattgtttaaaatactaaattgaacactgttcacatccttccaagaagaagacttagtgacggacttaacatgagacataaataaatccaaattttttttacaaacatcactagccaccataatggcgctatctttcaaccagctatcgcttacgcattttagcagtctaacatttttaaagagactacaatatattctcatagtatcgattacacctctaccgaataaagttggaagtttaataatacaatatttttcgtttacaaaatcaaataatggtcgaaacacgtcgaaggttaacatcttataatcgctaatgtatagattgttttcagtgagatgattattagatttaatagcatctcgttcacgtttgaacagtttattgcgtgcgctgaggtcggcaactacggcgtccgctttagtactcctcccataatactttacgctattaatctttaaaatttcatagactttatctagatcgctttctggtaacatgatatcatgtgtaaaaagttttaacatgtcggtcggcattctatttagatcattaactctagaaatctgaagaaagtaattagctccgtattccagactaggtaatgggcttttacctagagacagattaagttctggcaatgtttcataaaatggaagaaggacatgcgttccctcccggatattttttacaatttcatccatttacaactctatagtttgttttcattattattagttattatctcccataatcttggtaatacttaccccttgatcgtaagataccttatacaggtcattacatacaactaccaattgtttttgtacataatagattggatggttgacatccatggtggaataaactactcgaacagatagtttatctttccccctagatacattagccgtaatagttgtcggcctaaagaatatctttggtgtaaagttaaaagttagggttcttgttccattattgctttttgtcagtagttcattataaattctcgagatgggtccgttctctgaatatagaacatcatttccaaatctaacttctagtctagaaataatatcggtcttattcttaaaatctattcccttgatgaagggatcgttaatgaacaaatccttggcctttgattcggctgatctattatctccgttatagacgttacgttgactagtccaaagacttacaggaatagatgtatcgatgatgttgatactatgtgatatgtgagcaaagattgttctcttagtggcatcactatatgttccagtaatggcggaaaactttttagaaatgttatatataaaagaattttttcgtgttccaaacattagcagattagtatgaagataaacactcatattatcaggaacattatcaatttttacatacacatcagcatcttgaatagaaacgataccatcttctggaacctctacgatctcggcagactccggataaccagtcggtgggccatcgctaacaataactagatcatccaacaatctactcacatatgcatctatataatctttttcatcttgtgagtaccctggatacgaaataaatttattatccgtatttccataataaggtttagtataaacagagagagatgttgccgcatgaacttcagttacagtcgccgttggttggtttatttgacctattactctcctaggtttctctataaacgatggtttaatttgtacattcttaaccatatatccaataaagctcaattcaggaacataaacaaattctttgttgaacgtttcaaagtcgaacgaagagtcacgaataacgatatcggatactggattgaaggttaccgttacggtaatttttgaatcggatagtttaagactgctgaatgtatcttccacatcaaacggagttttaatataaacgtatactgtagatggttctttaatagtgtcattaggagttaggccaatagaaatatcattaagttcactagaatatccagagtgtttcaaagcaattgtattattgatacaattattatataattcttcgccctcaatttcccaaataacaccgttacacgaagagatagatacgtgattaatacatttatatccaacatatggtacgtaactgaatcttcccatacctttaacttctggaagttccaaactcagaaccaaatgattaagcgcagtaatatactgatccctaatttcgaagctagcgatagcctgattgtctggaccatcgtttgtcataactccggatagagaaatatattgcggcatatacaaagttggaatttgactatcgactgcgaagacattagaccgtttaatagagtcatccccaccgatcaaagaattaatgatagtattattcattttctatttaaaatggaaaaagcttacaataaactccgtagagaaatatctataatttgtgagttttccttaaagtaacagcttccgtaaacgccgtctttatctcttagtaggtttattgtatttatgaccttttccttatcttcatagaatactaaaggcaacaaagaaatttttggttcttctctaagagctacgtgagacttaaccatagaagccaacgaatccctacatattttagaacagaaataccctacttcaccacccttgtatgtctcaatactaataggtctaaaaaccaaatcttgattacaaaaccaacacttatcaattacactatttgtcttaatagacacatctgccatagatttataatactttggtagtatacaagcgagtgcttcttctttagcgggcttaaagactgctttaggtgctgaaataaccacatctggaaggcttactcgcttagccatttaattacggaactatttttttatacttctaatgagcaagtagaaaacctctcatctacaaaaacgtactcgtgtccataatcctctaccatagttacacgttttttagatctcatatgtgctaaaaagttttcccatactaattggttactattatttttcgtataatttttaacagtttgaggttttagatttttagttacagaagtgatatcgaatattttatccaaaaagaatgaataattaattgtcttagaaggagtgttttcttggcaaaagaataccaagtgcttaaatatttctactacttcattaatcttttctgtactcagattcagtttctcatcttttacttgattgattatttcaaagactaacttataatcctttttatttattctctcgttagccttaagaaaactagatacaaaatttgcatctacatcatccgtggatatttgatttttttccatgatatccaagagttccgagataatttctccagaacattgatgagacaataatctccgcaatacatttctcaaatgaataagtttattagacacgtggaagtttgactttttttgtacctttgtacatttttgaaataccgactcgcaaaaaatacaatattcatatccttgttcagatactataccgttatgtctacaaccgctacataatcgtagattcatgttaacactctacgtatctcgtcgtccaatattttatataaaaacattttatttctagacgttgccagaaaatcctgtaatatttttagttttttgggctgtgaataaagtatcgccctaatattgttaccgtcttccgccaatatagtagttaaattatccgcacatgcagaagaacaccgcttaggcggattcagtacaatgttatatttttcgtaccaactcatttaaatatcataatctaaaatagttctgtaatatgtctagcgctaatatattgatcataatcctgtgcataaattaagatacaacaatgtctcgaaatcatcgacatggcttcttccatagttagaagatcgtcgtcaaagttagcaacgtgattcatcaacatttgctgttttgaggcagcaaatactgaaccgtcgccattcaaccattcataaaaaccatcgtctgaatccattgataatttcttgtactggtttttgagagctcgcatcaatctagcatttctagctcccggattgaaaacagaaagaggatcgtacatccagggtccattttctgtaaatagaatcgtataatgtcccttcaagaagatatcagacgatccacaatcaaagaattggtctccgagtttgtaacaaactgcggactttaacctatacatgataccgtttagcataatttctggtgatacgtcaatcggagtatcatctattagagatctaaagccggtgtaacattctccaccaaacatattcttattctgacgtcgttctacataaaacatcattgctccattaacgataacaggggaatgaacagcactacccatcacattagttcccaatggatcaatgtgtgtaactccagaacatcttccatagcctatgttaggaggagcgaacaccactcttccactattgccatcgaatgccatagaataaatatccttggaattgatagaaatcggactgtcggatgttgtgatcatcttcataggattaacaactatgtatggtgccgcctgaagtttcatatcgtaactgatgccgtttataggtctagccacagaaaccaacgtaggtctaaatccaactatagacaaaatagaagccaatatctgttcctcatctgtcataacttgagagcatccagtatgaataatcttcattagatggggatctaccgcatcatcatcgttacaataaaaaattcccattctaatgttcataattgcttttctaatcatggtatgcatgtttgctctctgaatctctgtggaaattagatctgatacacctgtaatcactatcggattatcctccgtaagacgattaaccaacaacatataattataagactttacttttctaaattcataaagttgctggattaggctataggtgtctccatgtacatacgcgttctcgagcgcaggaagtttaataccgaatagtgccatcagaataggatgaatatagtaattagtttctggttttctataaataaaagacaaatcttgtgaactagacatatcggtaaaatgcatggattggaatcgtgtagtcgacagaagaatatgatgattagatggagagtatattttatctaactctttgagttggtcaccgattctaggactagctcgagaatgaataagtactaaaggatgagtacatttcacagaaacactagcattgttcaatgtgctctttacatgggtaaggagttgaaatagctcgtttctatttgttctgacaatatttagtttattcataatgttaagcatatcctgaatagtaaagttagatgtgtcatacttgttagtagttagatatttagcaattgcattcccatcatttctcaatctcgtactccaatcatgcgtggatgctacttcgtcgatggaaaccatacaatcctttttgataggctgttgagattgatcatttcctgcacgtttaggtttggtacgttgatttctagcccctgcggatataaagtcatcgtctacaatttgggacaatgaattgcatacactacaagacaaagatttatcagaagtgtgaatatgatcttcatctaccaaagaaagagtttgattagtataactagattttagtcctgcgttagatgttaaaaaaacatcgctattgaccacggcttccattatttatattcgtagtttttactcgaaagcgtgattttaatatccaatcttattacttttggaatcgttcaaaacctttgactagttgtagaatttgatctattgccctacgcgtatactcccttgcatcatatacgttcgtcaccagatcgtttgtttcggcctgaagttggtgcatatctctttcaacattcgacatgagatccttaagggccatatcgtctagattttgttgagatgctgctcctggatttggattttgttgtgctgttgtacatactgtaccaccagtaggtgtaggagtacatacagtggccacaataggaggttgagaaagtgtaaccgttggagtagtacaagaaatacttccatccgattgttgtgtacatgtagttgttggtaacgtctgagaaggttgggtagatggcggcgtcgtcgttttttgatctttattaaatttagagataatatcctgaacagcattgctcggcgtcaacgctggaaggagtgaactcgccggcgcatcagtatcttcagacagccaatcaaaaagattagacatatcagatgatgtattagtttgttgtcgtggttttggtgtaggagcagtactactaggtagaagaataggagccgatgtagctgttggaaccggctgtggagttatatgaatagttggttgtagcggttggataggctgtctgctggcggccatcatattatctctagctagttgttctcgcaactgtctttgataatacgactcttgagactttagtcctatttcaatcgcttcatcctttttcgtatccggatccttttcttcagaataatagattgacgactttggtgtagaggattctgccagcctctgtgagaacttgttaaagaagtccatttaaggctttaaaattgaattgcgattataagattaaatggcagacacagacgatattatcgactatgaatccgatgatctcaccgaatacgaggatgatgaagaagaggaagaagatggagagtcactagaaactagtgatatagatcccaaatcttcttataagattgtagaatcagcatccactcatatagaagatgcgcattccaatcttaaacatatagggaatcatatatctgctcttaaacgacgctatactagacgtataagtctatttgaaatagcgggtataatagcagaaagctataacttgcttcaacgaggaagattacctctagtttcagaattttctgacgaaacgatgaagcaaaatatgctacatgtaattatacaagagatagaggagggttcttgtcctatagtcatcgaaaagaacggagaattgttgtcggtaaacgattttgacaaagatggtctaaaattccatctagactatattatcaaaatttggaaacttcaaaaacgatattagaatttatacgaatatcgttctctaaatgtcacaatcaagtctcgcatgttcagcaatttattgtcgtactttatatcgtgttcattaacgatatcttgcaaaatagtaatgattctatcttccttcgatagatattcttcagagattattgtcttatattctttcttgttatcagatatgaatttgataagactttgaacattattgatacccgtctgtttaattttttctacagatattttagttttggcagattctatcgtatctgtcaatagacatccaacatcgacattcgacgtcaattgtctataaatcaacgtataaattttagaaataacattagcgaattgttgtgcgttgatgtcgttattctgaaacagtatgattttaggtagcattttcttaacaaagagaacgtatttattgttactcagttgaacagatgatatatccagattactaacgcatctgattccgtataccaaactttcagaagaaatggtatacaattgtttgtattcattcaatgtctctttttcagaaattagtttagagtcgaatactgcaataattttcaagagatagttttcatcagataagattttatttagtgtagatatgataaaactattgttttgttggagaacttgatacgccgcgttctctgtagtcgacgctctcaaatgggaaacaatctccattatttttttggaatcggatactatatcttcggtatcttgacgcagtctagtatacatagagttaagagagattagagtttgtacattaagcaacatgtctctaaatgtggctacaaacttttcctttttcacatcatctagtttattatataccgatttcacaacggcaccagatttaaggaaccagaatgaaaaactctgataactacaatatttcatcatagttacgattttatcatcttctatagttggtgtaatagcgcatacctttttctccaagactggaaccaacgtcataaaaatgtttaaatcaaaatccatatcaacatctgatgcgctaagaccagtctcgcgttcaagattatctttactaatggtgacgaactcatcgtataaaactctaagtttgtccattatttatttacagatttagttgtttaatttatttgtgctcttccagagttgggatagtatttttctaacgtcggtattatattattaggatctacgttcatatgtatcataatattaatcatccacgttttgataaatctatctttagcttctgaaataacgtatttaaacaaaggagaaaaatatttagctacggcatcagacgcaataacattttttgtaaatgtaacgtatttagacgacagatcttcgttaaaaagttttccatctatgtagaatccatcggttgttaacaccattcccgcgtcagattgaataggagtttgaatagtttgttttggaaatagatccttcaataacttatagttgggtgggaaaaaatcgattttatcactagactctttcttttttactatcattacctcatgaactatttcttgaatgagtatatgtattttctttcctatatcggacgcgttcattggaaaatataccatgtcgttaactataagaatatttttatcctcgtttacaaactgaataatatcagatgtagttcgtaaacgaactatatcatcaccagcacaacatctaactatatgatatccactagtttcctttagccgtttattatcttgttccatattagcagtcattccatcatttaagaaggcgtcaaaaataatagggagaaatgacattttggattctgttacaactttaccaaaattaaggatatacggacttactatctttttctcaacgtcaatttgatgaacacacgatgaaaatgtgcttctatgagattgatcatgtagaaaacaacaagggatacaatatttccgcatatcatgaaatatattaagaaatcccaccttattatatttccccaaaggatccatgcacgtaaacattatgccgttatcattaataaagacttctttctcatcggatctgtaaaagttgttactgatttttttcattccaggatctagataattaataatgatgggttttctattcttattctttgtattttggcatatcctagaccagtaaacagtttccactttggtaaaatcagcagacttttgaacgctattaaacatggcattaatggcaataactaaaaatgtaaaatatttttctatgttaggaatatggtttttcactttaatagatatatggtttttggccaaaatgatagatatttttttatccgaggatagtaaaatattattagtcgccgtctctataaaaatgaagctagtctcgatatccaattttattctagaattgataggagtcgccaaatgtaccttatacgttatatctcccttgatgcgttccatttgtgtatctatatcggacacaagatctgtaaatagttttacgttattaatcatcacggtatcgccgtcgctagataacgctaatgtaccatccaagtcccaaatggagagatttaactgttcatcgtttagaataaaatgattaccggtcatattaataaagtgttcatcgtatctagataacaacgacttataattaatgtccaagtcttgaactcgctgaatgatcttttttaacccagttagttttagattggtacgaaatatattgttaaactttgattctacagtaatgtccaaatctagttgtggaaatacttccatcaacattgtttcaaacttgataatattattatctacatcttcgtacgatccaaattccggaatagatgtatcgcacgctctggccacccagataaccaaaaagtcacacgctccaggatatacattgtataaaaagctatcgttttttagtagggtttttttctgcgtgtatacgaagggattaaaaatagtattatcaacgtaactatattccaaattattcttatgagaatagataataatatcgtccttaatatctaacaaatttcctaaatatccctttaattgagtcattcgaagcgtcaatagaatatgtctcttaactatttccggctgttgtatatttaaatgacttcgtaaaaaataatatatgggcgacttctcatctatgtaatcatatggagtgagatatagggctcgttctacctcctgccccttacccacctgtaataccaattgcggacttactatatatcgcatatttatatcgtggggtaaagtgaaaatctactaccgatgatgtaagtcttacaatgttcgaaccagtaccagatcttaatttggaggcctccgtagaactaggggaggtaaatatagatcaaacaacacctatgataaaggagaatagcggttttatatcccgcagtagacgtctattcgcccatagatctaaggatgatgagagaaaactagcactacgattctttttacaaagactttattttttagatcatagagagattcattatttgttcagatgcgttgacgctgtaaaagacgtcactattaccaaaaaaaataacattatcgtggcgccttatatagcacttttaactatcgcatcaaaaggatgcaaacttacagaaacaatgattgaagcattctttccagaactatataatgaacatagtaagaaatttaaattcaactctcaagtatccatcatccaagaaaaactcggataccagtttggaaactatcacgtttatgattttgaaccgtattactctacagtagctctggctattcgagatgaacattcatctggcatttttaatatccgtcaagagagttatctggtaagttcattatctgaaataacatatagattttatctaattaatctaaaatctgatcttgttcaatggagtgctagtacgggcgctgtaattaatcaaatggtaaatactgtattgattacagtgtatgaaaagttacaactggtcatagaaaatgattcacaatttacatgttcattggctgtggaatcaaaacttccaataaaattacttaaagatagaaatgaattatttacaaaattcattaacgagttaaaaaagaccagttcattcaagataagcaaacgcgataaggatacgctactaaaatattttacttaggactggagttagaatttatagacgactcatttcgtttatcattgttactattattactattactatcattattagtgttggcattattagtattcttcttgtcatcttgttcagaaatatacagcaatgctatacctaatactaaatacattatcatgctcgcaatggctctaacaacaacgaaccaaaatgaatttggtcgtagcttttgttcacaaaaatacataaagaaatgtctacataaatctatggcgccattggctacttgaaatagcgccagtcctcctacagattttaatatagctgtataacatgacatttattcatcatcaaaagagacagagtcaccatctgtcatatttagattttttttcatgtgttcaaagtatcctctactcatttcattataatagtttatcatacttagaattttaggacggatcaatgagtaagacttgactagatcgtcagtagtaatttgtgcatcgtctattctgcatccgcttcgtcgaataatgtatagcatcgctttgagattctccatagctatcaagtctttatacaatgacatggaaatatctgtgaatactttatacttctccaacatcgatgccttaacatcatcgcctactttagcattgaaaatacgttctattgtgtagatggatgtagcaagatttttaaacaacaatgccatcttacacgatgattgcctcaagtctccaatcgtttgtttagaacgattagctacagagtccaatgcttggctgactagcatattattatctttagaaattgtattcttcaatgaggcgtttatcatatctgtgatttcgttagtcatattacagtctgactgggttgtaatgttatccaacatatcacctatggatacggtacacgtaccagcatttgtaataatcctatctaagatgttgtatggcattgcgcagaaaatatcttctcctgtaatatctccactctcgataaatctactcagattattcttaaatgccttattctctggagaaaagatatcagtgtccatcatttcattaatagtatacgcagaaaagataccacgagtatcaattctatccaagatacttatcggttccgagtcacagataatggtttcctctccttcgggagatcctgcatagaaatatctaggacaatagtttctatactgtctgtaactctgataatctctaaagtcactaactgataccatgaaattgagaagatcaaacgctgaagtaattaatttttctgcctcgtttttactacaactagttttcatcaatgtagtgacgatgtattgtttagttacttttggtctaatactgatgatagagatattattgcttcccataatggatcttctagtagtcaccttaaagcccattgatgcgaatagcagatagataaagtcttggtatgactcctttctaatatagtacggactacctttgtcacccaactttatacccacataagccataacaacctctttaatagccgtttcatgaggtttatcagccatgagcctgagtagttggaagaatctcatgaatcccgtctcagaaagtcctatatgcatgatagatttatctttcctgggaaactctcgtatagtcatagatgaaatactctttaaagtttctgaaataagattagtaacagtcttacctccgactactctaggtaacaaacaaactctaataggtgttttctctgcggagataatatcagaaaggatagagcaataagtagtattattgtgattataaagaccgaatacataacaggtagaatttataaacatcatgtcctgaaggtttttagacttgtattcctcgtaatccataccgtcccaaaacatggatttggtaactttgatagccgtagatctttgttccttcgccaacaggttaaagaaattaataaagaatttgttgtttctatttatgtccacaaattgcacgtttggaagcgccacggttacattcactgcagcattttgaggatcgcgagtatgaagtacgatgttattgtttactggtatatctggaaagaaatctaccagtctaggaataagagattgatatcgcatagaaatagtaaagtttataatctcatcatcgaagagcattttgttaccattgtaataaatatccactctgtcatatgtataaatgaagtactgttcaaacatgatgagatgtttatatgttggcatagtagtgagatcgacgtttggtaatggcaatgtattaagattaactccataatgtctagcagcatctgcgatgttataagcgtcgtcaaagcggggtcgatcttgtattgttatatattgtctaacacctataagattatcaaaatcttgtctgcttaatacaccgttaacaatttttgccttgaattcttttattggtgcattaataacatccttatagaggatgttaaacaaataagtgttatcaaagttaagatctggatatttcttttctgctagaacatccattgagtcggagccatctggtttaatataaccaccgataaatctagctctgtattctgtatccgtcaatctaatattaagaaggtgttgagtgaaaggtggaagatcgtaaaagctgtgagtattaatgataggattagtttccgaactaatgttaattggggtattaataatatctatatttccagcgttaagtgtaacattaaacagttttaattcacgtgacgtggtatcaattaaataattaatgcccaatttggatatagcagcctgaagctcatcttgtttagttacggatcctaatgagttattaagcaatatatcgaacggatgaacgaaggttgttttaagttggtcacatactttgtaatctagacatagatgcggaagaacggtagaaactatacgaaataaatattcagagtcctctaattgatcaagagtaactattgacttaataggcatcatttatttagtattaaatgacgaccgtaccagtgacggatatacaaaacgatttaattacagagttttcagaagataattatccatctaacaaaaattatgaaataactcttcgtcaaatgtctattctaactcacgttaacaacgtggtagatagagaacataatgccgccgtagtgtcatctccagaggaaatatcctcacaacttaatgaagatctatttccagatgatgattcaccggccactattatcgaacgagtacaacctcatactactattattgacgatactccacctcctacgtttcgtagagagttattaatatcggaacaacgtcaacaacgagaaaaaagatttaatattacagtatcgaaaaatgctgaagcaataatggaatctagatctatgataacttctatgccaacacaaacaccatccttgggagtagtttatgataaagataaaagaattcagatgttagaggatgaagtggttaatcttagaaatcaacgatctaatacaaaatcatctgataatttagataattttaccaaaatactatttggtaagactccgtacaaatcaacagaagttaataagcgtatagccatcgttaattatgcaaatttgaacgggtcccccttatcagtcgaggacttggatgtttgttcggaggatgaaatagatagaatctataaaacgattaaacaatatcacgaaagtagaaaacgaaaaattatcgtcactaacgtgattattattgtcataaacattatcgagcaggcattgctaaaactcggatttgaagaaatcaaaggactgagtaccgatatcacttcagaaattatcgatgtggagatcggagatgactgcgatgctgtagcatctaaactaggaatcggtaacagtccggttcttaatattgtattgtttatactcaagatattcgttaaacgaattaaaattatttaatttaatacattcccatatccagacaacaatcgtctggattaatctgttcctgtcgtctcataccggacgacatattaatctttttattagtgggcatctttttagatggtttctttttcccagcattaactgagtcgatacctagaagatcgtgattgatctctccgaccattccacgaacttctaattggccgtctctgacggtaccataaactattttaccagcattagtaacagcttggacaatctgaccatccatcgcattgtacgatgtagtagtaactgttgttctacgtctaggagcaccagaagtatttttggagcccttggatgttgatgtagaagaagacgaggattttgattttggtttacatgtaatacattttgaactctttgattttgtatcacatgcgccggcagtcacatctgtttgagaattaagattattgttgcctcctttgacggctgcatctccaccgatttgcgctagtagatttttaagctgtggtgtaatcttattaactgtttcgatataatcatcgtaactgcttctaacggctaaattttttttatccgccatttagaagctaaaaatatttttatttatgcagaagatttaactagattatacaatgaactaatatgatccttttccagattatttacaaacttggtattttttggttctggaggaggcgaatttaaattcggacttggattcggattttgtaagttcttgatcttattatacatcgagtataggatggcgacagtaactgctacacaaataccgatcaaaagaagaataccaatcatttattgacaataacttcactattgatcaagtatgcaatatatcatcttttcactaaataagtagtaataatgattcaacaatgtcgagatatatggacgataataatttagttcatggaaatatcgctatgattggtgtgaatgactccgctaactctgtggggtgcgcagtgctttccccacatagaataaattagcattccgactgtgataataataccaagtataaacgccataatactcaatactttccatgtacgagtgggactggtagacttactaaagtcaataaaggcgaagatacacgaaagaatcaaaagaatgattccagcgattagcacgccggaaaaataatttccaatcataagcatcatgtccatttaactaataaaaattttaaatcgccgaatgaacaaagtggaatataaaccatataaaaacaatagtttgtactgcaaaaataatatctatttttgttttcgaagatatggtaaaattaaatagtagtacacagcatgttataactaacagcagcaacggctcgtaattacttatcatttactagacgaaaaggtggtgggatattttcttgctcaaataatacgaatatatcacccatccattttatgcgatgtttatatactctaatctttaatagatctatagacgacgggtttaccaacaatatagattttatcgattcatctaatttaaacccttccttaaacgtgaatgatctattatctggcataacgatgaccctacctgatgaatcggacaatgtactgggccatgtagaataaattatcaacgaattatcgtctacgaacatttatatcatttgttttaattttaggacgcgaataaatggatataaaatagaaaataacagatattacaaccagtgttatggccgcgcccaaccaggtaggcagttttattttatcttttactacaggttctcctggatgtacgtcaccaacggcggacgtagttctagtacaattagacgtaagttccgcttgggaattttttaacgctaaagagttaacgttaatcgtgcacccaacgtatttacatctagttcgttgaacatcttgattataatataaccattttctatctctagattcgtcagtgcactcatgtaaccaacataccctaggtcctaaatatttatctccggaattagattttggataattcgcgcaccaacaatttctatttcctttatgatcgttacaaaagacgtataatgccgtatccccaaaagtaaaataatcaggacgaataattctaataaactcagaacaatatctcgcatccatatgtttggagcaaatatcggaataagtagacatagccggtttccgttttgcacgtaaccattctaaacaattggggtttccaggatcgtttctacaaaatccagtcatgaaatcgtcacaatgttctgtcttgtaattattattaaatatttttggacagtgtttggtatttgtcttagaacaacattttgccacgctatcactatcgcccaggagataatccttttttataaaatgacatcgttgcccggatgctatataatcagtagcgtgttttaaatccttaatatattcaggagttacctcgttctgataatagattaatgatccaggacgaaatttgaaagaactacatggttctccatgaattaatacatattgtttagcaaattcaggaactataaaactactacaatgatctatcgacataccatctatcaaacaaaacttgggtttaatttctcccggagatgtttcataatagtacgtataactttcttctgcaaacttaacagctctattatattcaggataattaaaacctaattccatatatttgtctcgtatatctgctattcctggtgctattttgattctattaagagtaacagctgcccccattcttaataatcgtcagtatttaaactgttaaatgttggtatatcaacatctaccttatttcccgcagtataaggtttgttgcaggtatactgttcaggaatggttacatttatacttcttctatagtcctgtctttcgatgttcatcacatatgcaaagaacagaataaacaaaataatgtaagaaataatattaaatatctgtgaattcgtaaatacattgattgccataataattacagcagctacaatacacacaatagacattcccacagtgttgccattacctccacgatacatttgagttactaagcaataggtaataactaagctagtaagaggcaatagaaaagatgagataaatatcatcaatatagagattagaggagggctatatagagccaagacgaacaaaatcaaaccgagtaacgttctaacatcattatttttgaagattcccaaataatcattcattcctccataatcgttttgcatcatacctccatctttaggcataaacgattgctgctgttcctctgtaaataaatctttatcaagcactccagcacccgcagagaagtcgtcaagcatattgtaatatcttaaataactcatttatatattaaaaaatgtcactattaaagatggagtataatctttatgccgaactaaaaaaaatgacttgtggtcaacccctaagtctttttaacgaagacggggatttcgtagaagttgaaccgggatcatcctttaagtttctgatacctaagggattttacgcctctccttccgtaaagacgagtctagtattcgagacattaacaacgaccgataataaaatcactagtatcaatccaacaaatgcgccaaagttatatcctcttcaacgcaaagtcgtatctgaagtagtttctaatatgaggaaaatgatcgaatcaaaacgtcctctatacatcactcttcacttggcgtgtggatttggtaagactattaccacgtgttatcttatggctacacacggtagaaaaaccgtcatttgcgtacccaataaaatgttaatacatcaatggaagacacaggtagaggcagtcggattggaacataagatatccatagatggagtaagtagtctattaaaggaactaaagactcaaagtccggatgtattaatagtagtcagtagacatctgacaaacgatgccttttgtaaatatatcaataagcattatgatttgttcatcttggatgaatcacatacgtataatctgatgaacaatacagcagttacaagatttttagcgtattatcctccgatgatgtgttattttttaactgctacacctagaccatctaaccgaatttattgtaacagtattattaatattgccaagttatccaatctaaaaaaaactatctatgcagtagatagtttttttgagccatattccacagataatattagacatatggtaaaacgactagatggaccatctaataaatatcatatatataccgagaagttattatctgtagacgagcctagaaatcaacttattcttgataccctggtagaagaattcaagtcaggaactattaatcgcattttagttattactaaactacgtgaacatatggtattattctacaaacgattattagattttttcggaccagaggttgtatttataggagacgcccaaaatagacgtactccagatatggtcaaatcaatcaaggaactaaatagatttatattcgtatccaccttattttattccggtactggtttagatattcctagtttggattcgttgttcatttgctcggcagtaatcaacaatatgcaaatagagcaattactagggagggtatgtcgagaaacagaactattagataggacggtatatgtatttcctaacacatccatcaaagaaataaagtacatgataggaaatttcatgcaacgaattattagtctgtctgtagataaactaggatttaaacaaaaaagttatcggaaacatcaagaatccgatcccacttctgcatgtacaacatcatccagagaagaacgtgtattaaatagaatatttaactcgcaaaatcgttaagaagtttaagcgacgatccgcatgctgcgcaggccagtgtattacccctcatagtattaatataatccaatgatacttttgtgatgtcggaaatcttaaccaatttagactgacaggcagaacacgtcatgcaatcatcatcgtcatcgataactgtagtcttgggcttctttttgcgactcttcattccggaacgcacattggtgctatccatttaggtagtaaaaaataagtcagaatatgccctataacacgatcgtgcaaaacctggtatatcgtctctatctttatcacaatatagtgtatcgacatttttattattattgacctcgtttatcttggaacatggaatgggaacatttttgttatcaacggccatctttgccttaattccagatgttgtaaaattataactaaacagtctatcatcgacacaaatgaaattcttgtttagacgtttgtagtttacgtatgcggctcgttcgcgtctcattttttcagatattgcaggtactataatattaaaaataagaatgaaataacataggattaaaaataaagttatcatgacttctagcgctgatttaactaacttaaaagaattacttagtctgtacaaaagtttgagattttcagattctgcggctatagaaaagtataattctttggtagaatggggaacatctacttactggaaaataggcgtgcaaaaggtagctaatgtcgagacgtcaatatctgattattatgatgaggtaaaaaataaaccgtttaatattgatccgggctattacattttcttaccggtatattttgggagcgtctttatttattcgaagggtaaaaatatggtagaacttggatctggaaactcttttcaaataccagatgatatgcgaagtgcgtgtaacaaagtattagacagcgataacggaatagactttctgagatttgttttgttaaacaatagatggataatggaagatgctatatcaaaatatcagtctccagttaatatatttaaactagctagtgagtacggattaaacatacccaaatatttagaaattgaaatagaggaagacacattatttgacgacgagttatactctattatagaacgctctttcgatgataaatttccaaaaatatccatatcgtatattaagttgggagaacttagacggcaagttgtagactttttcaaattctcattcatgtatattgagtccatcaaggtagatcgtataggagataatatttttattcctagcgttataacaaaatcaggaaaaaagatattagtaaaagatgtagaccatttaatacgatccaaggttagagaacatacatttgtaaaagtaaaaaagaaaaacacattttccattttatacgactatgatggaaacggaacagaaactagaggagaagtaataaaacgaattatagacactataggacgagactattatgttaacggaaagtatttctctaaggttggtagtgcaggcttaaagcaattgactaataaattagatattaatgagtgcgcaactgtcgatgagttagttgatgagattaataaatccggaactgtaaaacgaaaaataaaaaaccaatcagcatttgatttaagcagagaatgtttgggatatccagaagcggattttataacgttagttaataacatgcggttcaaaatagaaaattgtaaggttgtaaatttcaatattgaaaatactaattgtttaaataacccgagtattgaaactatatatggaaactttaaccagttcgtctcaatctttaatgtcgtcaccgatgtcaaaaaaagattattcgagtgaaataatatgcgcctttgatataggtgcaaaaaatcctgccagaactgttttagaagtcaaggataactccgttagggtattggatatatcaaaattagactggagttctgattgggaaaggcgcatagctaaagatttgtcacaatatgaatacactacagttcttctagaacgtcagcctagaaggtcgccgtatgttaaatttatctattttattaaaggctttttatatcatacatcggctgccaaagttatttgcgtctcgcctgtcatgtctggtaattcatatagagatcgaaaaaagagatcggtcgaagcatttcttgattggatggacacattcggattgcgagactccgttccggatagacgcaaattagacgatgtagcggatagtttcaatttggctatgagatacgtattagataaatggaatactaattatacaccttataataggtgtaaatctagaaattacataaaaaaaatgtaataacgttagtaacgccattatggataatctatttacctttctacatgaaatagaagatagatatgccagaactatttttaactttcatctaataagttgcgatgaaataggagatatatatggtcttatgaaagaacgcatttcctcagaggatatgtttgataatatagtgtataataaagatatacatcctgccattaagaaactagtgtattgcgacatccaacttactaaacacattattaatcagaatacgtatccggtatttaacgattcttcacaagtgaaatgttgtcattatttcgacataaactcagataatagcaatattagctctcgtacagtagagatatttgagagggaaaagtcatctcttgtatcatatattaaaactaccaataagaagagaaaggtcaattacggcgaaataaagaaaactgttcatggaggcactaatgcaaattacttttccggtaaaaagtctgacgagtatctgagtactacagttagatccaacattaatcaaccttggatcaaaaccatctctaagaggatgagagttgatatcattaatcactctatagtaacgcgtggaaaaagctctatattacaaactatagaaattatttttactaatagaacatgtgtgaaaatattcaaggattctactatgcacattattctatccaaggacaaggatgaaaaggggtgtatacacatgattgacaaattattctatgtctattataatttatttctgttgttcgaagatatcatccaaaacgagtactttaaagaagtagctaatgttgtaaaccacgtactcacggctacggcattagatgagaaattattcctaattaagaaaatggctgaacacgatgtttatggagttagcaatttcaaaatagggatgtttaacctgacatttattaagtcgttggatcataccgttttcccctctctgttagatgaggatagcaaaataaagttttttaaggggaaaaagctcaatattgtagcattacgatctctggaggattgtataaattacgtgactaaatccgagaatatgatagaaatgatgaaggaaagatcgactattttaaatagcatagatatagaaacggaatcggtagatcgtctaaaagaattgcttctaaaatgaaaaaaaacactaattcagaaatggatcaacgactagggtataagtttttggtgcctgatcctaaagccggagttttttatagaccgttacatttccaatatgtatcgtattctaattttatattgcatcgattgcatgaaatcttgaccgtcaagcggccactcttatcgtttaagaataatacagaacgaattatgatagaaattagcaatgttaaagtgactcctccagattactcacctataatcgcgagtattaaaggtaagagttatgacgcattagccacgttcactgtaaatatctttaaagaggtaatgaccaaagagggtatatccatcactaaaataagtagttatgagggaaaagattctcatttgataaaaattccgctactaataggatacgggaataaaaatccacttgatacagccaagtatcttgttcctaatgtcataggtggagtctttatcaataaacaatctgtcgaaaaagtaggaattaatctagtagaaaagattacaacatggccaaaatttagggttgttaagccaaactcattcactttctcgttttcctccgtatcccctcctaatgtattaccgacaagatatcgccattacaagatatctctggatatatcacaattggaagcgttgaatatatcatcgacaaagacatttataacggtcaatattgttttgctgtctcaatatttatctagagtgagtctagaattcattagacgtagtttatcatacgatatgcctccagaagttgtctatctagtaaacgcgataatagatagtgctaaacgaattactgaatctattactgactttaatattgatacatacattaatgacctggtggaagctgaacacattaaacaaaaatctcagttaacgatcaacgagttcaaatatgaaatgctgcataactttttacctcatatgaactatacacccgatcaactaaagggattttatatgatatctttactaagaaagtttctctactgtatcttccacacttctagatatccagatagagattcgatggtttgtcatcgcatcctaacgtacggcaaatattttgagacgttggcacatgatgaattagagaattacataggcaacatccgaaacgatatcatgaacaatcacaagaacagaggcacttacgcggtaaacattcatgtactaacaactcccggacttaatcacgcgttttctagcttattgagtggaaagttcaaaaagtcagacggtagttatcgaacacatcctcactattcatggatgcagaatatttctattcctaggagtgttggattttatccggatcaagtaaagatttcaaagatgttttctgtcagaaaataccatccaagtcaatatctttacttttgttcatcagacgttccggaaagaggtcctcaggtaggtttagtatctcaattgtctgtcttgagttccattacaaatatactaacgtctgagtatttggatttggaaaagaaaatttgtgagtatatcagatcatattataaagatgatataagttactttgaaacaggatttccaatcactatagaaaatgctctagtcgcatctcttaatccaaatatgatatgtgattttgtaactgactttagacgtagaaaacggatgggattcttcggtaacttggaggtaggtattactttagttagggatcacatgaatgaaattcgcattaatattggagcgggaagattagtcagaccattcttggttgtggataacggagagctcatgatggatgtgtgtccggagttagaaagcagattagacgacatgacattctctgacattcagaaagagtttccgcatgtcatcgaaatggtagatatagaacaatttacttttagtaacgtatgtgaatcggttcaaaaatttagaatgatgtcaaaggatgaaagaaagcaatacgatttatgtgactttcctgccgaatttagagatggatatgtagcatcttcattagtgggaatcaatcacaattctggacccagagctattcttggatgtgctcaagctaaacaagctatctcttgtctgagctcggatatacgaaataaaatagacaatggaattcatttgatgtatccagagaggccaatcgtgattagtaaggctttagaaacttcaaagattgcggctaattgcttcggccaacatgttactatagcattaatgtcgtacaaaggtatcaatcaagaggatggaattatcatcaaaaaacaatttattcagagaggcggtctcgatattgttacagccaagaaacatcaagtagaaattccattggaaaactttaataacaaagaaagagataggtctaacgcctattcaaaattagaaagtaatggattagttagactgaatgctttcttggaatccggagacgctatggcacgaaatatctcatcaagaactcttgaagatgattttgctagagataatcagattagcttcgatgtttccgagaaatataccgatatgtacaaatctcgcgttgaacgagtacaagtagaacttactgacaaagttaaggtacgagtattaaccatgaaagaaagaagacccattctaggagacaaatttaccactagaacgagtcaaaagggaacagtcgcgtatgtcgcggatgaaacggaacttccatacgacgaaaatggtatcacaccagatgtcattattaattctacatccatcttctctagaaaaactatatctatgttgatagaagttattttaacagccgcatattctgctaagccgtacaacaataagggagaaaaccgacctgtctgttttcctagtagtaacgaaacatccatcgatacatatatgcaattcgctaaacaatgttatgagcattcaaatccgaaattgtccgatgaagaattatcggataaaatcttttgtgaaaagattctctatgatcctgaaacggataagccttatgcatccaaagtattttttggaccaatttattacttgcgtctgaggcatttaactcaggacaaggcaaccgttagatgtagaggtaaaaagacgaagctcattagacaggcgaatgagggacgaaaacgtggaggaggtatcaagttcggagaaatggagagagactgtttaatagcgcatggtgcagccaatactattacagaagttttgaaagattcggaagaagattatcaagatgtgtatgtttgtgaaaattgtggagacatagcagcacaaatcaagggtattaatacatgtcttagatgttcaaaacttaatctctctcctctcttaacaaaaattgataccacgcacgtatctaaagtatttcttactcaaatgaacgccagaggcgtaaaagtcaaattagatttcgaacgaaggcctccttcgttttataaaccattagataaagttgatctcaagccgtcttttctggtgtaatattctagtttggtagtagatacatatcaatatcatcaaattcgagatccgaattataaaatgggcgtggattgttaactatagaatcggacgtctgatattcgaaaatctgtggagtttcaggttttggtggaggtgtaactgctacttgggatactgaagtctgatattcagaaagctgtggatgttctggttcggcatccaccgatggtgtcacatcactaatcggttcggtaacgtctgtggatggaggtgctacttctacagaacctgtagcctcagttgtcaacggagatacatttttaatgcgagaaaatgtataatttggtaatggtttcttatgtggatctgaagaagaggtaagatatctactagaaagataccgatcacgttctagttctcttttgtagaacttaactttttctttctccgcatctagttgatattccaacctcttcacgttactacgttcagattccaattcacgttcgcatgggttacctccgcagtttttacgagcgatttcacgttcagccttcatgcgtctctccctctctctatcgagtttatcagagcagtctttctgaaggcgatcgaactccataaatttctccaacgctttgattgtttccatagatttccgaagttcagcttttaggactgtgattctttttctttcgaattcacagctggatgtacaaccgtttccattaccgccatctctaagtttcttttctagatcggcaacatttcatccccatgccttttacattcctcgagtctactgtcgtcgaaatatcgttccagctccttttcgacatcaataactttagcacgttgtctctcaagctctcttttgtagttatctgattccctggcacgtttaagatcttcatgcaattgagtcagctcttaacttcctctcttgcttcttcgtcatagtacgcgcaatcactgtgagatccattgttaccacgtctacactcggcgagctcgcgtttaagagattcaatttcccgtttgtattggtccatgtttccattgctaccaccattagatttacaggctgctagttgtcgttcgagatcagaaatacgggttttcttggaattgatttcgtcgatgtacttggcatcgaaacacttattaagttctttttccaattctacgattttatttctttcgcgagtcaattccctcctgtagtaactatctgttttgtcagattcacgctctctacgtagactttcttgcaagttactaatttgttccctagcacgtccgagtttagttttatatgctgaatagagttctgattcatcctttgagcagatctctagcgatcgtttaagattcctaattctagtctttagcctatttacctcctcagaagatgttccgttaccgttgcgtttacactcgttaagctgtctatcaagatccatgattctatctctaagacgttgcatctctctttccatatcagcattgctttcattattacgtctgcagtcactcaactgtctttcaatatctgagattctatctctaagacgtcgcatctctctctgtttcggcattggtttcattattacgtttacagtcgttcaactgtctttcaagatctgatattctagattggagtctgctaatctctgtagcattttcacggcattcactcagttgtctttcaagatctgaaattttagattggagtctgctaatctctgtaagatttcctcctccgctctcgatgcagtcggtcaacttattctctagttctctaatacgcgaacgcagtgcatcaacttcttgcgtgtcttcctggttgcgtgtacattcatcgagatctctaacgcgtcgtcgttcttcctcaagttctctgcgtactacagaaagcgtgtccctatcttgttgatatttagcaatttctgattctagagtactgattttgcttacgtagttactaatagttgtcttggccttatcaagatcctccttgtatttgtcgcattccttgatatccctacgaagtctggacagttcccattcgacattacgacgtttatcgatttcagctcggagatcgtcatcgcgttgttttagccacatacgactgagttcaagttctcgttgacaagatccatctacttttccattcctaatagtatccagttccttttctagttctgaacgcatttctcgttccctatcaagcgattctctcaattctcggatagtcttcttatcaatttctaataaatctgaaccatcatctgtcccattttgaatatccctgtgttctttgatctcttttgtaagtcggtcgattctttcggttttataaacagaatccctttccaaagtcctaatcttactgagtttatcactaagttctgcattcaattcggtgagttttctcttggcttcttccaactctgttttaaactctccactatttccgcattcttcctcgcatttatctaaccattcaattagtttattaataactagttggtaatcagcgattcctatagccgttcttgtaattgtgggaacataattaggatcttctaatggattgtatggcttgatagcatcatctttatcattattagggggatggacaaccttaattggttggtcctcatctcctccagtagcgtgtggttcttcaataccagtgttagtaataggcttaggcaaatgcttgtcgtacgcgggcacttcctcatccatcaagtatttataatcgggttctacttcagaatattcttttctaagagacgcgacttcgggagttagtagaagaactctgtttctgtatctatcaacgctggaatcaatactcaagttaaggatagcgaatacctcatcgtcatcatccgtatcttctgaaacaccatcatatgacatttcatgaagtctaacgtattgataaatagaatcagatttagtattaaacagatccttaacctttttagtaaacgcatatgtatattttagatctccagatttcataatatgatcacatgccttaaatgtcagtgcttccatgatataatctggaacactaatgggtgacgaaaaagatacagcaccatatgctacgttgataaataaatctgaaccactaagtagataatgattaatgttaagaaagaggaaatattcagtgtataggtatgtcttggcgtcatatcttgtactaaacacgctaaacagtttgttaatgtgatcaatttccaatagattaattagagcagcgggaataccaacaaacatattaccacatccgtattttctatgaatatcacatatcatgttaaaaaatcttgatagaagagcgaatatctcgtctgacttaatgagtcgtagttcagcagcaacataagtcataactgtaaatagaacatactttcctgtagtgttgattctagactccacatcaacaccattattaaaaatagttttatatacatctttaatctgctctccgttaatcgtcgaacgttctagtatacggaaacactttgatttcttatctgtagttaatgacttagtgatatcacgaagaatattacgaattacatttcttgtttttcttgagagacctgattcagaactcaactcatcgttccatagtttttctacctcagtggcgaaatctttggagtgcttggtacatttttcaataaggttcgtgacctccatttattataaaaaatttattcaaaacttaactacaatcgggtaattataagatcgtagatctcccatgtggcggaatactaccatctatcgcatgtggatggacagtaggtaatggccatgggaacagtaatgtttgcatatttatctttcttgctagtattactgcatattgtcccaatgtttcgatgtgatgttctaacctatcaactgccgctgtatcacaacaatagtgtccgatgaaattaagattatgatccaatgtgtttaatatatgattatcaagtcttatacgatccgcgtcttttttgacaggatcaggttcttctacaggaagaagtttcggcctcttatgatattcatgtctgggaaacggtggtctagggtgaggctccggtatcggagtgggttttggattataatcatcatcgtctatgacatcatcttcgacttcgatatttattttgctatcttgatgatgtcctgtatcagttgcattttcagcactcgactgaatattagcgcattcattgtctattattaccatatttctaaacccaaaatgtatgtgttgaacatcagtactatcgttgatgagtcttatagcatgaattcgcttatcgttatcgggtttatcttctgtcaccttagcaattccttttttattaaactctacataatcatatccatttctattgtttgttctaatataaacgagtatagcatcattgctaaatttttcaatagtatcaaaaacagaatatcctaaaccatataatatatattcaggaacactcaaactaaatgtccaggattctcctaaatacgtaaactttaatagtgcgaaatcattcaaaaatctaccacttatagatagatagtacataaatgcgtatagtagtctacctatctctttattatgaaaaccggcattacgatcatatatgtcgtgatatacctgtgatccgtttacgttaaaccataaatacatgggtgatcctataaacatgaatttatttctaattctcagagctatagttaattgaccgtgtaatatttgcttacatgcatacttgatacgcttattaataagatttttatcattgctcgttatttcagaatcgtatatataaggagtaccatcgtgattcttaccagatattatacaaaatactatatataaaatatattgacccacgttagtaatcatataaatgtttaacgttttaaattttgtattcaatgatccattatcatacgctatcatggtcttgtaatattcattctttaaaatataatattgtgttagccattgcattggagctcctaatggagattttctattctcatccattttaggataggctttcataaagtccctaataacttcgtgaataatgtttctatgttttctactgatgcatgtatttgcttcgatttttttatcccatgtttcatctatcatagatttaaacgcagtaatgctcgcaacattaacatcttgaaccgttggtacaattccgttccataaatttataatgttcgccatttatataactcattttttgaatatacttttaattaacaaaagagttaagttactcatatggacgccgtccagtctgaacatcaatctttttagccagagatatcatagccgctcttagagtttcagcgtgattttccaacctaaatagaacttcatcgttgcgtttacaacacttttctatttgttcaaactttgttgttacattagtaatctttttttccaaattagttagccgttgtttgagagtttcctcattgtcgtcttcatcggctttaacaattgcttcgcgtttagcctctggctttttagcagcctttgtagaaaaaaattcagttgctggaattgcaagatcgtcatctccggggaaaagagttccgtccatttaaagtacagattttagaaactgacactctgcgttatttatatttggtacaacacatggattataaatattgatgttaataacatcagaaaatgtaaagtctatacattgttgcatcgtgttaaattttctaatggatctagtattattgggtccaacttctgcctgaaatccaaatatggaagcggatacaaaaccgtttcctggataaaccacacatctccacttttgctttacatcagaaattgtgtcgttgacatcttgaactctcctatctaatgccggtgttccacctatagattttgaatattcgaatgctgcatgagtagcattaaattccttaatattgccataattttcatatattgagtaaccctggataaaaagtaaacacaccgcagccgtcgctaccacaataaaaaaaattgatagagagttcatttataatctattagaagctgacaaaatttttttacacgcatcagacaatgctttaataaatagttcaacatctacttttgtcatatcgaaccgatggtatgattctaacctagaattacatccgaaaaagttgactatgttcatagtcattaagtcattaacaaacaacattccagactctggattataagacgatactgtttcgtcacaattacctaccttaatcatgtgattatgaatattggctattagagcaccttctaagaaatctataatatctttgaaacacgatttaaaatcaaaccacgaatatacttctacgaagaaagttagtttacccataggagaaataactataaatggagatctaaatacaaaatccggatctatgatagttttaacattattatattctctattaaatacctccacatctaaaaatgttaattttgaaactatgtcttcgtttattaccgtacctgaactaaacgctataagctctattgtttgagaactctttaaacgatattcttgaaatacatgtaacaaagtttcctttaactcggtcggtttatctaccatagttacagaatttgtatccttatctataatataataatcaaaatcgtataaagttatataattatcgcgttcagattgtgatcttttcaaatagactaaaaaccccatttctctagtaagtatcttatgtatatgtttgtaaaatatcttcatggtgggaatatgctctaccgcagttagccattcctcattgacagcggtagatgtattagacaaaactattccaatgtttaacaagggccattttacgagattattaaatccttgtttgataaatgtagccaatgagggttcgagttcaacgacgattgaattctcttcccgcggatgctgcatgatgaacgacgggatgttgttcgattgatttggaattctttttcgactttttgtttatattaaatattttaaaatttatagcggatagcaattcatgtaccacggataatgtagacgcgtattgcgcatcgatatctttattattagataaatttatcaataaatgtgagaagtttgcctcgttaaggtcttccatttaaatattatataaacatttgtgtttgtatcttattcgtcttttatggaatagttttttactagtaaagctgcaattacacactttgtccgtaaaacataaatataaacaccagcttttatcaatcgttccaaaaagtcgacggcggacatttttaacatggcatctattttaaatacacttaggtttttggaaaaaacatcattttataattgtaacgattcaataactaaagaaaagattaagattaaacataagggaatgtcatttgtattttataagccaaagcattctaccgttgttaaatacttgtctggaggaggtatatatcatgatgatttggttgtattggggaaggtaacaattaataatctaaagatgatgctattttacatggatttatcatatcatggagtgacaagtagtggagcaatttacaaattgggatcgtctatcgatagactttctctaaataggactattgttacaaaagttaataattatgatgatacattttttgacgacgatgattgatcgctattgcacaattttgtttttgtactttctaatatagtgtttaggttctttttcatatgagaatattgatttactaaaatatctatgtttaacttttgttctatgacgtccttatcggcggtatcggtacatatacgtaattcaccttcacaaaatacggagtcttcgataataatagccaatcgattattggatctagctgtctgtatcatattcaacatgtttaatatatcctttcgtttcccctttacaggcatcgatcgtagcatattttccgcgtctgatatggaaatgttaaaactacaaaaatgcgtaatgttagcccgtcctaatattggtacgtgtctataagtttggcatagtagaataatagacgtgtttaaatgccttccaaagtttaagaattctattagagtattgcattttgatagtttatcgcctacatcatcaaaaataagtaaaaagtgtgctgattttttatgattttgtgcgacagcaatacatttttctatgttacttttagttcgtatcagattatattctagagattcctgactactaacgaaattaatatgatttggccaaatgtatccatcataatctgggttataaacgggtgtaaacaagaatatatgtttatattttttaactagtgtagaaaacagagatagtaaatagatagtttttccagatccagatcctcctgttaaaaccattctaaacggcatttttaataaattttctcttgaaaattgtttttcttggaaacaattcataattatatttacagttactaaattaatttgataataaatcaaaatatggaaaactaaggttgttagtagggaggagaacaaagaaggcacatcgtgatataaataacatttattatcatgatgacaccagaaaacgacgaagagcagacatctgtgttctccgctactgtttacggagacaaaattcagggaaagaataaacgcaaacgcgtgattggtctatgtattagaatatctatggttatttcactactatctatgattaccatgtccgcgtttctcatagtgcgcctaaatcaatgcatgtctgctaacgaggctgctattactgacgccgctgttgccgttgctgctgcatcatctactcatagaaaggttgcgtctagcactacacaatatgatcacaaagaaagctgtaatggtttatattaccagggttcttgttatatattacattcagactaccagttattctcggatgctaaagcaaattgcactgcggaatcatcaacactacccaataaatccgatgtcttgactacctggctcattgattatgttgaggatacatggggatctgatggtaatccaattacaaaaactacatccgattatcaagattctgatgtatcacaagaagttagaaagtatttttgtgttaaaacaatgaactaatatttatttttgtacattaataaatgaaatcgcttaatagacaaactgtaagtaggtttaagaagttgtcggtgccggccgctataatgatgatactctcaaccattattagtggcataggaacatttctgcattacaaagaagaactgatgcctagtgcttgcgccaatggatggatacaatacgataaacattgttatttagatactaacattaaaatgtctacagataatgcggtttatcagtgtcgtaaattacgagctagattgcctagacctgatactagacatctgagagtattgtttagtattttttataaagattattgggtaagtttaaaaaagaccaatgataaatggttagatattaataatgataaagatatagatattagtaaattaacaaattttaaacaactaaacagtacgacggatgctgaagcgtgttatatatacaagtctggaaaactggttaaaacagtatgtaaaagtactcaatctgtactatgtgttaaaaaattctacaagtgacaacaaaaaatgaattaataataagtcgttaacgtacgccgccatggacgccgcgtttgttattactccaatgggtgtgttgactataacagatacattgtatgatgatctcgatatctcaatcatggactttataggaccatacattataggtaacataaaaactgtccaaatagatgtacgggatataaaatattccgacatgcaaaaatgctactttagctataagggtaaaatagttcctcaggattctaatgatttggctagattcaacatttatagcatttgtgccgcatacagatcaaaaaataccatcatcatagcatgcgactatgatatcatgttagatatagaagataaacatcagccattttatctattcccatctattgatgtttttaacgctacaatcatagaagcgtataacctgtatacagctggagattatcatctaatcatcaatccttcagataatctgaaaatgaaattgtcgtttaattcttcattctgcatatcagacggcaatggatggatcataattgatgggaaatgcaatagtaattttttatcataaaagttgtaaagtaaataataaaacaataaatattgaactagtagtacgtatattgagcaatcagaaatgatgctggtacctcttatcacggtgaccgtagttgcgggaacaatattagtatgttatatattatatatttgtaggaaaaagatacgtactgtctataatgacaataaaattatcatgacaaaattaaaaaagataaagagttctaattccagcaaatctagtaaatcaactgatagcgaatcagactgggaggatcactgtagtgctatggaacaaaacaatgacgtagataatatttctaggaatgagatattggacgatgatagcttcgctggtagtttaatatgggataacgaatccaatgttatggcgcctagcacagaacacatttacgatagtgttgctggaagcacgctgctaataaataatgatcgtaatgaacagactatttatcagaacactacagtagtaattaatgaaacggagactgttgaagtacttaatgaagataccaaacagaatcctaactattcatccaatcctttcgtaaattataataaaaccagtatttgtagcaagtcaaatccgtttattacagaacttaacaataaatttagtgagaataatccgtttagacgagcacatagcgatgattatcttaataagcaagaacaagatcatgaacacgatgatatagaatcatcggtcgtatcattggtgtgattagtttcctttttataaaattgaagtaatatttagtattattgctgccgtcacgttgtacaaatggagatattccctgtattcggcatttctaaaattagcaattttattgctaataatgactgtagatattatatagatacagaacatcaaaaaattatatctgatgagatcaatagacagatggatgaaacggtacttcttaccaacatcttaagcgtagaagttgtaaatgacaatgagatgtaccatcttattcctcatagattatcgacgattatactctgtattagttctgtcggaggatgtgttatctctatagataatgacatcaatggcaaaaatattctaacctttcccattgatcatgctgtaatcatatccccactgagtaaatgtgtcgtagttagcaagggtcctacaaccatattggttgttaaagcggatatacctagcaaacgattggtaacatcgtttacaaacgacatactatatgtaaacaatctgtcactgattaattatttgccgttgtctgtattcattattagacgagtcaccgactatttggatagacacatatgcgatcagatatttgctaataataagtggtattcccttataaccatcgacgataagcaatatcctattccatcaaactgtataggtatgtcctctgccaagtacataaattctagcatcgagcaagatactttaatccatgtttgtaacctcgagcatccgttcgactcagtatacaaaaaaatgcagtcgtacaattctctacctatcaaggaacaaatattgtacggtagaattgataatataaatatgagcattagtatttctgtggattaatagatttctagtatggggatcattaatcatctctaatctctaaatacctcataaaacgaaaaaaaagctattatcaaatactgtacggaatggattcattctcttctctttttatgaaactctgttgtatatctactgataaaactggaagcaaaaaatctgatagaaagaataagaataagatcaaggattatatggaacacgattattataaaataacaatagttcctggttcctcttccacgtctactagctcgtggtattatacacatgcctagtaatagtctctttgcgttgacggaaagcagactagaaataacaggctaaaatgttcagacaccataatagttcccaacccagataataacagagttccatcaacacattcctttaaactcaatcccaaacccaaaaccgttaaaatgtatccggccaattgatagtagataatgaggtgtacagcgcatgataatttacacagtaaccaaaatgaaaatactttagtaattataagaaatatagacggtaatgtcatcatcaacaatccgataatatgcctgagagtaaacattgacggataaaacaaaaatgctccgcataactctatcatggcaataacacaaccaaatacttgtaagattcctaaattagtagaaaatacaacgaatatcgatgtataagtgatctcgagaaataataagaataaagtaatgcccgtaaagataaacatcaacattgtttggtaatcattaaaccaattagtatgaagttgaactaatttcacagtagattttattccagtgttatcctcgcatgtataagtacctggtaagatatctttatattccataatcaatgagacatcactatctgataacgaatgaagtctagcactagtatgccatttacttaatattgtcgtcttggaagttttattataagttaaaatatcatggttatccaatttccatctaatatactttgtcggattatctatagtacacggaataatgatggtatcattacatgctgtatactctatggtctttgtagttgttataacaaccaacgtatagaggtatatcaacgatattctaactcttgacattttttatttatttaaaatgatacctttgttatttattttattctattttgctaacggtattgaatggcataagtttgaaacgagtgaagaaataatttctacttacttattagacgacgtattatacacgggtgttaatggggcggtatacacattttcaaataataaactaaacaaaactggtttaactaataataattatataacaacatctataaaagtagaggatgcggataaggatacattagtatgcggaaccaataacggaaatcccaaatgttggaaaatagacggttcagacgacccaaaacatagaggtagaggatacgctccttatcaaaatagcaaagtaacgataatcagtcacaacggatgtgtactatctgacataaacatatcaaaagaaggaattaaacgatggagaagatttgacggaccatgtggttatgatttattcacggcggataacgtaattccaaaagatggtttacgaggagcattcgtcgataaagacggtacttatgacaaagtttacattcttttcactgatactatcggctcaaagagaattgtcaaaattccgtatatagcacaaatgtgcctaaacgacgaaggtggtccatcatcattgtctagtcatagatggtcgacgtttctcaaagtcgaattagaatgtgatatcgacggaagaagttatagacaaattattcattctagaactataaaaacagataatgatacgatactatatgtattcttcgatagtccttattccaagtccgcattatgtacctattctatgaataccattaaacaatctttttctacgtcaaaattggaaggatatacaaagcaattgccgtctccagctcctggtatatgtttaccagctggaaaagttgttccacataccacgtttgaagtcatagaacaatataatgtactagatgatattataaagcctttatctaaccaacctatcttcgaaggaccgtctggtgttaaatggttcgatataaaggagaaggaaaatgaacatcgggaatatagaatatacttcataaaagaaaattctatatattcgttcgatacaaaatctaaacaaactcgtagctcgcaagtcgatgcgcgactattttcagtaatggtaactgcgaaaccgttatttatagcagatatagggataggagtaggaatgccacaaatgaaaaaaatacttaaaatgtaatcttaatcgagtacaccacacgacaatgaacaaacataagacagattatgctggttatgcttgctgcgtaatatgcggtctaattgtcggaattatttttacagcgacactattaaaagttgtagaacgtaaattagttcatacaccattaatagataaaacgataaaagatgcatatattagagaagattgtcctactgactggataagctataataataaatgtatccatttatctactgatcgaaaaacctgggaggaaggacgtaatgcatgcaaagctctaaattcaaattcggatctaattaagatagagactccaaacgagttaagttttttaagaagccttagacgaggctattgggtaggagaatccgaaatattaaaccagacaaccccatataattttatagctaagaatgccacgaagaatggaactaaaaaacggaaatatatttgtagcacaacgaatactcccaaactgcattcgtgttacactatataacaattacactacatttttatcataccactacttcggttagatgttttagaaaaaaataaatatcgccgtaccgttcttgtttttataaaaataacaattaacaattatcaaattttttctttaatattttacgtggttgaccattcttggtggtaaaataatctcttagtgttggaatggaatgctgtttaatgtttccacactcatcgtatattttgacgtatgtagtcacatcgtttacgcaatagtcagactgtagttctatcatgcttcctacatcagaaggaggaacagttttaaagtctcttggttttaatctattaccgttagttttcatgaaatcctttgttttatccacttcacattttaaataaatgtccactatacattcttttgttaattttactagatcgtcatgggtcatagaatttataggttccgtagtccatggatccaaactagcaaacttcgcgtatacggtatcgcgattagtgtatacaccaactgtatgaaaattaagaaaacagtttaataaatcaacagaaatatttaatcctccgtttgatacagatgcgccatatttatggatttcggattcacacgttgtttgtctgaggtgttcgtctagtgttgcttctacgtaaacttcgattcccatatattctttattgtcagaatcgcataccgatttatcatcatacactgtttgaaaactaaatggtatacacatcaaaataataaataataacgagtacattctgcaatattgttatcgtaattggaaaaatagtgttcgagtgagttggattatgtgagtattggattgtatattttattttatattttgtaataagaataaaatgctaatgtcaagtttattccaatagatgtcttattaaaaacatatataataaataacaatggctgaatggcataaaattatcgaggatatctcaaaaaataataagttcgaggatgccgccatcgttgattacaagactacaaagaatgttctagctgctattcctaacagaacatttgccaagattaatccgggtgaaattattcctctcatcactaatcgtaatattctaaaacctcttattggtcagaaatattgtattgtatatactaactctctaatggatgagaacacgtatgctatggagttgcttactgggtacgcccctgtatctccgatcgttatagcgagaactcataccgcacttatatttttgatgggtaagccaacaacatccagacgtgacgtgtatagaacgtgtagagatcacgctacccgtgtacgtgcaactggtaattaaaataaaaagtaatattcatatgtagtgtcaattttaaatgatgatgatgaaatggataatatccatattgacgatgtcaataatgccggtattggcatacagttcatcgatttttagatttcattcagaggatgtggaattatgttatgggcatttgtattttgataggatctataatgtagtaaatataaaatataatccgcatattccatatagatataattttattaatcgcacgttaaccgtagatgaactagacgataatgtcttttttacacatggttattttttaaaacacaaatatggttcacttaatcctagtttgattgtctcattatcaggaaacttaaaatataatgatatacaatgctcagtaaatgtatcgtgtctcattaaaaatttggcaacgagtacatctactatattaacatctaaacataagacttattctctacatcggtccacgtgtattactataataggatacgattctattatatggtataaagatataaatgacaagtataatgacatctatgattttactgcaatatgtatgctaatagcgtctacattgatagtgaccatatacgtgtttaaaaaaataaaaatgaactcttaattatgctatgctattagaaatggataaaatcaaaattacggttgattcaaaaattggtaatgttgttaccatatcgtataacttggaaaagataactattgatgtcacacctaaaaagaaaaaagaaaaggatgtattattagcgcaatcagttgctgtcgaagaggcaaaagatgtcaaggtagaagaaaaaaatattatcgatattgaagatgacgatgatatggatgtagaaagcgcgtaatacgatctataaaaataagtatataaatactttttatttactgtactcttactgtgtagtggtgataccctactcgattatttttttaaaaaaaaaatacttattctgattcttctagccatttccgtgttcgtttgaatgccacatcgacgtcaaagataggggagtagttgaaatctagttctgcattgttggtacgcacctcaaatgtagtgttggatatcttcaacgtatagttgttgagtagtgatggttttctaaatagaattctcttcatatcattcttgcacgcgtacatttttagcatccatcttggaatcctagatccttgttctattcccaatggtttcatcaatagaagattaaacatatcgtacgaacacgatggagagtaatcgtagcaaaagtaagcatttcctttaatcttagatcccggatactggatatattttgcagccaacacgtgcatccatgcagcatttcctacatatacccggctatgcaccgcgtcatcatcgactgtacgatacataatgttaccgtgttgcttacattgctcgtaaaagactttcatcaatttgtctccttctccgtaaattccagtgggtcttaggcaacaagtatacaattttgctccattcatgattacggaattattggctttcataaccagttgctcggccatacgtttactttttgcgtatacatgtcctggtgatatatcataaagggtatgctcatggccgatgaatggatcaccgtgtttattgggtcctattgcttccatgctactagtatagatcaaatacttgattcctaggtccacacaagctgccaaaatagtctgtgttccataatagtttactttcatgatttcattatcggtgtattttccaaatacatccactagagcagccgtatgaataatcagatttaccccatctagcgcttctctcaccttatcaaagtcgtttatatcacattgtatatagtttataaccttaactttcgaggttattggttgtggatcttctacaatatctatgactctgatttcttgaacatcatctgcactaattaacagttttactatatacctgcctagaaatccggcaccaccagtaaccgcgtacacggccattgctgccactcataatatcagactacttattctattttactaaataatggctgtttgtataatagaccacgataatatcagaggagttatttactttgaaccagtccatggaaaagataaagttttaggatcagttattggattaaaatccggaacgtatagtttgataattcatcgttacggagatattagtcaaggatgtgattccataggcagtccagaaatatttatcggtaacatctttgtaaacagatatggtgtagcatatgtttatttagatacagatgtaaatatatttacaattattggaaaggcgttatctatttcaaaaaatgatcagagattagcgtgtggagttattggtatttcttacataaatgaaaagataatacattttcttacaattaacgagaatggcgtttgatatatcagttaatgcgtctaaaacaataaatgcattagtttacttttctactcagcaaaataaattagtcatacgtaatgaagttaatgatacacactacactgtcgaatttgatagggacaaagtagttgacacgtttatttcatataatagacataatgacaccatagagataagaggggtgcttccagaggaaactaatattggttgcgcggttagtatgacttacttgtataataagtatagttttaaactgattttagcagaatatataagacacagaaatactatatccggcaatatttattcggcattgatgacactagatgatttggctattaaacagtatggagacattgatctattatttaatgagaaacttaaagtagactccgattcgggactatttgactttgtcaactttgtaaaggatatgatatgttgtgattctagaatagtagtagctctatctagtctagtatctaaacattgggaattgacaaataaaaaatataggtgtatggcattagccgaacatatatctgatagtattccaatatctgagctatctagactacgatacaatctatgtaagtatctacgcggacacactgagagcatagaggataaatttgattattttgaagacgatgattcgtctacatgttctgccgtaaccgacagggaaacggatgtataattttttttatagcgtgaaggatatgataaaaaatataattgttgtatttatcccattccaatcaccttatatgattctgtaacacaataaaggagtcttatagatgtatagaggtcagatactggtttgataaactgtttattccacataagtatgtttgactttatggttagacccgcatactttaacaaatcactgaaaattggagttaggtattgacctctcagaatcagttgccgttctggaacattaaatgtattttttatgatatactccaacgcatttatgtgggcatacaacaagtcattactaatggaatattccaagagttttagttgtctagtatttaacaagagaagagatttcaacagactgtttatgaactcgaatgccgcctcattgtcgcttatattgatgatgtcgaattctcccaatatcatcaccgatgagtagctcatcttgttatcgggatccaagttttctaaagatgtcattaaaccctcgatcatgaatggatttatcatcatcgtttttatgttggacatgagcttagtccgtttgtccacatctatagaagatgatttctgaattatttcatatatctctctctttaactccaggaacttgtcaggatggtctactttaatatgttctcgtctaagagatgaaaatctttggatggttgcacgcgacttttctctaaaggatgacgttgcccaagatcctctcttaaatgaatccatcttatccttggacaagatggacagtctattttccttagatggtttaatatttttgttacccatgatctataaaggtagacctaatcgtctcggatgaccatatatttattttcagttttattatacgcataaattgtaaaaaatatgttaggtttacgaaaatgtctcgtggggcattaatcgtttttgaaggattggacaaatctggaaaaacaacacaatgtatgaacatcatggaatcaataccttcaaacacaataaaataccttaactttcctcagagatccactgtcactggaaagatgatagatgactatctaactcgtaaaaaaacctataatgatcatatagttaatctattattttgtgcaaatagatgggagtttgcatcttttatacaagaacaactagaacagggaattactttaatagttgatagatacgcattttctggagtagcgtatgccgccgctaaaggcgcgtcaatgactctcagtaagagttatgaatctggattgcctaaacccgacttagttatattcttggaatctggtagcaaagaaattaatagaaacgtcggtgaggaaatttatgaagatgttacattccaacaaaaggtattacaagaatataaaaaaatgattgaagaaggagatattcattggcaaattatttcttctgaattcgaggaagatgtaaagaaggagttgattaagaatatagttatagaggctatacacacggttactggaccagtggggcaactgtggatgtaatagtgaaattacattttttataaatagatgttagtacagtgttataaatggatgaagcatattactctggcaacttggaatcagtactcggatacgtgtccgatatgcataccgaactcgcatcaatatctcaattagttattgccaagatagaaactatagataatgatatattaaacaaggacattgtaaattttatcatgtgtagatcaaacttggataatccatttatctctttcctagatactgtatatactattatagatcaagagaactatcagactgagttgattaattcattagacgacaatgaaattatcgattgtatagttaataagtttatgagcttttataaggataacctagaaaatatagtagatgctatcattactctaaaatatataatgaataatccagattttaaaactacgtatgccgaagtactcggttccagaatagccgatatagatattaaacaagtgatacgtaagaatatactacaattgtctaataatatccgcgaacgatatttgtgaaaatattaaaaaaaaatactttttttattaaatgacgtcttttcgtgaatttagaaaattatgctgtgctatatatcacgcatcaggatataaagaaaaatctaaattaattagagactttataacagatagggatgataaatatttgatcattaagctattgcttcccggattagacgatagaatttataacatgaacgataaacaaattataaaattatatagtataatatttaaacaatctcaggaagatatgctacaagatttaggatacggatatataggagacactattaggactttcttcaaagagaacacagaaatccgtccacgagataaaagcattttaactttagaagaagtggatagttttttaactacgttatcatccgtaactaaagaatcgcatcaaataaaattattgactgatgtagcatctgtttgtacatgtaatgatttaaaatgtgtagtcatgcttattgataaagatctaaaaattaaagcgggtcctcggtacgtacttaacgctattagtcctaatgcctatgatgtgtttagaaaatctaataacttgaaagagataatagaaaattcatctaaacaaaatctagactctatatctatttctgttatgactccaattaatcccatgttagcggaatcgtgtgattctgtcaataaggcgtttaaaaaatttccatcaggaatgtttgcggaagtcaaatacgatggtgaaagagtacaagttcataaaaataataacgagtttgccttctttagtagaaacatgaaaccagtactctctcataaagtggattatctcaaagaatacataccgaaagcatttaaaaaagctacgtctatcgtattggattctgaaattgttcttgtagacgaacataatgtaccgctcccgtttggaagtttaggtatacacaaaaagaaagaatataaaaactctaacatgtgtttgttcgtgtttgactgtttgtactttgatggattcgatatgacggacattccattgtacgaacgaagatcttttctcaaagatgttatggttgaaatacccaatagaatagtattctcagagttgacgaatattagtaacgagtctcagttaactgacgtattggatgatgcactaacgagaaaattagaaggattggtcttaaaagatattaatggagtatacgaaccgggaaagagaagatggttaaaaataaagcgagactatttgaacgagggttccatggcagattctgccgatttagtagtactaggtgcctactatggtaaaggagcaaagggtggtatcatggcagtctttctaatgggttgttacgacgatgaatccggtaaatggaagacggttaccaagtgttcaggacacgatgataatacgttaagggagttgcaagaccaattaaagatgattaaaattaacaaggatcccaaaaaaattccagagtggttagtagttaataaaatctatattcccgattttgtagtagaggatccgaaacaatctcagatatgggaaatttcaggagcagagtttacatcttccaagtcccataccgcaaatggaatatccattagatttcctagatttactaggataagagaggataaaacgtggaaagaatctactcatctaaacgatttagtaaacttgactaaatcttaatagttacatacaaactgaaaattaaaataacactatttagttggtggtcgccatggatggtgttattgtatactgtctaaacgcgctagtaaaacatggcgaggaaataaatcatataaaaaatgatttcatgattaaaccatgttgtgaaagagtttgtgaaaaagtcaagaacgttcacattggcggacaatctaaaaacaatacagtgattgcagatttgccatatatggataatgcggtatccgatgtatgcaattcactgtataaaaagaatgtatcaagaatatccagatttgctaatttgataaagatagatgacgatgacaagactcctactggtgtatataattattttaaacctaaagatgccattcctgttatcatatctataggaaaggataaagatgtctgtgaactattaatctcatcagacatatcgtgtgcatgcgtggagttaaattcatatcacgtagccattcttcccatggatgtttccttttttaccaaaggaaatgcatcattgattattctcctgtttgatttctctatcgatgcggcacctctcttaagaagtgtaaccgataataatgttattatatctagacaccagcgtctacatgacgagcttccgagttccaattggttcaagttttacataagtataaagtccgactattgttctatattatatatggttgttgatggatctgtgatgcatgcgatagctgataatagaactcacgcaattattagcaaaaatatattagacaatactacgattaacgatgagtgtagatgctgttattttgaaccacagattaggattcttgatagagatgagatgctcaatggatcatcgtgtgatatgaacagacattgtattatgatgaatttacctgatgtaggcgaatttggatctagtatgttggggaaatatgaacctgacatgattaagattgctctttcggtggctggtaatttaataagaaatcgagactacattcccgggagacgaggatatagctactacgtttacggtatagcctctagataatttttttaagcacgaaataaaaaacataattttaaaccaatctatttcatactattttgtgtgatcaccatggacataaagatagatattagtatttctggtgataaatttacggtgactactaggagggaaaatgaagaaagaaaaaaatatctacctctccaaaaagaaaaaactactgatgttatcaaacctgattatcttgagtacgatgacttgttagatagagatgagatgtttactattctagaggaatattttatgtacagaggtctattaggcctcagaataaaatatggacgactctttaacgaaattaaaaaattcgacaatgatgcggaagaacaattcggtactatagaagaactcaagcagaaacttagattaaattctgaagagggagcagataactttatagattatataaaggtacaaaaacaggatatcgtcaaacttactgtatacgattgcatatctatgataggattgtgtgcatgcgtggtagatgtttggagaaatgagaaactgttttctagatggaaatattgtttacgagcgattaaactgtttattgatgatcacatgcttgataagataaaatctatactgcagaatagactagtatatgtggaaatgtcatagaaagttaaaagttaatgagagcaaaaatatataaggttgtattccatatttgttatttttttctgtaatagttagaaaaatacattcgatggtctatctatcagattattatgtgttataaggtactttttctcataataaactagagtatgagtaagatagtgtttttcaaaacatataaatctaaaattgatggatgagatatacagctattaatttcgaaaatatattttaatctgataactttaaacatggatttttaatggtggtttaacgttttaaaaaaagattttgttattgtagtatatgataatattaaaagatggatataaagaatttgctgactgcatgtactattttttacattactacattggctacggcagatatacctacttcgtcactgccacacgctccggtaaacggggcatgtgacgagggagaatatcttgataagaggcataatcaatgttgtaatcagtgtccacctggagaatttgccaaggttagatgtaatggtaacgataacacaaaatgtgaacgctgcccacctcatacatataccgcaatccccaattactctaatggatgtcatcaatgtagaaaatgcccaacaggatcatttgataaggtaaagtgtaccggaacacagaacagtaaatgttcgtgtcttcctggttggtattgcgctactgattcttcacagactgaagattgtcgagattgtataccaaaaaggagatgtccatgcggatactttggtggaatagatgaacaaggaaatcctatttgtaaatcgtgttgtgttggtgaatattgcgactacctacgtaattatagacttgatccatttcctccatgcaaactatctaaatgtaattaattatgattttgatgataatgttaccatacattatatcgctacttggttagtgtattattcagtatgaagacctattaataattacttatcttttgacgatcttgttataattataatataaaaatacttatggcatagtaactcataattgctgacgcgataaattcgtaataatctgttttgttcaaatttttataaggaatctacaggcataaaaataaaaatataatttataatatactcttacagcgcgccatcatgaataacagcagtgaattgattgctgttattaatggatttagaaatagtggacgattttgtgatattaatatagttattaatgatgaaaggataaacgctcacagactcatcctatctggagcctccgaatatttttccattctgttttccaataattttatcgattctaatgaatacgaagttaatctaagtcatttagattatcaaagtgttaacgatttgatcgattacatttatgggatacctttgagcctaactaacgataacgtgaaatatattctttcaaccgctgattttttacaaattggatctgctattacggagtgtgaaaattacatacttaaaaatctttgttctagaaactgtatcgatttctacatatacgctgataaatataataacaagaaaatagaatcagcgtcgtttaacacaatattacaaaatattttgagactcatcaacgatgaaaactttaaatacttaacagaggaatcaatgataaaaattttaagcgatgatatgttaaatataaaaaatgaggatttcgccccactaattctcattaaatggttagagagtactcaacaaccatgcaccgtcgagttacttaaatgcctcagaatatcattgctttccccacaagttataaaatcactttatagtcatcgactggttagttcaatctacgaatgtataacattcttaaacaatatagcattcttggatgaatcatttcctagataccatagcatcgagttgatatctatcggtataagtaattcgcatgataagatttccataaactgctacaatcataaaaaaaatacatgggaaatgatatcttcacgtagatataggtgtagtttcgcagtggccgtcctggataatattatctatatgatgggtggatatgatcagtccccgtatagaagttcaaaggttatagcgtacaatacatgtacaaattcttggatatatgatataccagagctaaaatatcctcgttctaattgtgggggactggctgatgacgaatacatttattgtataggcggcatacgcgatcaggattcatcgttgacatctagtattgatagatggaagccatcaaaaccatattggcagaagtatgctaaaatgcgcgaaccaaaatgtgatatgggggttgcgatgttaaacggattaatatatgttataggtggaatcgttaaaggtgacacgtgtaccgacgcactagagagtttatcagaagatggatggatgaagcatcaacgtcttccaataaaaatgtccaatatgtcgacgattgttcatgatggcaagatttatatatctggaggttacaacaatagtagtgtagttaatgtaatatcgaatctagtccttagctataattcgatatatgatgaatggaccaaattatcatcattaaacattcctagaattaatcccgctctatggtcagcgcataataaattatatgtaggaggaggaatatctgatgatgttcgaactaatacatctgagacatacgacaaagaaaaagattgttggacattggataatggtcacgtgttaccacgcaattatataatgtataaatgcgaaccgattaaacataaatatccattggaaaaaacacagtacacgaatgattttctaaagtatttggaaagttttataggtagttgatagaacaaaatacataattttgtaaaaataaatcactttttatactaatatgacacgattaccaatacttttgttactaatatcattagtatacgctacaccttttcctcagacatctaaaaaaataggtgatgatgcaactctatcatgtaatcgaaataatacaaatgactacgttgttatgagtgcttggtataaggagcccaattccattattcttttagctgctaaaagcgacgtcttgtattttgataattataccaaggataaaatatcttacgactctccatacgatgatctagttacaactatcacaattaaatcattgactgctagagatgccggtacttatgtatgtgcattctttatgacatcaactacaaatgacactgataaagtagattatgaagaatactccacagagttgattgtaaatacagatagtgaatcgactatagacataatactatctggatctacacattcaccggaaactagttctaagaaacctgattatatagataattctaattgctcgtcggtattcgaaatcggtacccggggatcagcttgcatgcctgcagcaattcccgaggctgtagccgacgatggtgcgccaggagagttgttgattcattgtttgcctccctgctgcggtttttcaccgaagttcatgccagtccagcgtttttgcagcagaaaagccgccgacttcggtttgcggtcgcgagtgaagatccctttcttgttaccgccaacgcgcaatatgccttgcgaggtcgcaaaatcggcgaaattccatacctgttcaccgacgacggcgctgacgcgatcaaagacgcggtgatacatatccagccatgcacactgatactcttcactccacatgtcggtgtacattgagtgcagcccggctaacgtatccacgccgtattcggtgatgataatcggctgatgcagtttctcctgccaggccagaagttctttttccagtaccttctctgccgtttccaaatcgccgctttggacataccatccgtaataacggttcaggcacagcacatcaaagagatcgctgatggtatcggtgtgagcgtcgcagaacattacattgacgcaggtgatcggacgcgtcgggtcgagtttacgcgttgcttccgccagtggcgcgaaatattcccgtgcaccttgcggacgggtatccggttcgttggcaatactccacatcaccacgcttgggtggtttttgtcacgcgctatcagctctttaatcgcctgtaagtgcgcttgctgagtttccccgttgactgcctcttcgctgtacagttctttcggcttgttgcccgcttcgaaaccaatgcctaaagagaggttaaagccgacagcagcagtttcatcaatcaccacgatgccatgttcatctgcccagtcgagcatctcttcagcgtaagggtaatgcgaggtacggtaggagttggccccaatccagtccattaatgcgtggtcgtgcaccatcagcacgttatcgaatcctttgccacgcaagtccgcatcttcatgacgaccaaagccagtaaagtagaacggtttgtggttaatcaggaactgttcgcccttcactgccactgaccggatgccgacgcgaagcgggtagatatcacactctgtctggcttttggctgtgacgcacagttcatagagataaccttcacccggttgccagaggtgcggattcaccacttgcaaagtcccgctagtgccttgtccagttgcaaccacctgttgatccgcatcacgcagttcaacgctgacatcaccattggccaccacctgccagtcaacagacgcgtggttacagtcttgcgcgacatgcgtcaccacggtgatatcgtccacccaggtgttcggcgtggtgtagagcattacgctgcgatggattccggcatagttaaagaaatcatggaagtaagactgctttttcttgccgttttcgtcggtaatcaccattcccggcgggatagtctgccagttcagttcgttgttcacacaaacggtgatacgtacacttttcccggcaataacatacggcgtgacatcggcttcaaatggcgtatagccgccctgatgctccatcacttcctgattattgacccacactttgccgtaatgagtgaccgcatcgaaacgcagcacgatacgctggcctgcccaacctttcggtataaagacttcgcgctgataccagacgttgcccgcataattacgaatatctgcatcggcgaactgatcgttaaaactgcctggcacagcaattgcccggctttcttgtaacgcgctttcccaccaacgctgatcaattccacagttttcgcgatccagactgaatgcccacaggccgtcgagttttttgatttcacgggttggggtttctacaggacgtaacattctagtcgaggaattcatttatagcatagaaaaaaacaaaatgaaattctactatatttttacatacatatattctaaatatgaaagtggtgattgtgactagcgtagcatcgcttctagacatctatatactatatagtaataccaatactcaagactacgaaactgatacaatctcttatcatgtgggtaatgttctcgatgtcgatagccatatgcccggtagttgcgatatacataaactgatcactaattccaaacccacccgctttttatagtaagtttttcacccataaataataaatacaataattaatttctcgtaaaagtagaaaatatattctaatttattgcacggtaaggaagtagaatcataaagaacagtgacggatccccgatccccgacctgcaggcatgcaagctcgactccggaaccaattactgataatgtagaagatcatacagacaccgtcacatacactagtgatagcattaatacagtaagtgcatcatctggagaatccacaacagacgagactccggaaccaattactgataaagaagatcatacagttacagacactgtctcatacactacagtaagtacatcatctggaattgtcactactaaatcaaccaccgatgatgcggatctttatgatacgtacaatgataatgatacagtaccaccaactactgtaggcggtagtacaacctctattagcaattataaaaccaaggactttgtagaaatatttggtattaccgcattaattatattgtcggccgtggcaattttctgtattacatattatatatataataaacgttcacgtaaatacaaaacagagaacaaagtctagatttttgacttacataaatgtctgggatagtaaaatctatcatattgagcggaccatctggtttaggaaagacagccatagccaaaagactatgggaatatatttggatttgtggtgtcccataccactagatttcctcgtcctatggaacgagaaggtgttgattaccattacgttaacagagaggccatctggaagggaatagccgccggaaactttctagaacatactgagtttttaggaaatatttacggaacttctaaaacagctgtgaatacagcggctattaataatcgtatttgtgtgatggatctaaacatcgacggtgttagaagtcttaaaaatacgtacctaatgccttactcggtgtatataagacctacctctcttaaaatggttgagaccaagcttcgtcgtagaaacactgaagctaacgatgagattcatcgtcgtgtgatgttggcaaaaactgacatggatgaggcaggtgaagccggtctattcgacactattatcattgaagatgatgtgaatttagcatatagtaagttaattcagatactacaggaccgtattagaatgtattttaacactaattagagacttaagacttaaaacttgataattaataatataactcgtttttatatgtgtctatttcaacgtctaatgtattagttaaatattaaaacttaccacgtaaaacttaaaatttaaaatgatatttcattgacagatagatcacacattatgaactttcaaggacttgtgttaactgacaattgcaaaaatcaatgggtcgttggaccattaataggaaaaggtggattcggtagtatttatactactaatgacaataattatgtagtaaaaatagagcccaaagctaacggatcattatttaccgaacaggcattttatactagagtacttaaaccatccgttatcgaagaatggaaaaaatctcacaatataaagcacgtaggtcttatcacgtgcaaggcatttggtctatacaaatccattaatgtggaatatcgattcttggtaattaatagattaggtgcagatctagatgcggtgatcagagccaataataatagactaccaaaaaggtcggtgatgttgatcggaatcgaaatcttaaataccatacaatttatgcacgagcaaggatattctcacggagatattaaagcgagtaatatagtcttagatcaaatagataagaataaattatatctagtggattacggattggtttctaaattcatgtctaatggcgaacatgttccatttataagaaatccaaataaaatggataacggtactctagaatttacacctatagattcgcataaaggatacgttgtatctagacgtggagatctagaaacacttggatattgtatgattagatggttgggaggtatcttaccatggactaagatatctgaaacaaagaattgtgcattagtaagtgccacaaaacagaaatatgttaacaatactgcgactttgttaatgaccagtttgcaatatgcacctagagaattgctgcaatatattaccatggtaaactctttgacatattttgaggaacccaattacgacaagtttcggcacatattaatgcagggtgtatattattaagtgtggtgtttggtcgataaaaattaaaaaataacttaatttattattgatctcgtgtgtacaaccgaaatcatggcgatgttttacgcacacgctctcggtgggtacgacgagaatcttcatgcctttcctggaatatcatcgactgttgccaatgatgtcaggaaatattctgttgtgtcagtttataataacaagtatgacattgtaaaagacaaatatatgtggtgttacagtcaggtgaacaagagatatattggagcactgctgcctatgtttgagtgcaatgaatatctacaaattggaaatccgatccatgatcaagaaggaaatcaaatctctatcatcacatatcgccacaaaaactactatgctctaagcggaatcgggtacgagagtctagacttgtgtttggaaggagtagggattcatcatcacgtacttgaaacaggaaacgctgtatatggaaaagttcaacatgattattctactatcaaagagaaggccaaagaaatgagtgcacttagtccaggacctatcatcgattaccacgtctggataggagattgtatctgtcaagttactgctgtggacgtacatggaaaggaaattatgaaaatgagattcaaaaagggtgcggtgcttccgatcccaaatctggtaaaagttaaacttggggagaatgatacagaaaatctttcttctactatatcggcggcaccatcgaggtaaccacctctctggaagacagcgtgaatcatgtactcatgaaacgtttggaaactatacgccatatgtggtctgttgtatatgatcattttgatattgtgaatggtaaagaatgctgttatgtgcatacgcattcatctaatcaaaatcctataccgagtactgtaaaaacaaatttgtacatgaagactatgggatcatgcattcaaatggattccatggaagctctagagtatcttagcgaactgaaggaatcaggtggatggagtcccagaccagaaatgcaggaatttgaatatccagatggagtggaagacactgaatcaattgagagattggcagaggagttcttcaatagatcagaacttcaggctggtgaatcagtcaaatttggtaattctattaattgttaaacatacatctgtttcagctaagcaactaagaacacgtatacggcagcagcttccttctatactctcatcttttaccaacacaaagggtggatatttgttcattggagttgataataatacacacaaagtatttggattcacggtgggttacgactacctcagactgatagagaatgatatagaaaagcatatcaaaagacttcgtgttgtgcatttctgtgagaagaaagaggacatcaagtacgcgtgtcgattcatcaaggtatataaacctggggatgagactacctcgacatacgtgtgcgctatcaaagtggaaagatgctgttgtgctgtgtttgcagattggccagaatcatggtatatggatactaatggtatcaagaagtattctccagatgaatgggtgtcacatataaaattttaattaatgtaactatagagaacaaataataaggttgtaatatcatatagacaataactaacaattaattagtaactgttatctcttttttaactaaccaactaactatatacctattaatacatcgtaattatagttcttaacatctattaatcattaattcgcttctttaattttttataaactaacattgttaattgaaaagggataacatgttacagaatataaattatatatggatttttttaaaaaggaaatacttgactggagtatatatttatctcttcattatatagcacgcgtgttttccaatttttccacatcccatataatacaggattataatctcgttcgaacatacgagaaagtggataaaacaatagttgattttttatctaggttgccaaatttattccatattttagaatatggggaaaatattctacatatttattctatggatgatgctaatacgaatattataattttttttctagatagagtattaaatattaataagaacgggtcatttatacacaatctcgggttatcatcatccattaatataaaagaatatgtatatcaattagttaataatgatcatccagataataggataagactaatgcttgaaaatggacgtagaacaagacattttttgtcctatatatcagatacagttaatatctatatatgtattttaataaatcatggattttatatagatgccgaagacagttacggttgtacattattacatagatgtatatatcactataagaaatcagaatcagaatcatacaatgaattaattaagatattgttaaataatggatcagatgtagataaaaaagatacgtacggaaacacaccttttatcctattatgtaaacacgatatcaacaacgtggaattgtttgagatatgtttagagaatgctaatatagactctgtagactttaatagatatacacctcttcattatgtctcatgtcgtaataaatatgattttgtaaagttattaatttctaaaggagcaaatgttaatgcgcgtaataaattcggaactactccattttattgtggaattatacacggtatctcgcttataaaactatatttggaatcagacacagagttagaaatagataatgaacatatagttcgtcatttaataatttttgatgctgttgaatctttagattatctattatccagaggagttattgatattaactatcgtactatatacaacgaaacatctatttacgacgctgtcagttataatgcgtataatacgttggtctatctattaaacaaaaatggtgattttgagacgattactactagtggatgtacatgtatttcggaagcagtcgcaaacaacaacaaaataataatggaagtactattgtctaaacgaccatctttgaaaattatgatacagtctatgatagcaattactaaacataaacagcataatgcagatttattgaaaatgtgtataaaatatactgcgtgtatgaccgattatgatactcttatagatgtacagtcgctacagcaatataaatggtatattttaagatgtttcgatgaaatagatatcatgaagagatgttatataaaaaataaaactgtattccaattagttttttgtatcaaagacattaatactttaatgagatacggtaaacatccttctttcgtgaaatgcactagtctcgacgtatacggaagtcgtgtacgtaatatcatagcatctattagatatcgtcagagattaattagtctattatccaagaagctggatcctggagataaatggtcgtgttttcctaacgaaataaaatataaaatattggaaaactttaacgataacgaactatccacatatctaaaaatcttataaacattattaaaatataaaatctaagtaggataaaatcacactacatcattgtttccttttagtgctcgacagtgtatactatttttaacgctcataaataaaaatgaaaacgatttccgttgttacgttgttatgcgtactacctgctgttgtttattcaacatgtactgtacccactatgaataacgctaaattaacgtctaccgaaacatcgtttaatgataaccagaaagttacgtttacatgtgatcagggatatcattctttggatccaaatgctgtctgtgaaacagataaatggaaatacgaaaatccatgcaaaaaaatgtgcacagtttctgattatgtctctgaactatataataaaccgctatacgaagtgaattccaccatgacactaagttgcaacggcgaaacaaaatattttcgttgcgaagaaaaaaatggaaatacttcttggaatgatactgttacgtgtcctaatgcggaatgtcaacctcttcaattagaacacggatcgtgtcaaccagttaaagaaaaatactcatttggggaatatatgactatcaactgtgatgttggatatgaggttattggtgcttcgtacataagttgtacagctaattcttggaatgttattccatcatgtcaacaaaaatgtgatatgccgtctctatctaacggattaatttccggatctacattttctatcggtggcgttatacatcttagttgtaaaagtggttttacactaacggggtctccatcatccacatgtatcgacggtaaatggaatcccatactcccaatatgtgtacgaactaacgaaaaatttgatccagtggatgatggtcccgacgatgagacagatttgagcaaactctcgaaagacgttgtacaatatgaacaagaaatagaatcgttagaagcaacttatcatataatcatagtggcgttgacaattatgggcgtcatatttttaatctccgttatagtattagtttgttcctgtgacaaaaataatgaccaatataagttccataaattgctaccgtaaatataaatccgttaaaataattaataatttaataacaaacaagtatcaaaagattaaagacttatagctagaatcaattgagatgtcttcttcagtggatgttgatatctacgatgccgttagagcatttttactcaggcactattataacaagagatttattgtgtatggaagaagtaacgccatattacataatatatacaggctatttacaagatgcgccgttataccgttcgatgatatagtacgtactatgccaaatgaatcacgtgttaaacaatgggtgatggatacacttaatggtataatgatgaatgaacgcgatgtttctgtaagcgttggcaccggaatactattcatggaaatgtttttcgattacaataaaaatagtatcaacaatcaactaatgtatgatataattaatagcgtatctataattctagctaatgagagatatagaagcgcttttaacgacgatggtatatacatccgtagaaatatgattaacaagttgtacggatacgcatctctaactactattggcacgatcgctggaggtgtttgttattatctgttgatgcatctagttagtttgtataaataattatttcaatatactagttaaaattttaagattttaaatgtataaaaaactaataacgtttttatttgtaataggtgcattagcatcctattcgaataatgagtacactccgtttaataaactgagtgtaaaactctatatagatggagtagataatatagaaaattcatatactgatgataataatgaattggtgttaaattttaaagagtacacaatttctattattacagagtcatgcgacgtcggatttgattccatagatatagatgttataaacgactataaaattattgatatgtataccattgactcgtctactattcaacgcagaggtcacacgtgtagaatatctaccaaattatcatgccattatgataagtacccttatattcacaaatatgatggtgatgagcgacaatattctattactgcagagggaaaatgctataaaggaataaaatatgaaataagtatgatcaacgatgatactctattgagaaaacatactcttaaaattggatctacttatatatttgatcgtcatggacatagtaatacatattattcaaaatatgatttttaaaaatttaaaatatattatcacttcagtgacagtagtcaaataacaaacaacaccatgagatatattataattctcgcagttttgttcattaatagtatacatgctaaaataactagttataagtttgaatccgtcaattttgattccaaaattgaatggactggggatggtctatacaatatatcccttaaaaattatggcatcaagacgtggcaaacaatgtatacaaatgtaccagaaggaacatacgacatatccgcatttccaaagaatgatttcgtatctttctgggttaaatttgaacaaggcgattataaagtggaagagtattgtacgggactatgcgtcgaagtaaaaattggaccaccgactgtaacattgactgaatacgacgaccatatcaatttgtacatcgagcatccgtatgctactagaggtagcaaaaagattcctatttacaaacgcggtgacatgtgtgatatctacttgttgtatacggctaacttcacattcggagattctaaagaaccagtaccatatgatatcgatgactacgattgcacgtctacaggttgcagcatagactttgtcacaacagaaaaagtgtgcgtgacagcacagggagccacagaagggtttctcgaaaaaattactccatggagttcgaaagtatgtctgacacctaaaaagagtgtatatacatgcgcaattagatccaaagaagatgttcccaatttcaaggacaaaatggccagagttatcaagagaaaatttaatacacagtctcaatcttatttaactaaatttctcggtagcacatcaaatgatgttaccacttttcttagcatgcttaacttgactaaatattcataactaatttttattaatgatacaaaaacgaaataaaactgcatattatacactggttaacgcccttataggctctaaccattttcaagatgaggtccctgattatagtccttctgttcccctctatcatctactccatgtctattagacgatgtgagaagactgaagaggaaacatggggattgaaaatagggttgtgtataattgccaaagatttctatcccgaaagaactgattgcagtgttcatctcccaactgcaagtgaaggattgataactgaaggcaatggattcagggatatacgaaacaccgataaattataaaaaaagcaatgtgtccgctgtttccgttaataatactattttcgtaactggcggattattcataaataactctaatagcacgatcgtggttaacaatatggaaaaacttgacatttataaagacaaacaatggtcgattatagaaatgcctatggctagggtatatcacggcattgactcgacatttggaatgttatattttgccggaggtctatccgttaccgaacaatatggtaatttagagaaaaacaacgagatatcttgttacaatcctagaacgaataagtggtttgatatttcatatactatttataagatatccatatcatcattgtgtaaactaaataacgtcttctatgtatttagtaaggacattggatatgtggaaaagtatgatggtgcatggaagttagtacatgatcgtctccccgctataaaggcattatcaacttctccttattgattgaaaatgaaaatataaatagtttttatgtatagcagtattaccctatagttttattgcttactactaacatggatacagatgttacaaatgtagaagatatcataaatgaaatagatagagagaaagaagaaatactaaaaaatgtagaaattgaaaataataaaaacattaacaagaatcatcccaatgaatatattagagaagcactcgttattaataccagtagtaatagtgattccattgataaagaagttatagaatgtatcagtcacgatgtaggaatatagatcatatctactaatttttataatcgatacaaaacataaaaaacaactcgttattacatagcaggcatggaatccttcaagtattgttttgataacgatggcaagaaatggattatcggaaatactttatattctggtaattcaatactctataaggtcagaaaaaatttcactagttcgttctacaattacgtaatgaagatagatcacaaatcacacaagccattgttgtctgaaatacgattctatatatctgtattggatcctttgactatcgacaactggacacgggaacgtggtataaagtatttggctattccagatctgtatggaattggagaaaccgatgattatatgttcttcgttataaagaattcgggaagagtattcgccccaaaggatactgaatcagtcttcgaagcatgcgtcactatgataaacacgttagagtttatacactctcgaggatttacccatggaaaaatagaaccgaggaatatactgattagaaataaacgtctttcactaattgactattctagaactaacaaactatacaagagtggaaactcacatatagattacaacgaggacatgataacttcaggaaatatcaattatatgtgtgtagacaatcatcttggagcaacagtttcaagacgaggagatttagaaatgttgggatattgcatgatagaatggttcggtggcaaacttccatggaaaaacgaaagtagtataaaagtaataaaacaaaaaaaagaatataaaaaatttatagctactttctttgaggactgttttcctgaaggaaatgaacctctggaattagttagatatatagaattagtatacacgttagattattctcaaactcctaattatgacagactacgtaaactgtttatacaagattgaaattatattcttttttttatagagtgtggtagtgttacggatatctaatattaatattagactatctctatcgcgctacacgaccaatatcgattactatggatatcttctatgaaaggagagaatgtatttatttctccagcgtcaatctcgtcagtattgacaatactgtattatggagctaatggatccactgctgaacagctatcaaaatatgtagaaacggaggagaacacggataaggttagcgctcagaatatctcattcaaatccatgaataaagtatatgggcgatattctgccgtgtttaaagattcctttttgagaaaaattggcgataagtttcaaactgttgacttcactgattgtcgcactatagatgcaatcaacaagtgtgtagatatctttactgaggggaaaatcaatccactattggatgaaccattgtctcctagcaattagtgccgtatactttaaagcaaaatggttgacgccattcgaaaaggaatttaccagtgattatcccttttacgtatctccgacggaaatggtagacgtaagtatgatgtctatgtacggcaaggcatttaatcacgcatctgtaaaagaatcattcggcaacttttcaatcatagaactgccatatgttggagatactagtatgatggtcattcttccagacaagattgatggattagaatccatagaacaaaatctaacagatacaaattttaagaaatggtgtgactttatggatgctatgtttatagatgttcacattcccaagtttaaggtaacaggctcgtataatctggtggatactctagtaaagtcaggactgacagaggtgttcggttcaactggagattatagcaatatgtgtaatttagatgtgagtgtcgacgctatgatccacaaaacgtatatagatgtcaatgaagagtatacagaagcagctgcagcaacttctgtactagtggcagactgtgcatcaacaattacaaatgagttctgtgcagatcatccgttcatctatgtgattaggcatgttgatggaaaaattcttttcgttggtagatattgctctccgacaactaattgttaaccattttttttaaaaaaaatagaaaaaacatgtggtattagtgcaggtcgttgttcttccaattgcaattggtaagatgacggccaactttagtacccacgtcttttcaccacagcactgtggatgtgacagactgaccagtattgatgacgtcaaacaatgtttgactgaatatatttattggtcgtcctatgcataccgcaacaggcaatgcgctggacaattgtattccacactcctctcttttagagatgatgcggaattagtgttcatcgacattcgcgagctggtaaaaaatatgccgtgggatgatgtcaaagattgtacagaaatcatccgttgttatataccggatgagcaaaaaaccatcagagagatttcggccatcatcggactttgtgcatatgctgctacttactggggaggtgaagaccatcccactagtaacagtctgaacgcattgtttgtgatgcttgagatgctaaattacgtggattataacatcatattccggcgtatgaattgatgagttgtacatcttgacattttctttcttctcttctccctttcttctcttctcccttcctccctcttctccctttcccagaaacaaacttttttacccactataaaataaaatgagtatactacctattatatttcttcctatatttttttattcttcattcgttcagacttttaacgcgtctgaatgtatcgacaaagggcaatattttgcatcattcatggagttagaaaacgagccagtaatcttaccatgtcctcaaataaatacgctatcatccggatataatatattagatattttatgggaaaaacgaggagcggataatgatagaattataccgatagataatggtagcaatatgctaattctgaacccgacacaatcagactctggtatttatatatgcattaccacgaacgaaacctactgtgacatgatgtcgttaaatttgacaatcgtgtctgtctcagaatcaaatatagatcttatctcgtatccacaaatagtaaatgagagatctactggcgaaatggtatgtcccaatattaatgcatttattgctagtaacgtaaacgcagatattatatggagcggacatcgacgccttagaaataagagacttaaacaacggacacctggaattattaccatagaagatgttagaaaaaatgatgctggttattatacatgtgttttagaatatatatacggtggcaaaacatataacgtaaccagaattgtaaaattagaggtacgggatagaataataccttctactatgcaattaccagatggcattgtaacttcaataggtagtaatttgactattgcatgcagagtatcgttgagacctcccacaacggacaccgacgtcttttggataagtaatggtatgtattacgaagaagatgatggggacggaaacggtagaataagtgtagcaaataaaatctatatgaccgataagagacgtgttattacatcccggttaaacattaatcctgtcaaggaagaagatgctacaacgtttacgtgtatggcgtttactattcctagcatcagcaaaacagttactgttagtataacgtgaatgtatgttgttacatttccatgtcaattgagtttataagaatttttatacattatcttccaacaaacaattgacgaacgtattgctatgattaactcccacgatactatgcatattattaatcattaacttgcagactatacctagtgctattttgacatactcgtgttcttgtgtaattgcggtatctatattattaaagtacgtaaatctagctatagttttattatttaattttagataatataccgtctccttatttttaaaaattgccacatcctttattaaatcatgaatgggaatttctatgtcatcgttagtatattgtgaacaacaagagcagatatctataggaaagggtggaatgcgatacattgatctatgtagttttaaaacacacgcgaactttgaagaatttatataaatcattccatcgatacatccttctatgttgacatgtatatatccaggaattcttttattaatgtcaggaaatgtataaactaaaacattgcccgaaagcggtgcctctatctgcgttatatccgttcttaacttacaaaatgtaaccaatacctttgcatgacttgttttgttcggcaacgttagtttaaacttgacgaatggattaattacaatagcatgatccgcgcatctattaagtttttttactttaacgcccttgtatgtttttacagagactttatctaaatttctagtgcttgtatgtgttataaatataacgggatatagaaccgaatcacctaccttagatacccaattacattttatcagatccagataataaacaaattttgtcgccctaactaattctatattgttatatattttacaattggttatgatatcatgtaataacttggagtctaacgcgcatcgtcgtacgtttatacaattgtgatttagtgtagtatatctacacatgtatttttccgcactatagtattctggactagtgataaaactatcgttatatctgtcttcaatgaactcatcgagatattgctctctgtcatattcatacacctgcataaactttctagacatcttacaatccgtgttattttaggatcatatttacatatttacgggtatatcaaagatgttagattagttaatgggaatcgtctataataatgaatattaaacaattatatgaggacttttaccacaaagcatcataaaaatgagtcgtcgtctgatttatgttttaaatatcaaccgcaaatcaactcataaaatacaagagaatgaaatatatacatattttagtcattgcaatatagaccatacttctacagaacttgattttgtagttaaaaactatgatctaaacagacgacaacctgtaactgggtatactgcactacactgctatttgtataataattactttacaaacgatgtactgaagatattattaaatcatgacgtaaatgtaacgatgaaaaccagtagcggacgtatgcctgtttatatattgcttactagatgttgtaatatttcacatgatgtagtgatagatatgatagacaaagataaaaaccacttattacatagagactattccaacctattactagagtatataaaatctcgttacatgttattgaaggaagaggatatcgatgagaacatagtatccactttattagataagggaatcgatcctaactttaaacaagacggatatacagcgttacattattattatttgtgtctcgcacacgtttataaactaggtgagtgtagaaaaccgataacgataaaaaaggccaagcgaattatttctttgtttatacaacatggagctaatctaaacgcgttagataattgtggtaatacaccattccatttgtatcttagtattgaaatgtgtaataatattcatatgactaaaatgctgttgacttttaatccgaatttcaaaatatgtaataatcatggattaacgcctatactatgttatataacttccgactacatacaacacgatattcttgttatgttaatacatcactatgaaacaaatgttggagaaatgccgatagatgagcgtcgtatgatcgtattcgagtttatcaaaacatattctacacgtccggcagattcgataacttatttgatgaataggtttaaaaatataaatatttatacccgctatgaaggaaagacattattacacgtagcatgtgaatataataatacacaagtaatagattatcttatacgtatcaacggagatataaatgcgttaaccgacaataacaaacacgctacacaactcattatagataacaaagaaaattccccatataccattaattgtttactgtatatacttagatatattgtagataagaatgtgataagatcgttggtggatcaacttccatctctacctatcttcgatataaaatcatttgagaaattcatatcctactgtatacttttagatgacacattttacgataggcacgttaagaatcgcgattctaaaacgtatcgatacgcattttcaaaatacatgtcgtttgataaatacgatggtataataactaaatgtcacgacgaaacaatgttactcaaactgtccactgttctagacactacactatatgcagttttaagatgtcataattcgagaaagttaagaagatacctcaacgagttaaaaaaatataataacgataagtcctttaaaatatattctaatattatgaatgagagataccttaatgtatattataaagatatgtacgtgtcaaaggtatatgataaactatttcctgttttcacagataaaaattgtctactaacattactaccttcagaaattatatacgaaatattatacatgctgacaattaacgatctttataatatatcgtatccacctaccaaagtatagttgtatttttctcatgcgatgtgtgtaaaaaaactgatattatataaatattttagtgccgtataataaagatgacgatgaaaatgatggtacatatatatttcgtatcattattgttattgctattccacagttacgccatagacatcgaaaatgaaatcacagaattcttcaataaaatgagagatactctaccagctaaagactctaaatggttgaatccagcatgtatgttcggaggcacaatgaatgatatagccgctctaggagagccattcagcgcaaagtgtcctcctattgaagacagtcttttatcgcacagatataaagactatgtggttaaatgggagaggctagaaaagaatagacggcgacaggtttctaataaacgtgttaaacatggtgatttatggatagccaactatacatctaaattcagtaaccgtaggtatttgtgcaccgtaactacaaagaatggtgactgtgttcagggtatagttagatctcatattaaaaaacctccttcatgcattccaaaaacatatgaactaggtactcatgataagtatggcatagacttatactgtggaattctttacgcaaaacattataataatataacttggtataaagataataaggaaattaatatcgacgacattaagtattcacaaacgggaaaggaattaattattcataatccagagttagaagatagcggaagatacgactgttacgttcattacgacgacgttagaatcaagaatgatatcgtagtatcaagatgtaaaatacttacggttataccgtcacaagaccacaggtttaaactaatactagatccgaaaatcaacgtaacgataggagaacctgccaatataacatgcactgctgtgtcaacgtcattattgatcgacgatgtactgattgaatgggaaaatccatccggatggcttataggattcgattttgatgtatactctgttttaactagtagaggcggtatcaccgaggcgaccttgtactttgaaaatgttactgaagaatatataggtaatacatataaatgtcgtggacacaactattattttgaaaaaacccttacaactacagtagtattggagtaaatatacaatgcatttttatatacattactgaattattattactgaattattattactgaattattattaattatatcgtatttgtgctatagaatggatgaagatacgcgactatctaggtatttgtatctcaccgatagagaacatataaatgtagactctattaaacagttgtgtaaaatatcagatcctaatgcatgttatagatgtggatgtacggctttacatgagtacttttataattatagatcagtcaacggaaaatacaagtatagatacaacggttactatcaatattattcatctagcgattatgaaaattataatgaatattattatgatagaactggtatgaacagtgagagtgataatatatcaatcaaaacagaatatgaattctatgatgaaacacaagatcaaagtacacaactagtaggttacgacattaaactcaaaaccaatgaggatgattttatggctatgatagatcagtgggtgtccatgattatatagatgaatcaattaataaagtagtatatggaagagagtctcacgtaagatggcgggatatatggcaagaacataatgatggcgtatacagtataggaaaggagtgcatagataatatatacgaagacaaccataccgtagacgaattctacaagatagacagcgtatcagatgtagatgacgcggaacacatatctccgataactaaaaaaccatagaatcagttgatgataatacctacatttctaatcttccgtataccatcaaatacaaaatattcgagcaacaataagtattttttatacctttaaaactgataaataaattttttctagtgatattttggcaagatgagaatcctatttctcatcgctttcatgtatgggtgtgttcactcatatgttaacgcggttgaaaccaaatgtccaaatctagacattgtaacatcttctggagaatttcattgttcaggatgtgtggaacatatgcctgagtttagctatatgtattggttggcaaaggatatgaaatcggacgaggataccaagtttatagaacatctgggtgatggcatcaaagaagatgaaaccgttcgtaccacagatagtggaatcgtcactctacgtaaagtccttcatgtgactgatactaataaatttgataattataggttcacttgtgtcctcgctacgctagatggcatttataaaaagaatgtttgctgaagtagttgtgtgctactatttttatttatgatataatctaatggaattaatttgaattgatatttatccaatactaaagattatattagaatcaaattaatcttttatacgagaaaaaataacgacatacgtcgtcaacaaattaaactttttatttattagttaactagcttatagaacttgctcattgttatgtttctaaaacgggtacggcatataggacaattatccgacgcaccggtttctcttcgtgttctatgccatatattgatgcatgttatgcaaaatatatgagtacacgaatccaataaaccaaagtatctatcgttttgagtaaacaacttcatagcaaattccacattctttttctttacttactctatacacgtcctcgtatttatttagtattttgatgatatccaactcagaaatggttgttgtattattgggtgtatttggagtataggtattattagctatgtaccaatttaccaaccctcttaatattgattgataatcacatcggttatccaattaataactaaattgtagtgtatatatagaccatatatgtttctatttttttgacagttacgtatagtttcagtaagttttgattgttgtattcctgtatctctagataagttagtcatatagtcccttccggcgatacgttttttccaagcccgaaattgattagccaaatgtgtatttatttttgtgatattgatataatatttcggataatgcatactgttagtcttatatcatttggttcatctatgtattgtaatattgttacatgatctatagatgatgtattgattttggcaggatcgaattccatatccgcgactaaacagtgaaaaaaatgtaaatactttttaaattttaaattagtaaaacttttttttattttttatgattccaaaaatactgaatacaaagtcctaaattataaatatggagatcatactaccacaacttattattatgtatacaaggccggtgtaatagatagatatatataattctattacaccggcagacaattaccgaccggtatttgtcgttaccaacataccgtataatatgtaatatacaattccataacccattgacagttgttatacatcaaaattgcaattcttttgattacgatgttataagaatgtagttaattgatgtatgatgttaatgtgtcctctttcctcttataacatcgtaatcaaaaacttttttataatatatacctaataatgtgtcttaatagttctcgtgattcgtcaaacaatcattcttataaaatataataaagcaacgtaaaaacacataaaaataagcgtaactaataagacaatggatatttacgacgataaaggtctacagactattaaactgtttaataatgaatttgattgtataaggaatgacatcagagaattatttaaacatgtaactgattccgatagtatacaacttccgatggaagacaattctgatattatagaaaatatcagaaaaatactatatagacgattaaaaaatgtagaatgtgttgacatcgataacacaataacttttatgaaatacgatccaaatgatgataataagcgtacgtgttctaattgggtacccttaactaataactatatggaatattgtctagtaatatatttggaaacaccgatatgtggaggcaaaataaaattataccaccctacaggaaatataaagtcggataaggatattatgtttgcaaagactctagactttaaatcaacgaaagtgttaactggacgtaaaacaattgccgttctagacatatccgtttcatataatagatcaatgactactattcactacaacgacgacgttgatatagatatacatactgataaaaatggaaaagagttatgttattgttatataacaatagatgatcattacttggttgatgtggaaactataggagttatagtcaatagatctggaaaatgtctgttagtaaataaccatctaggtataggtatcgttaaagataaacgtataagcgatagttttggagatgtatgtatggatacaatatttgacttttctgaagcacgagagttattttcattaactaatgatgataacaggaatatagcatgggacactgataaactagacgatgatacagatatatggactcccgtcacagaagatgattacaaatttctttctagactagtattgtatgcaaaatctcaatcggatactgtatttgactattatgttcttactggtgatacggaaccacccactgtattcattttcaaggtaactagattttactttaatatgccgaaataaaaaatttttgtataatatctagaggtagaggtattgtttagataaatacaaataacatagatacatcgcatacttagcatttttataaatatacataagacatacactttatacatttttgtaaaaatactcataaaaaaatttataaaaattatggcacaaccatatcttgtataggtagtttagttcgtcgagtgaacctataaacagataatagacaacacataataatgcctactaatacaagcataataccgggagatgggatatatgacgttgtagtgtttgggttttctgaacgttgatagtctactaatactacatgctgacatctaatgcctgtataaccatgagagcatctacaatacataccgtcaatatctctagcgtggatacagtcaccgtgtaaacaatatccatctccctctggaccgcataatctgatagctggaatatctgttgtagcgtttgtaatttctggcaatgtcgtttcgatagcgttaccactatcggcgaatgatctgattatcatagcagcgaacaacaacatcagataatttatcaacatttttgatggattctgtgtttatgctgtttctcagtgtgtgtttatgacaagattgggaattttatattattaattcagtaatataaactaataatatattgttaattgtgtaaataatataaaaataacaatacaatattgaatgtgttgctgttaaaaatgtatgtgttaatataatagaataaaataaatgagtatgatcattttagataacgattgattttatcattaccgcttcattcttatattctttgcttacggaacctatatttagaaacatctactaacaattttttatgcttgcattattaatggtatgtaatatgattgattgtgtacgcaataccaatttgttaagtatgaatacggggtacaaacataaattgaaatttaacattatttatttatgatatatatcgttatcgttaggtctataccatggatatctttaaagaactaatcttaaaacaccctgatgaaaatgttttgatttctccagtttccattttatctactttatctattctaaatcatggagcagctggttctacagctgaacaactatcaaaatatatagagaatatgaatgagaatacacccgatgacaataatgatgacatggaggtagatattccgtattgtgcgacactagctaccgcaaataaaatatacggtagcgatagtatcgagttccacgcctccttcctacaaaaaataaaagacgattttcaaactgtaaactttaataatgctaaccaaacaaaggaactaatcaacgaatgggttaagacaatgacaaatggtaaaattaattccttattgactagtccgctatccattaatactcgtatgacagttgttagcgccgtccattttaaagcaatgtggaaatatccattttctaaacatcttacatatacagacaagttttatatttctaagaatatagttaccagcgttgatatgatggtgggtaccgagaataacttgcaatatgtacatattaatgaattattcggaggattctctattatcgatattccatacgagggaaactctagtatggtaattatactaccggacgacatagaaggtatatataacatagaaaaaaatataacagatgaaaaatttaaaaaatggtgtggtatgttatctactaaaagtatagacttgtatatgccaaagtttaaagtggaaatgacagaaccgtataatctggtaccgattttagaaaatttaggacttactaatatattcggatattatgcagattttagcaagatgtgtaatgaaactatcactgtagaaaaatttctacatacgacgtttatagatgttaatgaggagtatacagaagcatcggccgttacaggagtatttacgattaacttttcgatggtatatcgtacgaaggtctacataaaccatccattcatgtacatgattaaagacaccacaggacgtatactttttatagggaaatactgctatccgcaataaatataaacaaatagacttttataaagagtcttcaacgataagtatatcgacatactacttatgctgcgaaagattctgaacgagaacgactatctcaccctcttggatcatatccgcactgctaaatactaaatctccactacactttttatcatcttatgaggaatgattgccttcgtgaaataggaataattagcaccagaatagctatggattattgtggtagagagtgcactattctatgtcgtctactggatgaagatgtgacgtacaaaaaaataaaactagaaattgaaacgtgtcacaacttatcaaaacatatagatagacgaggaaacaatgcgctacattgttacgtctccaataaatgcgatacagacattaagattgttctctcgcggagtcgagagactttgtagaaacaacgaaggattaactccgctaggagtatacagtaagcatagatacgtaaaatctcagattgtgcatctactgatatccagctattcaaattcctctaacgaactcaagtcgaatataaatgatttcgatctgtattcggataatatcgacttacgtctgctaaaatacctaattgtggataaacggatacgtccgtccaagaatacgaattatgcaatcaatggtctcggattggtggatatatacgtaacgacgcctaatccgagaccagaagtattgctatggcttcttaaatcagaatgttacagcaccggttacgtatttcgtacctgtatgtacgacagtgatatgtgtaagaactctcttcattactatatatcgtctcatagagaatctcaatctctatccaaggatgtaattaaatgtttgatcgataacaatgtttccatccatggcagagacgaaggaggatctttacccatccaatactactggtctttctcaaccatagatatagagattgttaaattattattaataaaggatgtggacacgtgtagagtatacgacgtcagccctatattagaggcgtattatctaaacaagcgatttagagtaaccccatataatgtagacatggaaatcgttaatcttcttattgagagacgtcatactcttgtcgacgtaatgcgtagtattacttcgtacgattccagagaatataaccactacatcatcgataacattctaaagagatttagacaacaggatgaatccatcgtacaagccatactgataaactacttacattacggcgatatggtcgttcgatgcatgttagataacggacaacaactatcctctacacgactactttgttaataataatctcgtcgatgtaaacgtcgtaaggtttatcgtggaaaatatggacacgcggctgtaaatcacgtatcgaacaatggccgtctatgtatgtacggtctgatattatcgagatttaataattgcgggtatcactgttatgaaaccatactgatagatgtatttgatatactaagcaagtacatggatgatatagatatgatcgataactctactatattacgcggtcgatgtcaataatatacaatttgcaaagcggttattggaatatggagcgagtatcacgctcgataatcaatacggccatccagaaaagcagttacagaagagaaaacaaaacgaaatcgttgttctacaagatgtctctccctacgacgattactacgtaaaaaagatactagcctactgcctattaagggacgagtcattcgcggaactacatagtaaattctgtttaaacgaggactataaaagtgtatttatgaaaaatatatcattcgataagatagattccatcatcgtgacataagtcgcctcaaagagattcgaatctccgacaccgacctgtatacggtatcacagctatcttaaagccatacattcagacagtcacatttcatttcccatgtacgacgatctcatagaacagtgccatctatcgatggagcgtaaaagtaaactcgtcgacaaagcactcaataaattagagtctaccatcggtcaatctagactatcgtatttgcctccggaaattatgcgcaatatcatctaaacagtatgttgtacggaaagaaccattacaaatattatccatgatagaaagaaaatatctatatgattggagaagtaggaaacaggaacaagacaacgattactacattattaaatcatgaagtccgtattatactcgtatatattgtttctctcatgtataataataaacggaagagatatagcaccgcatgcaccatccgatggaaagtgtaaagacaacgaatacaaacgccataatttgtgtccgggaacatacgcttccagattatgcgatagcaagactaacacacgatgtacgccgtgtggttcgggtaccttcacatctcgcaataatcatttacccgcttgtctaagttgtaacggaagacgcgatcgtgtaacacgactcacaatagaatctgtgaatgctctcccggatattattgtcttctcaaaggatcatccggatgcaaggcatgtgtttcccaaacaaaatgtggaataggatacggagtatccggagacgtcatctgttctccgtgtggtctcggaacatattctcacaccgtctcttccgcagataaatgcgaacccgtacccagaaatacgtttaactatatcgatgtggaaattaacctgtatccagttaacgacacgtcgtgtactcggacgaccactaccggtctcagcgaatccatctcaacgtcggaactaactattactatgaatcataaagactgtaatcccgtatttcgtgatggatacttctccgttcttaataaggtagcgacttcaggtttctttacaggagaaaggtgtgcactctgaatttcgagattaaatgcaataacaaagattcttcctccaaacagttaacgaaagcaaagaatgatactatcatgccgcattcggagacagtaactctagtgggcgacatctatatactatatagtaataccaatactcaagactacgaaactgatacaatctcttatcatgtgggtaatgttctcgatgtcgatagccatatgcccggtagttgcgatatacataaactgatcactaattccaaacccacccactttttatagtaagtttttcacccataaataataaatacaataattaatttctcgtaaaagtagaaaatatattctaatttattgcacggtaaggaagtagaatcataaagaacagtactcaatcaatagcaattatgaaacaatatatcgtcctggcatgcatgtgcctggcggcagctgctatgcctgccagtcttcagcaatcatcctcatcctcctcctcgtgtacggaagaagaaaacaaacatcatatgggaatcgatgttattatcaaagtcacaaagcaagaccaaacaccgaccaatgataagatttgccaatccgtaacggaaattacagagtccgagtcagatccagatcccgaggtggaatcagaagatgattccacatcagtcgaggatgtagatcctcctaccacttattactccatcatcggtggaggtctgagaatgaactttggattcaccaaatgtcctcagattaaatccatctcagaatccgctgatggaaacacagtgaatgctagattgtccagcgtgtccccaggacaaggtaaggactctcccgcgatcactcatgaagaagctcttgctatgatcaaagactgtgaagtgtctatcgacatcagatgtagcgaagaagagaaagacagcgacatcaagacccatccagtactcgggtctaacatctctcataagaaagtgagttacgaagatatcatcggttcaacgatcgtcgatacaaaatgcgtcaagaatctagagtttagcgttcgtatcggagacatgtgcaaggaatcatctgaacttgaggtcaaggatggattcaagtatgtcgacggatcggcatctgaaggtgcaaccgatgatacttcactcatcgattcaacaaaactcaaagcgtgtgtctgaatcgataactctattcatctgaaattggatgagtagggttaatcgaacgattcaggcacaccacgaattaaaaaagtgtaccggacactatattccggtttgcaaaacaaaaatgttcttaactacattcacaaaaagttacctctcgcgacttcttctttttctgtctcaatagtgtgatacgattatgacactattcctattcctattcctatttcctttcagagtatcacaaaaatattaaacctctttctgatggtctcataaaaaaagttttacaaaaatatttttattctctttctctctttgatggtctcataaaaaaagttttacaaaaatatttttattctctttctctctttgatggtctcataaaaaaagttttacaaaaatatttttattctctttctctctttgatggtctcataaaaaaagttttacaaaaatatttttattctctttctctctttgatggtctcataaaaaaagttttacaaaaatatttttattctctttctctctttgatggtctcataaaaaaagttttacaaaaatatttttattctctttctctctttgatggtctcataaaaaaagttttacaaaaatatttttattctctttctctctttgatggtctcataaaaaaagttttacaaaaatatttttattctctttctctctttgatggtctcataaaaaaagttttacaaaaatatttttattctctttctctctttgatggtctcataaaaaaagttttacaaaaatatttttattctctttctctctttgatggtctcataaaaaaagttttacaaaaatatttttattctctttctctctttgatggtctcataaaaaaagttttacaaaaatatttttattctctttctctctttgatggtctcataaaaaagttttacaaaaatatttttattctctttctctctttgatggtctcataaaaaagttttacaaaaatatttttattctctttctctctttgatggtctcataaaaaaagttttacaaaaatatttttattctctttctctctttgatggtctcataa

SEQ ID NO: 70 - DNA, 196227 bp, Artificial Sequence
  GLV-1h327 (SEL-mTyr)
ttatgagaccatcaaagagagaaagagaataaaaatatttttgtaaaactttttttatgagaccatcaaagagagaaagagaataaaaatatttttgtaaaacttttttatgagaccatcaaagagagaaagagaataaaaatatttttgtaaaacttttttatgagaccatcaaagagagaaagagaataaaaatatttttgtaaaactttttttatgagaccatcaaagagagaaagagaataaaaatatttttgtaaaactttttttatgagaccatcaaagagagaaagagaataaaaatatttttgtaaaactttttttatgagaccatcaaagagagaaagagaataaaaatatttttgtaaaactttttttatgagaccatcaaagagagaaagagaataaaaatatttttgtaaaactttttttatgagaccatcaaagagagaaagagaataaaaatatttttgtaaaactttttttatgagaccatcaaagagagaaagagaataaaaatatttttgtaaaactttttttatgagaccatcaaagagagaaagagaataaaaatatttttgtaaaactttttttatgagaccatcaaagagagaaagagaataaaaatatttttgtaaaactttttttatgagaccatcaaagagagaaagagaataaaaatatttttgtaaaactttttttatgagaccatcaaagagagaaagagaataaaaatatttttgtaaaactttttttatgagaccatcaaagagagaaagagaataaaaatatttttgtaaaactttttttatgagaccatcagaaagaggtttaatatttttgtgatactctgaaaggaaataggaataggaataggaatagtgtcataatcgtatcacactattgagacagaaaaagaagaagtcgcgagaggtaactttttgtgaatgtagttaagaacatttttgttttgcaaaccggaatatagtgtccggtacacttttttaattcgtggtgtgcctgaatcgttcgattaaccctactcatccaatttcagatgaatagagttatcgattcagacacacgctttgagttttgttgaatcgatgagtgaagtatcatcggttgcaccttcagatgccgatccgtcgacatacttgaatccatccttgacctcaagttcagatgattccttgcacatgtctccgatacgaacgctaaactctagattcttgacgcattttgtatcgacgatcgttgaaccgatgatatcttcgtaactcactttcttatgagagatgttagacccgagtactggatgggtcttgatgtcgctgtctttctcttcttcgctacatctgatgtcgatagacacttcacagtctttgatcatagcaagagcttcttcatgagtgatcgcgggagagtccttaccttgtcctggggacacgctggacaatctagcattcactgtgtttccatcagcggattctgagatggatttaatctgaggacatttggtgaatccaaagttcattctcagacctccaccgatgatggagtaataagtggtaggaggatctacatcctcgactgatgtggaatcatcttctgattccacctcgggatctggatctgactcggactctgtaatttccgttacggattggcaaatcttatcattggtcggtgtttggtcttgctttgtgactttgataataacatcgattcccatatgatgtttgttttcttcttccgtacacgaggaggaggatgaggatgattgctgaagactggcaggcatagcagctgccgccaggcacatgcatgccaggacgatatattgtttcataattgctattgattgagtactgttctttatgattctacttccttaccgtgcaataaattagaatatattttctacttttacgagaaattaattattgtatttattatttatgggtgaaaaacttactataaaaagtgggtgggtttggaattagtgatcagtttatgtatatcgcaactaccgggcatatggctatcgacatcgagaacattacccacatgataagagattgtatcagtttcgtagtcttgagtattggtattactatatagtatatagatgtcgcccactagagttactgtctccgaatgcggcatgatagtatcattctttgctttcgttaactgtttggaggaagaatctttgttattgcatttaatctcgaaattcagagtgcacacctttctcctgtaaagaaacctgaagtcgctaccttattaagaacggagaagtatccatcacgaaatacgggattacagtctttatgattcatagtaatagttagttccgacgttgagatggattcgctgagaccggtagtggtcgtccgagtacacgacgtgtcgttaactggatacaggttaatttccacatcgatatagttaaacgtatttctgggtacgggttcgcatttatctgcggaagagacggtgtgagaatatgttccgagaccacacggagaacagatgacgtctccggatactccgtatcctattccacattttgtttgggaaacacatgccttgcatccggatgatcctttgagaagacaataatatccgggagagcattcacagattctattgtgagtcgtgttacacgatcgcgtcttccgttacaacttagacaagcgggtaaatgattattgcgagatgtgaaggtacccgaaccacacggcgtacatcgtgtgttagtcttgctatcgcataatctggaagcgtatgttcccggacacaaattatggcgtttgtattcgttgtctttacactttccatcggatggtgcatgcggtgctatatctcttccgtttattattatacatgagagaaacaatatatacgagtataatacggacttcatgatttaataatgtagtaatcgttgtcttgttcctgtttcctacttctccaatcatatagatattttctttctatcatggataatatttgtaatggttctttccgtacaacatactgtttagatgatattgcgcataatttccggaggcaaatacgatagtctagattgaccgatggtagactctaatttattgagtgctttgtcgacgagtttacttttacgctccatcgatagatggcactgttctatgagatcgtcgtacatgggaaatgaaatgtgactgtctgaatgtatggctttaagatagctgtgataccgtatacaggtcggtgtcggagattcgaatctctttgaggcgacttatgtcacgatgatggaatctatcttatcgaatgatatatttttcataaatacacttttatagtcctcgtttaaacagaatttactatgtagttccgcgaatgactcgtcccttaataggcagtaggctagtatcttttttacgtagtaatcgtcgtagggagagacatcttgtagaacaacgatttcgttttgttttctcttctgtaactgcttttctggatggccgtattgattatcgagcgtgatactcgctccatattccaataaccgctttgcaaattgtatattattgacatcgaccgcgtaatatagtagagttatcgatcatatctatatcatccatgtacttgcttagtatatcaaatacatctatcagtatggtttcataacagtgatacccgcaattattaaatctcgataatatcagaccgtacatacatagacggccattgttcgatacgtgatttacagccgcgtgtccatattttccacgataaaccttacgacgtttacatcgacgagattattattaacaaagtagtcgtgtagaggatagttgttgtccgttatctaacatgcatcgaacgaccatatcgccgtaatgtaagtagtttatcagtatggcttgtacgatggattcatcctgttgtctaaatctctttagaatgttatcgatgatgtagtggttatattctctggaatcgtacgaagtaatactacgcattacgtcgacaagagtatgacgtctctcaataagaagattaacgatttccatgtctacattatatggggttactctaaatcgcttgtttagataatacgcctctaatatagggctgacgtcgtatactctacacgtgtccacatcctttattaataataatttaacaatctctatatctatggttgagaaagaccagtagtattggatgggtaaagatcctccttcgtctctgccatggatggaaacattgttatcgatcaaacatttaattacatccttggatagagattgagattctctatgagacgatatatagtaatgaagagagttcttacacatatcactgtcgtacatacaggtacgaaatacgtaaccggtgctgtaacattctgatttaagaagccatagcaatacttctggtctcggattaggcgtcgttacgtatatatccaccaatccgagaccattgattgcataattcgtattcttggacggacgtatccgtttatccacaattaggtattttagcagacgtaagtcgatattatccgaatacagatcgaaatcatttatattcgacttgagttcgttagaggaatttgaatagctggatatcagtagatgcacaatctgagattttacgtatctatgcttactgtatactcctagcggagttaatccttcgttgtttctacaaagtctctcgactccgcgagagaacaatcttaatgtctgtatcgcatttattggagacgtaacaatgtagcgcattgtttcctcgtctatctatatgttttgataagttgtgacacgtttcaatttctagttttatttttttgtacgtcacatcttcatccagtagacgacatagaatagtgcactctctaccacaataatccatagctattctggtgctaattattcctatttcacgaaggcaatcattcctcataagatgataaaaagtgtagtggagatttagtatttagcagtgcggatatgatccaagagggtgagatagtcgttctcgttcagaatctttcgcagcataagtagtatgtcgatatacttatcgttgaagactctttataaaagtctatttgtttatatttattgcggatagcagtatttccctataaaaagtatacgtcctgtggtgtctttaatcatgtacatgaatggatggtttatgtagaccttcgtacgatataccatcgaaaagttaatcgtaaatactcctgtaacggccgatgcttctgtatactcctcattaacatctataaacgtcgtatgtagaaatttttctacagtgatagtttcattacacatcttgctaaaatctgcataatatccgaatatattagtaagtcctaaattttctaaaatcggtaccagattatacggttctgtcatttccactttaaactttggcatatacaagtctatacttttagtagataacataccacaccattttttaaatttttcatctgttatatttttttctatgttatatataccttctatgtcgtccggtagtataattaccatactagagtttccctcgtatggaatatcgataatagagaatcctccgaataattcattaatatgtacatattgcaagttattctcggtacccaccatcatatcaacgctggtaactatattcttagaaatataaaacttgtctgtatatgtaagatgtttagaaaatggatatttccacattgctttaaaatggacggcgctaacaactgtcatacgagtattaatggatagcggactagtcaataaggaattaattttaccatttgtcattgtcttaacccattcgttgattagttcctttgtttggttagcattattaaagtttacagtttgaaaatcgtcttttattttttgtaggaaggaggcgtggaactcgatactatcgctaccgtatattttatttgcggtagctagtgtcgcacaatacggaatatctacctccatgtcatcattattgtcatcgggtgtattctcattcatattctctatatattttgatagttgttcagctgtagaaccagctgctccatgatttagaatagataaagtagataaaatggaaactggagaaatcaaaacattttcatcagggtgttttaagattagttctttaaagatatccatggtatagacctaacgataacgatatatatcataaataaataatgttaaatttcaatttatgtttgtaccccgtattcatacttaacaaattggtattgcgtacacaatcaatcatattacataccattaataatgcaagcataaaaaattgttagtagatgtttctaaatataggttccgtaagcaaagaatataagaatgaagcggtaatgataaaatcaatcgttatctaaaatgatcatactcatttattttattctattatattaacacatacatttttaacagcaacacattcaatattgtattgttatttttatattatttacacaattaacaatatattattagtttatattactgaattaataatataaaattcccaatcttgtcataaacacacactgagaaacagcataaacacagaatccatcaaaaatgttgataaattatctgatgttgttgttcgctgctatgataatcagatcattcgccgatagtggtaacgctatcgaaacgacattgccagaaattacaaacgctacaacagatattccagctatcagattatgcggtccagagggagatggatattgtttacacggtgactgtatccacgctagagatattgacggtatgtattgtagatgctctcatggttatacaggcattagatgtcagcatgtagtattagtagactatcaacgttcagaaaacccaaacactacaacgtcatatatcccatctcccggtattatgcttgtattagtaggcattattatgtgttgtctattatctgtttataggttcactcgacgaactaaactacctatacaagatatggttgtgccataatttttataaatttttttatgagtatttttacaaaaatgtataaagtgtatgtcttatgtatatttataaaaatgctaagtatgcgatgtatctatgttatttgtatttatctaaacaatacctctacctctagatattatacaaaaattttttatttcggcatattaaagtaaaatctagttaccttgaaaatgaatacagtgggtggttccgtatcaccagtaagaacataatagtcaaatacagtatccgattgagattttgcatacaatactagtctagaaagaaatttgtaatcatcttctgtgacgggagtccatatatctgtatcatcgtctagtttatcagtgtcccatgctatattcctgttatcatcattagttaatgaaaataactctcgtgcttcagaaaagtcaaatattgtatccatacatacatctccaaaactatcgcttatacgtttatctttaacgatacctatacctagatggttatttactaacagacattttccagatctattgactataactcctatagtttccacatcaaccaagtaatgatcatctattgttatataacaataacataactcttttccatttttatcagtatgtatatctatatcaacgtcgtcgttgtagtgaatagtagtcattgatctattatatgaaacggatatgtctagaacggcaattgttttacgtccagttaacactttcgttgatttaaagtctagagtctttgcaaacataatatccttatccgactttatatttcctgtagggtggtataattttattttgcctccacatatcggtgtttccaaatatattactagacaatattccatatagttattagttaagggtacccaattagaacacgtacgcttattatcatcatttggatcgtatttcataaaagttattgtgttatcgatgtcaacacattctacattttttaatcgtctatatagtatttttctgatattttctataatatcagaattgtcttccatcggaagttgtatactatcggaatcagttacatgtttaaataattctctgatgtcattccttatacaatcaaattcattattaaacagtttaatagtctgtagacctttatcgtcgtaaatatccattgtcttattagttacgcttatttttatgtgtttttacgttgctttattatattttataagaatgattgtttgacgaatcacgagaactattaagacacattattaggtatatattataaaaaagtttttgattacgatgttataagaggaaagaggacacattaacatcatacatcaattaactacattcttataacatcgtaatcaaaagaattgcaattttgatgtataacaactgtcaatgggttatggaattgtatattacatattatacggtatgttggtaacgacaaataccggtcggtaattgtctgccggtgtaatagaattatatatatctatctattacaccggccttgtatacataataataagttgtggtagtatgatctccatatttataatttaggactttgtattcagtatttttggaatcataaaaaataaaaaaaagttttactaatttaaaatttaaaaagtatttacatttttttcactgtttagtcgcggatatggaattcgatcctgccaaaatcaatacatcatctatagatcatgtaacaatattacaatacatagatgaaccaaatgatataagactaacagtatgcattatccgaaatattatatcaatatcacaaaaataaatacacatttggctaatcaatttcgggcttggaaaaaacgtatcgccggaagggactatatgactaacttatctagagatacaggaatacaacaatcaaaacttactgaaactatacgtaactgtcaaaaaaatagaaacatatatggtctatatatacactacaatttagttattaattggataaccgatgtgattatcaatcaatattaagagggttggtaaattggtacatagctaataatacctatactccaaatacacccaataatacaacaaccatttctgagttggatatcatcaaaatactaaataaatacgaggacgtgtatagagtaagtaaagaaaaagaatgtggaatttgctatgaagttgtttactcaaaacgatagatactttggtttattggattcgtgtactcatatattttgcataacatgcatcaatatatggcatagaacacgaagagaaaccggtgcgtcggataattgtcctatatgccgtacccgttttagaaacataacaatgagcaagttctataagctagttaactaataaataaaaagtttaatttgttgacgacgtatgtcgttattttttctcgtataaaagattaatttgattctaatataatctttagtattggataaatatcaattcaaattaattccattagattatatcataaataaaaatagtagcacacaactacttcagcaaacattctttttataaatgccatctagcgtagcgaggacacaagtgaacctataattatcaaatttattagtatcagtcacatgaaggactttacgtagagtgacgattccactatctgtggtacgaacggtttcatcttctttgatgccatcacccagatgttctataaacttggtatcctcgtccgatttcatatcctttgccaaccaatacatatagctaaactcaggcatatgttccacacatcctgaacaatgaaattctccagaagatgttacaatgtctagatttggacatttggtttcaaccgcgttaacatatgagtgaacacacccatacatgaaagcgatgagaaataggattctcatcttgccaaaatatcactagaaaaaatttatttatcagttttaaaggtataaaaaatacttattgttgctcgaatattttgtatttgatggtatacggaagattagaaatgtaggtattatcatcaactgattctatggttttatgtattctatcatgtttcactattgcgttggaaataatatcatatgcttccacatatattttattttgttttaactcataatactcacgtaattctggattattggcatatctatgaataattttagctccatgatcagtaaatattaatgagaacatagtattaccacctaccattatttttttcatctcattcaattcttaattgcaaagatctatataatcattatagcgttgacttatggactctggaatcttagacgatgtacagtcatctataatcatggcatatttaatacattgttttatagcatagtcgttatctacgatgttagatatttctctcaatgaatcaatcacacaatctaatgtaggtttatgacataatagcattttcagcagttcaatgtttttagattcgttgatggcaatggctatacatgtatatccgttatttgatctaatgttgacatctgaaccggattctagcagtaaagatactagagattgtttattatatctaacagccttgtgaagaagtgtttctcctcgtttgtcaatcatgttaatgtctttaagataaggtaggcaaatgtttatagtactaagaattgggcaagcataagacatgtcacaaagacccttttttgtatgtataagtgtaaaaattataacatccatagttggatttacataggtgtccaatcgggatctctccatcatcgagataattgatggcatctcccttccttttttagtagatatttcatcgtgtaagaatcaatattaatatttctaaagtatccgtgtatagcctctttatttaccacagctccatattccactagagggatatcgccgaatgtcatatactcaattagtatatgttggaggacatccgagttcattgttttcaatatcaaagagatggtttccttatcatttctccatagtggtacaatactacacattattccgtgcggctttccattttccaaaaacaatttgaccaaatctaaatctacatctttattgtatctataatcactatttagataatcagccataattcctcgagtgcaacatgttagatcgtctatatatgaataagcagtgttatctattcctttcattaacaatttaacgatgtctatatctatatgagatgacttaatataatattgaagagctgtacaatagtttttatctataaaagacggcttgattccgtgattaattagacatttaacaacttccggacgcacatatgctctcgtatccgactctgaatacagatgagagatgatatacagatgcaatacggtaccgcaatttcgtagttgataatcatcatacgcgtatcagtactcgtcctcataaagaacactgcagccattttctatgaacaaatcaataattttagaaacaggatcattgtcattacataattttctataactgaacgatggttttcacatttaacactcaagtcaaatccatgttctaccaacacctttatcaagtcaacgtctacatttttggatttcatatagctgaatatattaaagttatttatgttgctaaatccagtggcttctagtagagccatcgctatatccttattaactttaacatgtctactatttgtgtattcttctaatggggtaagctgtctccaatttttgcgtaatggattagtgccactgtctagtagtagtttgacgacctcgacattattacaatgctcattaaaaaggtatgcgtgtaaagcattattcttgaattggttcctggtatcattaggatctctgtctttcaacatctgtttaagttcatcaagagccacctcctcattttccaaatagtcaaacattttgactgaatgagctactgtgaactctatacacccacacaactaatgtcattaaatatcatgtcaaaaacttgtacaattattaataaaaataatttagtgtttaaattttaccagttccagattttacacctccgttaatacctccattaaccccactggacgatcctcctccccacattccaccgccaccagatgtataagttttagatcctttattactaccatcatgtccatggataaagacactccacatgccgccactaccccctttagaagacatattaataagacttaaggacaagtttaacaataaaattaatcacgagtaccctactaccaacctacactattatatgattatagtttctatttttacagtaccttgactaaagtttctagtcacaagagcaatactaccaacctacactattatatgattatagtttctatttttataggaacgcgtacgagaaaatcaaatgtctaatttctaacggtagtgttgataaacgattgttatccgcggatacctcctctatcatgtcgtctattttcttactttgttctattaacttattagcattatatattatttgattataaaacttatattgcttattagcccaatctgtaaatatcggattattaacatatcgtttctttgtaggtttatttaacatgtacatcactgtaagcatgtccttaccatttattttaatttgacgcatatccgcaatttctttttcgcagtcggttataaattctatatatgatggatacatgctacatgtgtacttataatcgactaatatgaagtacttgatacatattttcagtaacgatttattattaccacctatgaataagtacctgtgatcgtctaggtaatcaactgttttcttaatacattcgatggttggtaatttactcagaataatttccaatatcttaatatataattctgctatttctgggatatatttatctgccagtataacacaaatagtaatacatgtaaacccatattttgttattatattaatgtctgcgccattatctattaaccattctactaggctgacactatgcgactcaatacaatgataaagtatactacatccatgtttatctattttgtttatatcatcaatatacggcttacaaagttttagtatcgataacacatccaactcacgcatagagaaggtagggaataatggcataatatttattaggttatcatcattgtcattatctacaactaagtttccattttttaaaatatactcgacaactttaggatctctattgccaaatttttgaaaatatttatttatatgcttaaatctatataatgtagctccttcatcaatcatacatttaataacattgatgtatactgtatgataagatacatattctaacaatagatcttgtatagaatctgtatatcttttaagaattgtggatattaggatattattacataaactattacacaattctaaaatataaaacgtatcacggtcgaataatagttgatcaactatataattatcgattttgtgatttttcttcctaaactgtttacgtaaatagttagatagaatattcattagttcatgaccactatagttactatcgaataacgcgtcaaatatttcccgtttaatatcgcatttgtcaagataataatagagtgtggtatgttcacgataagtataataacgcatctctttttcgtgtgaaattaaatagtttattacgtccaaagatgtagcataaccatcttgtgacctagtaataatataataatagagaactgttttacccattctatcatcataatcagtggtgtagtcgtaatcgtaatcgtctaattcatcatcccaattataatattcaccagcacgtctaatctgttctattttgatcttgtatccatactgtatgttgctacatgtaggtattcctttatccaataatagtttaaacacatctacattgggatttgatgttgtagcgtatttttctacaatattaataccatttttgatactatttatttctatacctttcgaaattagtaatttcaataagtctatattgatgttatcagaacatagatattcgaatatatcaaaatcattgatatttttatagtcgactgacgacaataacaaaatcacaacatcgtttttgatattattatttttcttggtaacgtatgcctttaatggagtttcaccatcatactcatataatggatttgcaccactttctatcaatgattgtgcactgctggcatcgatgttaaatgttttacaactatcatagagtatcttatcgttaaccatgattggttgttgatgctatcgcattttttggtttctttcatttcagttatgtatggatttagcacgtttgggaagcatgagctcatatgatttcagtactgtagtgtcagtactattagtttcaataagatcaatctctagatctatagaatcaaaacacgataggtcagaagataatgaatatctgtaggcttcttgttgtactgtaacttctggttttgttagatggttgcatcgtgctttaacgtcaatggtacaaattttatcctcgctttgtgtatcatattcgtccctactataaaattgtatattcagattatcatgcgatgtgtatacgctaacggtatcaataaacggagcacaccatttagtcataaccgtaatccaaaaatttttaaagtatatcttaacgaaagaagttgtgtcattgtctacggtgtatggtactagatcctcataagtgtatatatctagagtaatgtttaatttattaaatggttgataatatggatcctcgtgacaatttccgaagatggaaataagacataaacacgcaataaatctaattgcggacatggttactccttaaaaaaatacgaataatcaccttggctatttagtaagtgtcatttaacactatactcatattaatccatggactcataatctctatacgggattaacggatgttctatatacggggatgagtagttctcttctttaactttatactttttactaatcatatttagactgatgtatgggtaatagtgtttgaagagctcgttctcatcatcagaataaatcaatatctctgtttttttgttatacagatgtattacagcctcatatattacgtaatagaacgtgtcatctaccttattaactttcaccgcatagttgtttgcaaatacggttaatcctttgacctcgtcgatttccgaccaatctgggcgtataatgaatctaaactttaattgcttgtaatcattcgaaataatttttagtttgcatccgtagttatcccctttatgtaactgtaaatttctcaacgcgatatctccattaataatgatgtcgaattcgtgctgtatacccatactgaatggatgaacgaataccgacggcgttaatagtaatttactttttcatctttacatattgggtactagttttactatcataagtttataaattccacaagctactatggaataagccaaccatcttagtataccacacatgtcttaaagtttattaattaattacatgttgttttatatatatcgctacgaatttaaagagaaattagtttaggaagaaaaattatctatctacatcatcacgtctctgtattctacgatagagtgctactttaagatgcgacagatccgtgtcatcaaatatatactccattaaaatgattattccggcagcgaacttgatattggatatatcacaacctttgttaatatctacgacaatagacagcagtcccatggttccataaacagtgagtttatctttctttgaagagatattttgtagagatcttataaaactgtcgaatgacatcgcatttatatctttagctaaatcgtatatgttaccatcgtaatatctaaccgcgtctatcttaaacgtttccatcgctttaaagacgtttccgatagatggtctcatttcatcagtcatactgagccaacaaatataatcgtgtataacatctttgatagaatcagactctaaagaaaacgaatcggctttattatacgcattcatgataaacttaatgaaaaatgtttttcgttgtttaagttggatgaatagtatgtcttaataattgttattatttcattaattaatatttagtaacgagtacactctataaaaacgagaatgacataactaatcataactagttatcaaagtgtctaggacgcgtaattttcatatggtatagatcctgtaagcattgtctgtattctggagctattttctctatcgcattagtgagttcagaatatgttataaatttaaatcgaataacgaacataactttagtaaagtcgtctatattaactcttttattttctagccatcgtaataccatgtttaagatagtatattctctagttactacgatctcatcgttgtctagaatatcacatactgaatctacatccaattttagaaattggtctgtgttacatatctcttctatattattgttgatgtattgtcgtagaaaactattacgtagaccattttctttataaaacgaatatatagtactccaattatctttaccgatatatttgcacacataatccattctctcaatcactacatctttaagattttcgttgttaagatatttggctaaactatataattctattagatcatcaacagaatcagtatatatttttctagatccaaagacgaactctttggcgtcctctataatattcccagaaaagatattttcgtgttttagtttatcgagatctgatctgttcatatacgccatgattgtacggtacgttatgataaccgcataaaataaaaatccattttcatttttaaccaatactattcataattgagattgatgtaatactttgttactttgaacgtaaagacagtacacggatccgtatctccaacaagcacgtagtaatcaaatttggtgttgttaaacttcgcaatattcatcaatttagatagaaacttatactcatcatctgttttaggaatccatgtattattaccactttccaacttatcattatcccaggctatgtttcgtccatcatcgttgcgcagagtgaataattcttttgtattcggtagttcaaatatatgatccatgcatagatcggcaaagctattgtagatgtgatttttcctaaatctaatataaaactcgtttactagcaaacactttcctgatttatcgaccaagacacatatggtttctaaatctatcaagtggtggggatccatagttatgacgcagtaacatatattattacattcttgactgtcgctaatatctaaatatttattgttatcgtattggattctgcatatagatggcttgtatgtcaaagatatagaacacataaccaatttatagtcgcgctttacattctcgaatctaaagttaagagatttagaaaacattatatcctcggatgatgttatcactgtttctggagtaggatatattaaagtctttacagatttcgtccgattcaaataaatcactaaataatatcccacattatcatctgttagagtagtatcattaaatctattatattttatgaaagatatatcactgctcacctctatatttcgtacatttttaaactgtttgtataatatctctctgatacaatcagatatatctattgtgtcggtagacgataccgttacatttgaattaatggtgttccattttacaacttttaacaagttgaccaattcatttctaatagtatcaaactctccatgattaaatattttaatagtatccattttatatcactacggacacaaagtagctgacataaaccattgtataatttttatgttttatgtttattagcgtacacattttggaagttccggcttccatgtatttcctggagagcaagtagatgatgaggaaccagatagtttatatccgtacttgcacttaaagtctacattgtcgttgtatgagtatgatcttttaaacccgctagacaagtatccgtttgatattgtaggatgtggacatttaacaatctgacacgtgggtggatcggaccattctcctcctgaacacaggacactagagttaccaatcaacgaatatccactattgcaactataagttacaacgctcccatcggtataaaaatcctcgtatccgttatgtcttccgttggatatagatggaggggattggcatttaacagattcacaaataggtgcctcgggattccataccatagatccagtagatcctaattcacaatacgatttagattcaccgatcaactgatatccgctattacaagagtacgttatactagagccaaagtctactccaccaatatcaagttggccattatcgatatctcgaggcgatgggcatctccgtttaatacattgattaaagagtgtccatccagtacctgtacatttagcatatataggtcccattttttgctttctgtatccaggtagacatagatattctatagtgtctcctatgttgtaattagcattagcatcagtctccacactattcttaaatttcatattaatgggtcgtgacggaatagtacagcatgatagaacgcatcctattcccaacaatgtcaggaacgtcacgctctccaccttcatatttatttatccgtaaaaatgttatcctggacatcgtacaaataataaaaagcccatatatgttcgctattgtagaaattgtttttcacagttgctcaaaaacgatggcagtgacttatgagttacgttacactttggagtctcatctttagtaaacatatcataatattcgatattacgagttgacatatcgaacaaattccaagtatttgattttggataatattcgtattttgcatctgctataattaagatataatcaccgcaagaacacacgaacatctttcctacatggttaaagtacatgtacaattctatccatttgtcttccttaactatatatttgtatagataattacgagtctcgtgagtaattccagtaattacatagatgtcgccgtcgtactctacagcataaactatactatgatgtctaggcatgggagacttttttatccaacgatttttagtgaaacattccacatcgtttaatactacatatttctcatacgtggtataaactccacccattacatatatatcatcgtttacgaataccgacgcgcctgaatatctaggagtaattaagtttggaagtcttatccatttcgaagtgccgtgtttcaaatattctgccacacccgttgaaatagaaaattctaatcctcctattacatataactttccatcgttaacacaagtactaacttctgattttaacgacgacatattagtaaccgttttccattttttcgttttaagatctacccgcgatacggaataaacatgtctattgttaatcatgccgccaataatgtatagacaattatgtaaaacatttgcattatagaattgtctatctgtattaccgactatcgtccaatattctgttctaggagagtaatgggttattgtggatatataatcagagtttttaatgactactatattatgttttataccatttcgtgtcactggctttgtagatttggatatagttaatcccaacaatgatatagcattgcgcatagtattagtcataaacttgggatgtaaaatgttgatgatatctacatcgtttggatttttatgtatccactttaataatatcatagctgtaacatcctcatgatttacgttaacgtcttcgtgggataagatagttgtcagttcatcctttgataattttccaaattctggatcggatgtcaccgcagtaatattgttgattatttctgacatcgacgcattatatagttttttaattccatatcttttagaaaagttaaacatccttatacaatttgtgaaattaatattatgaatcatagtttttacacatagatctactacaggcggaacatcaattattatggcagcaactagtatcatttctacattgtttatggtgatgtttatcttcttccagcgcatatagtctaatagcgattcaaacgcgtgatagtttataccattcaatataatcgcttcatcctttagatggtgatcctgaatgcgtttaaaaaaattatacggagacgccgtaataatttccttattcacttgtataatttccccattgatagaaaatattacgctttccattcttaaagtactataagtaattatagtataatgtaaacgtttatatattcaatatttttataaaaatcattttgacattaattcctttttaaatttccgtctatcatctatagaaacgtattctatgaatttataaaatgcttttacgtgtcctatcgtaggcgatagaaccgctaaaaagcctatcgaatttctacaaaagaatctgttatatggtatagggagagtataaaacattaaatgtccgtacttattaaagtattcagtagccaatcctaactctttcgaatacttattaatggctcttgttctgtacgaatctatttttttgaacaacggacctagtggtatatcttgttctatgtatctaaaataatgtctgactagatccgttagtttaatatccgcagtcatcttgtctagaatggcaaatctaactgcgggtttaggctttagtttagtttctatatctacatctatgtctttatctaacaccaaaaatataatagctaatattttattacaatcatccggatattcttctacgatctcactaactaatgtttctttggttatactagtatagtcactatcggacaaataaagaaaatcagatgatcgatgaataatacatttaaattcatcatctgtaagatttttgagatgtctcattagaatattattagggttagtactcattatcattcggcagctattacttattttattatttttcaccatatagatcaatcattagatcatcaaaatatgtttcaatcatcctaaagagtatggtgaatgactcttcccatctaatttctgaacgttcaccaatgtctctagccactttggcactaatagcgatcattcgcttagcgtcttctatattattaactggttgatttaatctatctagcaatggaccgtcggacagcgtcattctcatgttcttaatcaatgtacatacatcgccgtcatctaccaattcatccaacaacataagctttttaaaatcatcattataataggtttgatcgttgtcatttctccaaagaatatatctaataagtagagtcctcatgcttagttaacaactattttttatgttaaatcaattagtacaccgctatgtttaatacttattcatattttagtttttaggattgagaatcaatacaaaaattaatgcatcattaattttagaaatacttagtttccacgtagtcaatgaaacatttgaactcatcgtacaggacgttctcgtacaggacgtaactataaaccggtttatatttgttcaagatagatacaaatccgataactttttttacgaattctacgggatccactttaaaagtgtcataccgggttctttttatttttttaaacagatcaatggtgtgatgttgattaggtcttttacgaatttgatatagaatagcgtttacatattctccataatggtcaatcgccatttgttcgtatgtcataaattctttaattatatgacactgtgtattatttagttcatccttgttcattgttaggaatctatccaaaatggcaattatactagaactataggtgcgttgtatacacatattgatgtgtctgtttatacaatccatgatatttggatccatgctactaccttcgggtaaaattgtagcatcatataccatttctagtactttaggttcattattatccattgcagaggacgtcatgatcgaatcataaaaaaatatattatttttatgttattttgttaaaaataatcatcgaatacttcgtaagatactccttcatgaacataatcagttacaaaacgtttatatgaagtaaagtatctacgatttttacaaaagtccggatgcataagtacaaagtacgcgataaacggaataataatagatttatctagtctatctttttctatagctttcatagttagatacatggtctcagaagtaggattatgtaacatcagcttcgataaaatgactgggttatttagtcttacacattcgctcatacatgtatgaccgttaactacagagtctacactaaaatgattgaacaatagatagtctaccattgtttcgtattcagatagtacagcgtagtacatggcatcttcacaaattatatcattgtctaatagatatttgacgcatcttatggatcccacttcaacagccatcttaaaatcatattgctttcctttatcattaataatttctagaacatcatctctatcataaaagatacaaatattaactgtttgatccgtaataacattgctagtcaatagcaatttgttaataagatgcgctgggctcaatgtcttaataagaagtgtaagaggactatctccgaatttgttttgtttattaacatccgttgatggaagtaaaagatctataatgtctacattcttgactgttttagagcatacaatatggagaggtgtatttccatcatgatctggttttgagggactaattcctagtttcatcatccatgagattgtagaagcttttggattgtctgacataagatgtctatgaatatgatttttgccaaatttatccactatcctggcttcgaatccgatggacattatttttttaaacactctttctgaaggatctgtacacgccaacaacggaccacatccttcttcatcaaccgagttgttaatcttggctccatactgtaccaataaatttattctctctatgacttcatcatctgttcccgagagataatatagaggtgttttatgctgtttatcacacgcgtttggatctgcgccgtgcgtcagcagcatcgcgactattctattattattaattttagaagctatatgcaatggataatttccatcatcatccgtctcatttggagagtatcctctatgaagaagttcttcgacaaatcgttcatctagtcctttaattccacaatacgcatgtagaatgtgataattatttccagaaggttcgatagcttgtagcatattcctaaatacatctaaatttttactattatatttggcataaagagatagataatactcggccgacataatgttgtccattgtagtataaaaattaatatttctatttctatttctgtatatttgcaacaatttactctctataacaaatatcataacttagtttttttatgtcaagaaggcactggtttagttcatctataaatgtcacgccataactaccacgcatgccatactcagaattatgataaagatatttatccttggggtgtaggtaatggggattaatctttgttggatcagtctctaagttaacacatgtcacacatgatccatttatagttatatcacacgatgatgatttatgaattgattccggaagatcgctatcgtattttgtggttccacaattcatttccatacatgttattgtcacactaatattatgatgaactttatctagccgctgagtggtaaacaacagaacagatagtttattatctttaccaacaccctcagccgctgccacaaatctctgatccgtatccatgatggtcatgtttatttctagtccgtatccagtcaacactatgttagcatttctgtcgatatagctttcactcatatgacactcaccaataatagtagaattaatgtcgtaatttacaccaatagtgagttcggcggcaaagtaccaataccggtaatcttgtcgaggaggacatatagtattcttgtattctaccgaatacccgagagatgcgatacaaaagagcaagactaatttgtaaaccatcttactcaaaatatgtaacaatagtacgatgcaatgagtaagacaataggaaatctatcttatatacacataattattctatcaattttaccaattagttagtgtaatgttaacaaaaatgtgggagaatctaattagtttttctttacacaattgacgtacatgagtctgagttccttgtttttgctaattatttcatccaatttattattcttgacgatatcgagatcttttgtataggagtcaaacttgtattcaacatgcttttctataatcattttagctatttcggcatcatccaatagtacattttccagattagcagaatagatattaatgtcgtatttgaacagagcctgtaacatctcaatgtctttattatctatagccaatttaatgtccggaatgaagagaagggaattattggtgtttgtcgacgtcatatagtcgagcaagagaatcatcatatccacgtgtccattttttatagtgatgtgaatacaactaaggagaatagccagatcaaaagtagatggtatctctgaaagaaagtaggaaacaatacttacatcattaagcatgacggcatgataaaatgaagttttccatccagttttcccatagaacatcagtctccaatttttcttaacaaacagttttaccgtttgcatgttaccactatcaaccgcataatacaatgcggtgtttcccttgtcatcaaattgtgaatcatccagtccactgaatagcaaaatctttactattttggtatcttccaatgtggctgcctgatgtaatggaaattcattctctagaagatttttcaatgctccagcgttcaacaacgtacatactagacgcacgttattatcagctattgcataatacaaggcactatgtccatggacatccgccttaaatgtatctttactagagagaaagcttttcagctgcttagacttccaagtattaattcgtgacagatccatgtctgaaacgagacgctaattagtgtatattttttcattttttataattttgtcatattgcaccagaattaataatatctttaatagatctgattagtagatacatggctatcgcaaaacaacatatacacatttaataaaaataatatttattaagaaaattcagatttcacgtacccatcaatataaataaaataatgattccttacaccgtacccatattaaggagattccaccttacccataaacaatataaatccagtaatatcatgtctgatgatgaacacaaatggtgtattaaattccagtttttcaggagatgatctcgccgtagctaccataatagtagatgcctctgctacagttccttgttcgtcgacatctatctttgcattctgaaacattttataaatatataatgggtccctagtcatatgtttaaacgacgcattatctggattaaacatactaggagccatcatttcggctatcgacttaatatccctcttattttcgatagaaaatttagggagtttaagattgtacactttattccctaattgagacgaccaatagtctaattttgcagccgtgatagaatctgtgaaatgggtcatattatcacctattgccaggtacatactaatattagcatccttatacggaaggcgtaccatgtcatattctttgtcatcgattgtgattgtatttccttgcaatttagtaactacgttcatcatgggaaccgttttcgtaccgtacttattagtaaaactagcattgcgtgttttagtgatatcaaacggatattgccatatacctttaaaatatatagtattaatgattgcccatagagtattattgtcgagcatattagaatctactacattagacataccggatctacgttctactatagaattaattttattaaccgcatctcgtctaaagtttaatctatataggccgaatctatgatattgttgataatacgacggtttaatgcacacagtattatctacgaaactttgataagttagatcagtgtacgtatatttagatgttttcagcttagctaatcctgatattaattctgtaaatgctggacccagatctctttttctcaaatccatagtcttcaataattctattctagtattacctgatgcaggcaatagcgacataaacatagaaaacgaataaccaaacggtgagaagacaatattatcatcttgaatatttttatacgctactataccggcattggtaaatccttgtagacgataggcggacgctgaacacgctaacgatagtatcaataacgcaatcatgattttatggtattaataattaaccttatttttatgttcggtataaaaaaattattgatgtctacacatccttttgtaattgacatctatatatccttttgtataatcaactctaatcactttaacttttacagttttccctaccagtttatccctatattcaacatatctatccatatgcatcttaacactctctgccaagatagcttcagagtgaggatagtcaaaaagataaatatatagagcataatcattctcgtatactctgccctttattacatcacccgcattgggcaacgaataacaaaatgcaagcatcttgttaacgggctcgtaaattgggataaaaattatgtttttattgtcttatatctattttattcaagagaatattcaggaatttctttttccggttgtatctcgtcgcagtatatatcatttgtacattgtttcatattttttaatagtttacaccttttagtaggactagtatcgtacaattcatagctgtattttgaattccaatcacgcataaaaatatcttccaattgttgacgaagacctaatccatcatccggtgtaatattaatagatgctccacatgtatccgtaaagtaatttcctgtccaatttgaggtacctatataggccgttttatcggttaccatatatttggcatggtttaccctagaatacggaatgggaggatcagcatctggtacaataaatagctttacttctatatttatgtttttagattttagcatagcgatagatcttaaaaagtttctcatgataaacgaagatcgttgccagcaactaatcaatagcttaacggatacttgtctgtctatagcggatcttcttaattcatcttctatataaggccaaaacaaaattttacccgccttcgaataaataatagggataaagttcataacagatacataaacgaatttactcgcatttctaatacatgacaataaagcggttaaatcattggttctttccatagtacatagttgttgcggtgcagaagcaataaatacagagtgtggaacgccgcttacgttaatactaagaggatgatctgtattataatacgacggataaaagtttttccaattatatggtagattgttaactccaagataccagtatacctcaaaaatttgagtgagatccgctgccaagttcctattattgaagatcgcaatacccaattccttgacctgagttagtgatctccaatccatgttagcgcttcctaaataaatatgtgtattatcagatatccaaaattttgtatgaagaactcctcctaggatatttgtaatatctatgtatcgtacttcaactccggccatttgtagtctttcaacatcctttaatggtttgttagatttattaacggctactctaactcgtactcctcttttgggtaattgtacaatctcgtttaatattatcgtgccgaaattcgtacccacttcatccgataaactccaataaaaagatgatatatctagtgtttttgtggtattggatagaatttccctccacatgttaaatgtagacaaatatactttatcaaattgcatacctataggaatagtttctgtaatcactgcgattgtattatccggattcattttatttgttaaaagaataatcctatatcacttcactctattaaaaatccaagtttctatttctttcatgactgattttttaacttcatccgtttccttatgaagatgatgtttggcaccttcataaatttttatttctctattacaatttgcatgttgcatgaaataatatgcacctaaaacatcgctaatcttattgtttgttccctggagtatgagagtcggggggtgttaatcttggaaattatttttctaaccttgttggtagccttcaagacctgactagcaaatccagccttaattttttcatgattgactaatgggtcgtattggtatttataaactttatccatatctctagatactgattctggacatagctttccgactggcgcatttggtgtgatggttcccataagtttggcagctagcagattcagtcttgaaacagcatctgcattaactagaggagacattagaatcattgctgtaaacaagtttggattatcgtaagaggctagctcccatggaatgacccaataagtagatttaatagttaccacgtgctgtaccaaagtcatcaatcatcattttttcaccattacttcttccatgtccaatatgatcatgtgagaatactaaaattcctaacgatgatatgttttcagctagttcgtcataacgtccagaatgtttaccagctccatgacttatgaatactaatgccttaggatatgtaataggtttccaatatttacaatatatgtaatcattgtccagattgaacatacagtttgcactcatgattcacgttatataactatcaatattaacagttcgtttgatgatcatattatttttatgttttattgataattgtaaaaacatacaattaaatcaatatagaggaaggagacggctactgtcttttgtaagatagtcatggcgactaaattagattatgaggatgctgttttttactttgtggatgatgataaaatatgtagtcgcgactccatcatcgatctaatagatgaatatattacgtggagaaatcatgttatagtgtttaacaaagatattaccagttgtggaagactgtacaaggaattgatgaagttcgatgatgtcgctatacggtactatggtattgataaaattaatgagattgtcgaagctatgagcgaaggagaccactacatcaattttacaaaagtccatgatcaggaaagtttattcgctaccataggaatatgtgctaaaatcactgaacattggggatacaaaaagatttcagaatctagattccaatcattgggaaacattacagatttgatgaccgacgataatataaacatcttgatactttttctagaaaaaaaattgaattgatgatataggggtcttcataacgcataattattacgttagcattctatatccgtgttaaaaaaaattatcctatcatgtatttgagagttttatatgtagcaaacatgatagctgtgatgccaataagctttagatattcacgcgtgctagtgttagggatggtattatctggtggtgaaatgtccgttatataatctacaaaacaatcatcgcatatagtatgcgatagtagagtaaacatttttatagtttttactggattcatacatcgtctacccaattcggttataaatgaaattgtcgccaatcttacacccaaccccttgttatccattagcatagtattaacttcgttatttatgtcataaactgtaaatgattttgtagatgccatatcatacatgatattcatgtccctattataatcattactaactttatcacaatatatgttgataatatctatatatgatctagtctttgtgggcaactgtctatacaagtcgtctaaacgttgtttactcatatagtatcgaacagccatcattacatggtcccgttccgttgatagataatcgagtatgttagtggacttgtcaaatctatataccatattttctggaagtggatatacatagtcgtgatcaacattattgctagcctcatcttctatatcctgtactataccattatctatatcatctacataatctatgatattattacacataaacatcgacaacatactattgtttattatctaagtcctgttgatccaaacccttgatctcctctatttgtactatctagagattgtacttcttccagttctggataatatatacgttgatagattagctgagctattctatctccagtatttacattaaacgtacattttccattattaataagaatgactcctatgtttcccctataatcttcgtctattacaccacctcctatatcaatgccttttagtgacagaccagacctaggagctattctaccatagcagaacttaggcatggacatactaatatctgtcttaattaactgtctttctcctggagggatagtataatcgtaagcgctatacaaatcatatccggcagcacccggcgattgcctagtaggagatttagctctgttagtttccttaacaaatctaactggtgagttaatattcatgttgaacataaaactaatattttatttcaaaattatttaccatcccatatattccatgaataagtgtgatgattgtacacttctatagtatctatatacgatccacgataaaatcctcctatcaatagcagtttattatccactatgatcaattctggattatccctcggataaataggatcatctatcagagtccatgtattgctggattcacaataaaattccgcatttctaccaaccaagaataaccttctaccgaacactaacgcgcatgatttataatgaggataataagtggatggtccaaactgccactgatcatgattgggtagcaaatattctgtagttgtatcagtttcagaatgtcctcccattacgtatataacattgtttatggatgccactgctggattacatctaggtttcagaagactcggcatattaacccaagcagcatccccgtggaaccaacgctcaacagatgtgggatttggtagacctcctactacgtataatttattgttagcgggtatcccgctagcatacagtctggggctattcatcggaggaattggaatccaattgtttgatatataatttacagctatagcattgttatgtatttcattgttcatccatccaccgatgagatatactacttctccaacatgagtacttgtacacatatggaatatatctataatttgatccatgttcataggatactctatgaatggatacttgtatgatttgcgtggttgtttatcacaatgaaatattttggtacagtctagtatccattttacattatttatacctctgggagaaagataatttgacctgattacatttttgataaggagtagcagatttcctaatttatttcttcgcctcatataccacttaatgacaaaatcaactacataatcctcatctggaacatttagttcatcgctttctagaataagtttcatagatagataatcaaaattgtctatgatgtcatcttccagttccaaaaagtgtttggcaataaagtttttagtatgacataagagattggatagtccgtattctatacccatcatgtaacactcgacacaatattcctttctaaaatctcgtaagataaagtttatacaagtgtagatgataaattctacagaggttaatatagaagcacgtaataaattgacgacgttatgactatctatatatacctttccagtatatgagtaaataactatagaagttaaactgtgaatgtcaaggtctagacaaacccttgtaactggatctttatttttcgtgtatttttgacgtaaatgtgtgcgaaagtaaggagataactttttcaatatcgtagaattgactattatattgcctcctatggcatcaataattgttttgaatttcttagtcatagacaatgctaatatattcttacagtacacagtattgacaaatatcggcatttatgtttctttaaaagtcaacatctagagaaaaatgattatctttttgagacataactcccattttttggtattcacccacacgtttttcgaaaaaattagtttttccttccaatgatatattttccatgaaatcaaacggattggtaacattataaatttttttaaatcccaattcagaaatcaatctatccgcgacgaattctatatatgttttcatcatttcacaattcattcctataagtttaactggaagagccgcagtaagaaattcttgttcaatggatactgcatctgttataatagatctaacggtttcttcactcggtggatgcaataaatgtttaaacatcaaacatgcgaaatcgcagtgcagaccctcgtctctactaattagttcgttggaaaacgtgagtccgggcattaggccacgctttttaagccaaaatatggaagcgaatgatccagaaaagaaaattccttctactgcagcaaaggcaataagtctctctccataaccggcgctgtcatgtatccacttttgagcccaatcggccttcttttttacacaaggcatcgtttctatggcattaaagagatagtttttttcattactatctttaacataagtatcgatcaaaagactatacatttccgaatgaatgttttcaatggccatctgaaatccgtagaaacatctagcctcggtaatctgtacttctgtacaaaatcgttccgccaaattttcattcactattccgtcactggctgcaaaaaacgccaatacatgttttataaaatatttttcgtctggtgttagtttattccaatcattgatatctttagatatatctacttcttccactgtccaaaatgatgcctctgcctttttatacatgttccagatgtcatgatattggattgggaaaataacaaatctatttggatttggtgcaaggatgggttccataactaaattaacaataacaataaattttttttcagttatctatatgcctgtacttggattttttgtacatcgatatcgccgcaatcactacaataattacaagtattattgatagcattgttattagtactatcataattaaattatctacattcatgggtgctgaataatcgttattatcatcattatcattttgtaattgtgacatcatactagataaatcgtttgcgagattgttgtgggaagcgggcatggaggatgcattatcattattatttaacgccttccatttggattcacaaatgttacgcacattcaacattttatggaaactataattttgtgaaaacaaataacaagaaaactcgtcatcgttcaaatttttaacgatagtaaaccgattaaacgtcgagctaatttctaacgctagcgactctgttggatatgggtttccagatatatatcttttcagttcccctacgtatctataatcatctgtaggaaatggaagatatttccatttatctactgttcctaatatcatatgtggtggtgtagtagaaccattaagcgcgaaagatgttatttcgcatcgtattttaacttcgcaataatttctggttagataacgcactctaccagtcaagtcaatgatattagcctttacagatatattcatagtagtcgtaacgatgactccatcttttagatgcgatactcctttgtatgtaccagaatcttcgtacctcaaactcgatatatttaaacaagttaatgagatattaacgcgttttatgaatgatgatatataaccagaagttttatcctcggtggctagcgctataaccttatcattataataccaactagtgtgattaatatgtgacacgtcagtgtgggtacaaatatgtacattatcgtctacgtcgtattcgatacatccgcatacagccaacaaatataaaatgacaaatactctaacgccgttcgtacccatcttgatgcggtttaataaatgttttgatttcaatttattgtaaaaaaagattcggttttatactgttcgatattctcattgcttatattttcatctatcatctccacacagtcaaatccgtggttagcatgcacctcatcaaccggtaaaagactatcggactcttctatcattataactctagaatatttaatttggtcattattaatcaagtcaattatcttatttttaacaaacgtgagtattttactcattttttataaaaacttttagaaatatacagactctatcgtgtgtctatatcttctttttatatccaatgtatttatgtctgatttttcttcatttatcatatataatggtccaaattctacacgtgcttcggattcatccagatcattaaggttcttataattgtaacatccttctcttccctcttctacatcttccttcttattcttattcttagcgtcacagaatctaccacagcaggatcccatgacgagcgtcatattaaactaatccattttcaattataatatatgattagtaatgaccattaaaataaaaaatattcttcataaccggcaagaaagtgaaaagttcacattgaaactatgtcagtagtatacatcatgaaatgatgatatatatatactctattttggtggaggattatatgatataattcgtggataatcatttttaagacacatttctttattcgtaaatcttttcacgttaaatgagtgtccatattttgcaatttcttcatatgatggcggtgtacgtggacgaggctgctcctgttcttgttgtggtcgccgactgtcgtgtctgcgtttagatccctccattatcgcgattgcgtagatggagtactattttataccttgtaattaaatttttttattaattaaacgtataaaaacgttccgtatctgtatttaagagccagatttcgtctaatagaacaaatagctacagtaaaaataactagaataattgctacacccactagaaaccacggatcgtaatacggcaatcggttttcgataataggtggaacgtatattttatttaaggacttaacaattgtctgtaaaccacaatttgcttccgcggatcctgtattaactatctgtaaaagcatatgttgaccgggcggagccgaacattctccgatatctaatttctgtatatctataatattattaacctccgcatacgcattacagttcttttctagcttggataccgcactaggtacatcgtctagatctattcctatttcctcagcgatagctcttctatccttttccggaagcaatgaaatcacttcaataaatgattcaaccatgagtgtgaaactaagtcgagaattactcatgcatttgttagttattcggagcgcgcaatttttaaactgtcctataacctctcctatatgaatagcacaagtgacattagtagggatagaatgttgagctaatttttgtaaataactatctataaaaagattatacaaagttttaaactctttagtttccgccatttatccagtctgagaaaatgtctctcataataaatttttccaagaaactaattgggtgaagaatggaaacctttaatctatatttatcacagtctgttttggtacacatgatgaattcttccaatgccgtactaaattcgatatctttttcgatttctggatatgtttttaataaagtatgaacaaagaaatggaaatcgtaataccagttatgtttaactttgaaattgttttttattttcttgttaatgattccagccacttgggaaaagtcaaagtcgtttaatgccgatttaatacgttcattaaaaacaaactttttatcctttagatgaattattattggttcattggaatcaaaaagtaagatattatcgggtttaagatctgcgtgtaaaaagttgtcgcaacagggtagttcgtagattttaatgtataacagagccatctgtaaaaagataaactttatgtattgtaccaaagatttaaatcctaatttgatagctaactcggtatctactttatctgccgaatacagtgctaggggaaaaattataatgtttcctctttcatattcgtagttagttctcttttcatgttcgaaaaagtgaaacatgcggttaaaatagtttataacattaatattactgttaataactgccggataaaagtgggatagtaatttcacgaatttgatactgtcctttctctcgttaaacgcctttaaaaaaactttagaagaatatctcaatgagagttcctgaccatccatagtttgtatcaataatagcaacatatgaagaacacgtttatacagagtatgtaaaaatgttaatttatagtttaatcccatggcccacgcacacacgattaattttttttcatctccctttagattgttgtatagaaatttgggtactgtgaactccgccgtagtttccatgggactatataattttgtggcctcgaatacaaattttactacatagttatctatcttaaagactataccatatcctcctgtagatatgtgataaaaatcgtcgtttataggataaaatcgtttatccttttgttggaaaaaggatgaattaatgtaatcattctcttctatctttagtagtgtttccttattaaaattcttaaaataatttaacaatctaactgacggagcccaattttggtgtaaatctaattgggacattatattgttaaaatacaaacagtctcctaatataacagtatctgataatctatggggagacatccattgatattcaggggatgaatcattggcaacacccatttattgtacaaaaagccccaatttacaaacgaaagtccaggtttgatagagacaaacaattaactattttgtctctgtttttaacacctccacagtttttaatttctttagtaatgaaattattcacaatatcagtatcttctttatctaccagagattttactaacttgataaccttggctgtctcattcaatagggtagtaatatttgtatgtgtgatattgatatctttttgaattgtttcttttagaagtgattctttgatggtgccagcatacgaattacaataatgcagaaactcggttaacatgcaggaattatagtaagccaattccaattgttgcctgtgttgtattagagtgtcaatatgagcaatggtgtccttgcgtttctctgatagaatgcgagcagcgattttggcgttatcatttgacgatatttctggaatgacgaatcctgtttctactaactttttggtaggacaaagtgaaacaatcaagaagatagcttctcctcctatttgtggaagaaattgaactcctctagatgatctactgacgatagtatctccttgacagatattggaccgaattacagaagtacctggaatgtaaagccctgaaaccccctcattttttaagcagattgttgccgtaaatcctgcactatgcccaagatagagagctcctttggtgaatccatctctatgtttcagtttaaccaagaaacagtcagctggtctaaaatttccatctctatctaatacagcatctaacttgatgtcaggaactatgaccggtttaatgttatatgtaacattgagtaaatccttaagttcataatcatcactgtcatcagttatgtacgatccaaacaatgtttctaccggcatagtggatacgaagatgctatccatcagaatgtttccctgattagtattttctatatagctattcttctttaaacgattttccaaatcagtaactatgttcatttttttaggagtaggacgcctagccagtatggaagaggattttctagatcctctcttcaacatctttgatctcgatggaatgcaaaaccccatagtgaaacaaccaacgataaaaataatattgtttttcactttttataattttaccatctgactcatggattcattaatatctttataagagctactaacgtataattctttataactgaactgagatatatacaccggatctatggtttccataattgagtaaatgaatgctcggcaataactaatggcaaatgtatagaacaacgaaattatactagagttgttaaagttaatattttctatgagctgttccaataaattatttgttgtgactgcgttcaagtcataaatcatcttgatactatccagtaaaccgtttttaagttctggaatattatcatcccattgtaaagcccctaattcgactatcgaatatcctgctctgatagcagtttcaatatcgacggacgtcaatactgtaataaaggtggtagtattgtcatcatcgtgataaactacgggaatatggtcgttagtaggtacggtaactttacacaacgcgatatataactttccttttgtaccatttttaacgtagttgggacgtcctgcagggtattgttttgaagaaatgatatcgagaacagatttgatacgatatttgttggattcctgattattcactataatataatctagacagatagatgattcgataaatagagaaggtatatcgttggtaggataatacatccccattccagtattctcggatactctattgatgacactagttaagaacatgtcttctattctagaaaacgaaaacatcctacatggactcattaaaacttctaacgctcctgattgtgtctcgaatgcctcgtacaaggatttcaaggatgccatagattctttgaccaacgatttagaattgcgtttagcatctgatttttttattaaatcgaatggtcggctctctggtttgctaccccaatgataacaatagtcttgtaaagataaaccgcaagaaaatttatacgcatccatccaaataaccctagcaccatcggatgatattaatgtattattatagattttccatccacaattattgggccagtatactgttagcaacggtatatcgaatagattactcatgtaacctactagaatgatagttcgtgtactagtcataatatctttaatccaatctaaaaaatttaaaattagattttttacactgttaaagttaacaaaagtattacccgggtacgtggatatcatatatggcattggtccattatcagtaatagctccataaactgatacggcgatggtttttatatgtgtttgatctaacgaggaagaaattcgcgcccacaattcatctctagatatgtatttaatatcaaacggtaacacatcaatttcgggacgcgtatatgtttctaaatttttaatccaaatataatgatgacctatatgccctattatcatactgtcaactatagtacacctagggaacttacgatacatctgtttcctataatcgttaaattttacaaatctataacatgctaaaccttttgacgacagccattcattaatttctgatatggaatctgtattctcgataccgtatcgttctaaagccagtgctatatctccctgttcgtgggaacgctttcgtataatatcgatcaacggataatctgaagtttttggagaataatatgactcatgatctatttcgtccataaacaatctagacataggaattggaggcgatgatcttaattttgtgcaatgagtcgtcaatcctataacttctaatcttgtaatattcatcatcgacataatactatctatgttatcatcgtatattagtataccatgaccttcttcatttcgtgccaaaatgatatacagtcttaaatagttacgcaatatctcaatagtttcataattgttagctgttttcatcaaggtttgtatcctgtttaacatgatggcgttctataacgtctctattttctatttttaattttttaaatttttaacgatttactgtggctagatacccaatctctctcaaatatttttttagcctcgcttacaagctgtttatctatactattaaaactgacgaatccgtgattttggtaatgggttccgtcgaaatttgccgaagtgatatgaacatattcgtcgtcgactatcaacaattttgtattattctgaatagtgaaaaccttcacagatagatcattttgaacacacaacgcatctagacttttggcggttgccatagaatatacgtcgttcttatcccaattaccaactagaagtctgatcttaactcctctattaatggctgcttctataatggagttgtaaatgtcgggccaatagtagctattaccgtcgacacgtgtagtgggaactatggccaaatgttcaatatctatactagtcttagctgacctgagtttatcaataactacatcggtatctagatctctagaatatcccaataggtgttccggagaatcagtaaagaacactccacctataggattcttaatatgatacgcagtgctaactggcaaacaacaagccgcagagcataaattcaaccatgaattttttgcgctattaaaggctttaaaagtatcaaatcttctacgaagatctgtggccagcgggggataatcagaatatacacctaacgttttaatcgtatgtatagatcctccagtaaatgacgcgtttcctacataacatctttcatcatctgacacccaaaaacaaccgagtagtagtcccacattattttttttatctatattaacggttataaaatttatatccgggcagtgactttgtagctctcccagatttcttttccctcgttcatctagcaaaactattattttaatccctttttcagatgcctcttttagtttatcaaaaataagcgctcccctagtcgtactcagaggattacaacaaaaagatgctatgtatatatatttcttagctagagtgataatttcgttaaaacattcaaatgttgttaaatgatcggatctaaaatccatattttctggtagtgtttctaccagcctacattttgctcccgcaggtaccgatgcaaatggccacatttagttaacataaaaacttatacatcctgttctatcaacgattctagaatatcatcggctatatcgctaaaattttcatcaaagtcgacatcacaacctaactcagtcaatatattaagaagttccatgatgtcatcttcgtctatttctatatccgtatccattgtagattgttgaccgattatcgagtttaaatcattactaatactcaatccttcagaatacaatctgtgtttcattgtaaatttataggcggtgtatttaagttggtagattttcaattatgtattaatatagcaacagtagttcttgctcctccttgattctagcatcctcttcattattttcttctacgtacataaacatgtccaatacgttagacaacacaccgacgatggcggccgcagatctcgagttatgatctacttccttaccgtgcaataaattagaatatattttctacttttacgagaaattaattattgtatttattatttatgggtgaaaaacttactataaaaagcgggtgggtttggaattagtgaaagcttaaaaattgaaattttattttttttttttggaatataaataagctcgaagtcgacagatctaggcctggtaccaggaggaggaattcagcttaaagatgacttcgaaagtttatgatccagaacaaaggaaacggatgataactggtccgcagtggtgggccagatgtaaacaaatgaatgttcttgattcatttattaattattatgattcagaaaaacatgcagaaaatgctgttatttttttacatggtaacgcggcctcttcttatttatggcgacatgttgtgccacatattgagccagtagcgcggtgtattataccagatcttattggtatgggcaaatcaggcaaatctggtaatggttcttataggttacttgatcattacaaatatcttactgcatggtttgaacttcttaatttaccaaagaagatcatttttgtcggccatgattggggtgcttgtttggcatttcattatagctatgagcatcaagataagatcaaagcaatagttcacgctgaaagtgtagtagatgtgattgaatcatgggatgaatggcctgatattgaagaagatattgcgttgatcaaatctgaagaaggagaaaaaatggttttggagaataacttcttcgtggaaaccatgttgccatcaaaaatcatgagaaagttagaaccagaagaatttgcagcatatcttgaaccattcaaagagaaaggtgaagttcgtcgtccaacattatcatggcctcgtgaaatcccgttagtaaaaggtggtaaacctgacgttgtacaaattgttaggaattataatgcttatctacgtgcaagtgatgatttaccaaaaatgtttattgaatcggatccaggattcttttccaatgctattgttgaaggcgccaagaagtttcctaatactgaatttgtcaaagtaaaaggtcttcatttttcgcaagaagatgcacctgatgaaatgggaaaatatatcaaatcgttcgttgagcgagttctcaaaaatgaacaagcggccgccgccaccatgagcaagggcgaggaactgttcactggcgtggtcccaattctcgtggaactggatggcgatgtgaatgggcacaaattttctgtcagcggagagggtgaaggtgatgccacatacggaaagctcaccctgaaattcatctgcaccactggaaagctccctgtgccatggccaacactggtcactaccttcacctatggcgtgcagtgcttttccagatacccagaccatatgaagcagcatgactttttcaagagcgccatgcccgagggctatgtgcaggagagaaccatctttttcaaagatgacgggaactacaagacccgcgctgaagtcaagttcgaaggtgacaccctggtgaatagaatcgagctgaagggcattgactttaaggaggatggaaacattctcggccacaagctggaatacaactataactcccacaatgtgtacatcatggccgacaagcaaaagaatggcatcaaggtcaacttcaagatcagacacaacattgaggatggatccgtgcagctggccgaccattatcaacagaacactccaatcggcgacggccctgtgctcctcccagacaaccattacctgtccacccagtctgccctgtctaaagatcccaacgaaaagagagaccacatggtcctgctggagtttgtgaccgctgctgggatcacacatggcatggacgagctgtacaagtgagcggccgccctgctagcaagcttgctagcggccgctcgagatctgcggccgctacagacacgaatatgactaaaccgatgaccatttaaaaacccctctctagctttcacttaaactgtatcgatcattcttttagcacatgtataatataaaaacattattctatttcgaatttaggcttccaaaaatttttcatccgtaaaccgataataatatatatagacttgttaatagtcggaataaatagattaatgcttaaactatcatcatctccacgattagagatacaatatttacattctttttgctgtttcgaaactttatcaatacacgttaatacaaacccaggaaggagatattgaaactgaggctgttgaaaatgaaacggtgaatacaataattcagataatgtaaaatcatgattccgtattctgatgatattagaactgctaatggatgtcgatggtatgtatctaggagtatctattttaacaaagcatcgatttgctaatatacaattatccttttgattaattgttattttattcatattcttaaaaggtttcatatttatcaattcttctacattaaaaatttccatttttaatttatgtagccccgcaatactcctcattacgtttcattttttgtctataatatccattttgttcatctcggtacatagattatccaattgagaagcgcatttagtagttttgtacattttaagtttattgacgaatcgtcgaaaactagttatagttaacattttattatttgataccctgatattaatacccctgccgttactattatttataactgatgtaatccacgtaacattggaattaactatcgatagtaatgcatcgacgcttccaaaattgtctattataaactcaccgataatttttttattgcatgttttcatattcattaggattatcaaatctttaatcttattacgattgtatgcgttgatattacaagacgtcattctaaaagacggaggatctccatcaaatgccagacaatcacgtacaaagtacatggaaataggttttgttctattgcgcatcatagatttatatagaacacccgtagaaatactaatttgttttactctataaaatactaatgcatctatttcatcgttttgtataacgtctttccaagtgtcaaattccaaatttttttcattgatagtaccaaattcttctatctctttaactacttgcatagataggtaattacagtgatgcctacatgccgttttttgaaactgaatagatgcgtctagaagcgatgctacgctagtcacaatcaccactttcatatttagaatatatatatgtaaaaatatagtagaatttcattttgtttttttctatgctataaatgaattctcattttgcatctgctcatactccgttttatattaataccaaagaaggaagatatctggttctaaaagccgttaaagtatgcgatgttagaactgtagaatgcgaaggaagtaaagcttcctgcgtactcaaagtagataaaccctcatcgcccgcgtgtgagagaagaccttcgtccccgtccagatgcgagagaatgaataaccctggaaaacaagttccgtttatgaggacggacatgctacaaaatatgttcgcggctaatcgcgataatgtagcttctagacttttgtcctaaaatactattatatccttttcgatattaataaatccgtgtcgtccaggttttttatctctttcagtatgtgaatagataggtattttatctctattcatcatcgaatttaagagatccgataaacattgtttgtattctccagatgtcagcatctgatacaacaatatatgtgcacataaacctctggcacttatttcatgtaccttccccttatcactaaggagaatagtatttgagaaatatgtatacatgatattatcatgaattagatatacagaatttgtaacactctcgaaatcacacgatgtgtcggcgttaagatctaatatatcactcgataacacattttcatctagatacactagacattttttaaagctaaaatagtctttagtagtaacagtaactatgcgattattttcatcgatgatacatttcatcggcatattattacgcttaccatcaaagactataccatgtgtatatctaacgtattctagcatggttgccatacgcgcattaaacttttcaggatctttggatagatcttccaatctatctatttgagaaaacatttttatcatgttcaatagttgaaacgtcggatccactatatagatattatctataaagattttaggaactacgttcatggtatcctggcgaatattaaaactatcaatgatatgattatcgttttcatcttttatcaccatatagtttctaagatatgggattttacttaatataatattatttcccgtgataaattttattagaaaggccaaatctataagaaaagtcctagaattagtctgaagaatatctatatcgccgtatagtatatttggattaattagatatagagaatatgatccgtaacatatacaacttttattatggcgtctaagatattcttccatcaacttattaacatttttgactagggaagatacattatgacgtcccattacttttgccttgtctattactgcgacgttcatagaatttagcatatctcttgccaattcttccattgatgttacattataagaaattttagatgaaattacatttggagctttaatagtaagaactcctaatatgtccgtgtatgtggtcactaatacagattgtagttctataatcgtaaataatttacctatattatatgtttgagtctgtttagaaaagtagctaagtatacgatcttttatttctgatgcagatgtattaacatcggaaaaaaatctttttttattcttttttactaaagatacaaatatgtctttgttaaaaacagttattttctgaatatttctagcttgtaattttaacatatgatattcgttcacactaggtactctgcctaaataggtttctataatctttaatgtaatattaggaaaagtattctgatcaggattcctattcattttgaggatttaaaactctgattattgtctaatatggtctctacgcaaactttttcacagagcgatagagtttttgataactcgtttttcttaagaaatataaaactactgtctccagagctcgctctatcttttattttatctaattcgatacaaactcctgatactggttcagaaagtaattcattaattttcagtcctttatagaagatatttaatatagataatacaaaatcttcagtttttgatatcgatctgattgatcctagaactagatatattaataacgtgctcattaggcagtttatggcagcttgataattagatatagtatattccagttcatatttattagataccgcattgcccagattttgatattctatgaattcctctgaaaataaatccaaaataactagacattctattttttgtggattagtgtactctcttccctctatcatgttcactactggtgtccacgatgataaatatctagagggaatataatatagtccataggatgccaatctagcaatgtcgaataactgtaattttattcttcgctcttcattatgaattgattcttgaggtataaacctaacacaaattatattattagacttttcgtatgtaatgtctttcatgttataagtttttaatcctggaatagaatctattttaatgaggcttttaaacgcagagttctccaacgagtcaaagcataatactctgttgtttttcttatatacgatgttacgattttcttctttgaatggaataggtttttgaattagtttataattacaacataatagataaggaagtgtgcaaatagtacgcggaaaaaacataatagctcccctgttttcatccatggttttaagtaaatgatcactggcttctttagtcaatggatattcgaacattaaccgtttcatcatcattggacagaatccatatttcttaatgtaaagagtgatcaaatcattgtgtttattgtaccatcttgttgtaaatgtgtattcggttatcggatctgctcctttttctattaaagtatcgatgtcaatctcgtctaagaattcaactatatcgacatatttcatttgtatacacataaccattactaacgtagaatgtataggaagagatgtaacgggaacagggtttgttgattcgcaaactattctaatacataattcttctgttaatacgtcttgcacgtaatctattatagatgccaagatatctatataattattttgtaagatgatgttaactatgtgatctatataagtagtgtaataattcatgtattttgatatatgttccaactctgtctttgtgatgtctagtttcgtaatatctatagcatcctcaaaaaatatattcgcatatattcccaagtcttcagttctatcttctaaaaaatcttcaacgtatggaatataataatctattttacctcttctgatatcattaatgatatagtttttgacactatcttctgtcaattgattcttattcactatatctaagaaacggatagcgtccctaggacgaactactgccattaatatctctattatagcttctggacataattcatctattataccagaattaatgggaactattccgtatctatctaacatagttttaagaaagtcagaatctaagacttgatgttcatatattggttcatacatgaaatgatctctattgatgatagtgactatttcattctctgaaaattggtaactcattctatatatgctttccttgttgatgaaggatagaatatactcaatagaatttgtaccaacaaactgttctcttatgaatcgtatatcatcatctgaaataatcatgtaaggcatacatttaacaattagagacttgtctcctgttatcaatatactattcttgtgataatttatgtgtgaggcaaatttgtccacgttctttaattttgttatagtagatatcaaatccaatggagctacagttcttggcttaaacagatatagtttttctggaacaaattctacaacattattataaaggactttgggtagataagtgggatgaaatcctattttaattaatgcgatagccttgtcctcgtgcagatatccaaacgcttttgtgatagtatggcattcattgtctagaaacgctctacgaatatctgtgacagatatcatctttagagaatatactagtcgcgttaatagtactacaatttgtattttttaatctatctcaataaaaaaattaatatgtatgattcaatgtataactaaactactaactgttattgataactagaatcagaatctaatgatgacgtaaccaagaagtttatctactgccaatttagctgcattatttttagcatctcgtttagattttccatcggccttatcgaatactcttccgtcgatgtctacacaggcataaaatgtaggagagttactaggcccaactgattcaatacgaaaagaccaatctctcctagtaatttggcagtactcattaataacggtgacagggttagcatctttccaatcaataatttttttagccggaataacatcatcaaaagacttatgatcctctctcattgatttttcgcgggatacatcatctattatgacgtcagccatagcatcagcatccggcttatccgcctccgttgtcataaaccaacgaggaggaatatcgtcggagctgtacaccatagcactacgttgaagatcgtacagagctttattaacttctcgcttctccatattaagttgtctagttagttgtgcagcagtagctccttcgattccaatgtttttaatagccgcacacacaatctctgcgtcagaacgctcgtcaatatagatcttagacatttttagagagaactaacgcaaccagcaataaaactgaacctactttatcatttttttattcatcatcctctggtggttcgtcgttcctatcaaatgtagctctgattaacccgtcatctataggtgatgctggttctggagattctggaggagatggattattatctggaagaatctctgttatttccttgttttcatgtatcgattgcgttgtaacattaagattgcgaaatgctctaaatttgggaggcttaaagtgttgtttgcaatctctacacgcgtgtctaactagtggaggttcgtcagctgctctagtttgaatcatcatcggcgtagtattcctacttttacagttaggacacggtgtattgtatttctcgtcgagaacgttaaaataatcgttgtaactcacatcctttattttatctatattgtattctactcctttcttaatgcattttataccgaataagagatagcgaaggaattctttttcggtgccgctagtacccttaatcatatcacatagtgttttatattccaaatttgtggcaatagacggtttatttctatacgatagtttgtttctggaatcctttgagtattctataccaatattattctttgattcgaatttagtttcttcgatattagattttgtattacctatattcttgatgtagtactttgatgatttttccatggcccattctattaagtcttccaagttggcatcatccacatattgtgatagtaattctcggatatcagtagcggctaccgccattgatgtttgttcattggatgagtaactactaatgtatacattttccatttataacacttatgtattaactttgttcatttatattttttcattattatgttgatattaacaaaagtgaatatatatatgttaataattgtattgtggttatacggctacaattttataatgagtgaaagtcagtgtccgatgatcaatgacgatagctttactctgaaaagaaagtatcaaatcgatagtgcggagtcaacaataaaaatggataagaagaggataaagtttcagaatagagccaaaatggtaaaagaaataaatcagacaataagagcagcacaaactcattacgagacattgaaactaggatacataaaatttaagagaatgattatgactactactctagaagatatagcaccatctattccaaataatcagaaaacttataaactattctcggacatttcagccatcggcaaagcatcacagaatccgagtaagatggtatatgctctgctgctttacatgtttcccaatttgtttggagatgatcatagattcattcgttatagaatgcatccaatgagtaaaatcaaacacaagatcttctctcctttcaaacttaatcttattagaatattagtggaagaaagattctataataatgaatgcagatctaataaatggagaataattggaacacaagttgataaaatgttgatagctgaatctgataaatatacaatagatgcaaggtataacctaaaacccatgtatagaatcaagggagaatctgaagaagataccctctttatcaaacagatggtagaacaatgtgtgacatcccaggaattggtggaaaaagtgttgaagatactgtttagagatttgttcaagagtggagaatacaaagcgtacagatacgatgatgatgtagaaaatggatttattggattggatacactaaaattaaacattgttcatgatatagttgaaccatgtatgcctgttcgtaggccagtggctaagatactgtgtaaagaaatggtaaataaatactttgagaatccgctacatattattggtaaaaatcttcaagagtgcattgactttgttagtgaataggcatttcatctttctccaatactaattcaaattgttaaattaataatggatagtataaatagttattagttataagatagtaaaaataattattagaataagagtgtagtatcatagataactctcttctataaaaatggattttattcgtagaaagtatcttatatacacagtagaaaataatatagattttttaaaggatgatacattaagtaaagtaaacaattttaccctcaatcatgtactagctctcaagtatctagttagcaattttcctcaacacgttattactaaggatgtattagctaataccaatttttttgttttcatacatatggtacgatgttgtaaagtgtacgaagcggttttacgacacgcatttgatgcacccacgttgtacgttaaagcattgactaagaattatttatcgtttagtaacgcaatacaatcgtacaaggaaaccgtgcataaactaacacaagatgaaaaatttttagaggttgccgaatacatggacgaattaggagaacttataggcgtaaattatgacttagttcttaatccattatttcacggaggggaacccatcaaagatatggaaatcatttttttaaaactgtttaagaaaacagacttcaaagttgttaaaaaattaagtgttataagattacttatttgggcatacctaagcaagaaagatacaggcatagagtttgcggataatgatagacaaaatatatacactctatttcaacaaactggtagaatcgtccatagcaatctaacagaaacgtttagagattatatctttcccggagataagactagctattgggtgtggttaaacgaaagtatagctaatgatgcggatatcgttcttaatagacacgccattaccatgtatgataaaattcttagttatatatactctgagataaaacaaggacgcgttaataaaaacatgcttaagttagtttatatctttgagcctgaaaaagatatcagagaacttctgctagaaatcatatatgatattcctggagatatcctatctattattgatgcaaaaaacgacgattggaaaaaatattttattagtttttataaagctaattttattaacggtaatacatttattagtgatagaacgtttaacgaggacttattcagagttgttgttcaaatagatcccgaatatttcgataatgaacgaattatgtctttattctctacgagtgctgcggacattaaacgatttgatgagttagatattaataacagttatatatctaatataatttatgaggtgaacgatatcacattagatacaatggatgatatgaagaagtgtcaaatctttaacgaggatacgtcgtattatgttaaggaatacaatacatacctgtttttgcacgagtcggatcccatggtcatagagaacggaatactaaagaaactgtcatctataaaatccaagagtagacggctgaacttgtttagcaaaaacattttaaaatattatttagacggacaattggctcgtctaggtcttgtgttagatgattataaaggagacttgttagttaaaatgataaaccatcttaagtctgtggaggatgtatccgcattcgttcgattttctacagataaaaaccctagtattcttccatcgctaatcaaaactattttagctagttataatatttccatcatcgtcttatttcaaaggtttttgagagataatctatatcatgtagaagaattcttggataaaagcatccatctaaccaagacggataagaaatatatacttcaattgataagacacggtagatcatagaacagaccaaatatattattaataatttgtatatacatagatataattatcacacatttttgataaatgggaactgctgcaacaattcagactcccaccaaattaatgaataaagaaaatgcagaaatgattttggaaaaaattgttgatcatatagttatgtatattagtgacgaatcaagtgattcagaaaataatcctgaatatattgattttcgtaacagatacgaagactatagatctctcattataaaaagtgatcacgagtttgtaaagctatgtaaaaatcatgcggagaaaagttctccagaaacgcaacaaatgattatcaaacacatatacgaacaatatcttattccagtatctgaagtactattaaaacctataatgtccatgggtgacataattacatataacggatgtaaagacaatgaatggatgctagaacaactctctaccctaaactttaacaatctccgcacatggaactcatgtagcataggcaatgtaacgcgtctgttttatacattttttagttatctgatgaaagataaactaaatatataagtataatcccattctaatactttaacctgatgtattagcatcttattagaatattaacctaactaaaagacataacataaaaactcattacatagttgataaaaagcggtaggatataaatattatggctgccaccgttccgcgttttgacgacgtgtacaaaaatgcacaaagaagaattctagatcaagaaacattttttagtagaggtctaagtagaccgttaatgaaaaacacatatctatttgataattacgcgtatggatggataccagaaactgcaatttggagtagtagatacgcaaacctagatgctagtgactattatcccatttcgttgggattacttaaaaagttcgagtttctcatgtctctatataaaggtcctattcccgtatatgaagaaaaagtaaatactgaattcatagccaatggatcgttctctggtagatacgtatcatatcttcgaaagttttctgcccttccaacaaacgagtttattagttttttgttactgacttccattccaatctataatatcttgttctggtttaaaaacacacagtttgatattactaaacacacattattcagatacgtctatacagataatgccaaacacctggcgttggctaggtatatgcatcaaacaggagactataagcctttgtttagtcgtctcaaagagaattatatatttaccggtcccgttccaataagtatcaaagatatagatcaccctaatcttagtagagcaagaagtccatccgattatgagacattagctaatattagtactatattgtactttaccaagtatgatccggtattaatgtttttattgttttacgtacctgggtattcaattactacaaaaattactccagccgtagaatatctaatggataaactgaatctaacaaagagcgacgtacaactgttgtaaattattttatgcttcgtaaaatgtaggttttgaaccaaacattctttcaaagaatgagatgcataaaactttattatccaatagattgactatttcggacgtcaatcgtttaaagtaaacttcgtaaaatattctttgatcactgccgagtttaaaacttctatcgataattgtctcatatgttttaatatttacaagttttttggtccatggtacattagccggacaaatatatgcaaaataatatcgttctccaagttctatagtttctggattatttttattatattcagtaactaaatacatattagggttatctgcggatttataatttgagtgatgcattctactcaacataaataattctagaggagacgatctactatcaaattcggatcgtaaatctgtttctaaagaacggagaatatctatacatacctgattagaattcatccgtccttcagacaacatctcagacagtctggttttgtacatcttaatcatattcttatgaaacttggaaacatctcttctagtttcactagtacctttattaattctctcaggtacagattttgaattcgacgatgctgagtatttcatcgttgtatatttcttcttcgattgcataatcagattcttatataccgcctcaaactctattttaaaattattaaacaatactctattattaatcagtcgttctaactctttcgctatttctatagacttatctacatcttgactgtctatctctgtaaacacggagtcggtatctccatacacgctacgaaaacgaaatctgtaatctataggcaacgatgttttcacaatcggattaatatctctatcgtccatataaaatggattacttaatggattggcaaaccgtaacataccgttagataactctgctccatttagtaccgattctagatacaagatcattctacgtcctatggatgtgcaactcttagccgaagcgtatgagtatagagcactatttctaaatcccatcagaccatatactgagttggctactatcttgtacgtatattgcatggaatcatagatggccttttcagttgaactggtagcctgttttagcatctttttatatctggctctctctgccaaaaatgttcttaatagtctaggaatggttccttctatcgatctatcgaaaattgctatttcagagatgaggttcggtagtctaggttcacaatgaaccgtaatatatctaggaggtggatatttctgaagcaatagctgattatttatttcttcttccaatctattggtactaacaacgacaccgactaatgtttccggagatagatttccaaagatacacacattaggatacagactgttataatcaaagattaatacattattactaaacattttttgttttggagcaaataccttaccgccttcataaggaaacttttgttttgtttctgatctaactaagatagttttagtttccaacaatagctttaacagtggacccttgatgactgtactcgctctatattcgaataccatggattgaggaagcacatatgttgacgcacccgcgtctgtttttgtttctactccataatactcccacaaatactgacacaaacaagcatcatgaatacagtatctagccatatctaaagctatgtttagattataatccttatacatctgagctaaatcaacgtcatcctttccgaaagataatttatatgtatcattaggtaaagtaggacataatagtacgactttaaatccattttcccaaatatctttacgaattactttacatataatatcctcatcaacagtcacataattacctgtggttaaaacctttgcaaatgcagcggctttgcctttcgcgtctgtagtatcgtcaccgatgaacgtcatttctctaactcctctatttaatactttacccatgcaactgaacgcgttcttggatatagaatccaatttgtacgaatccaatttttcaaatttttgaatgaatgaatatagatcgaaaaatatagttccattattgttattaacgtgaaacgtagtattggccatgccgcctactcccttatgactagactgatttctctcataaatacagagatgtacagcttcctttttgtccggagatctaaagataattttctctcctgttaataactctagacgattagtaatatatctcagatcaaagttatgtccgttaaaggtaacgacgtagtcgaacgttagttccaacaattgtttagctattcgtaacaaaactatttcagaacatagaactagttctcgttcgtaatccatttccattagtgactgtatcctcaaacatcctctatcgacggcttcttgtatttcctgttccgttaacatctcttcattaatgagcgtaaacaataatcgtttaccacttaaatcgatataacagtaacttgtatgcgagattgggttaataaatacagaaggaaacttcttatcgaagtgacactctatatctagaaataagtacgatcttgggatatcgaatctaggtatttttttagcgaaacagttacgtggatcgtcacaatgataacatccattgttaatctttgtcaaatattgctcgtccaacgagtaacatccgtctggagatatcccgttagaaatataaaaccaactaatattgagaaattcatccatggtggcattttgtatgctgcgtttctttggctcttctatcaaccacatatctgcgacggagcattttctatctttaatatctagattataacttattgtctcgtcaatgtctatagttctcatctttcccaacggcctcgcattaaatggaggaggagacaatgactgatatatttcgtccgtcactacgtaataaaagtaatgaggaaatcgtataaatacggtctcgccatttcgacatctggatttcagatataaaaatctgttttcaccgtgactttcaaaccaattaatgcaccgaacatccatttatagaatttagaaatatattttcatttaaatgaatcccaaacattggggaagagccgtatggaccattatttttatagtactttcgcaagcgggtttagacggcaacatagaagcgtgtaaacgaaaactatatactatagttagcactcttccatgtcctgcatgtagacggcacgcgactatcgctatagaggacaataatgtcatgtctagcgatgatctgaattatatttattattttttcatcagattatttaacaatttggcatctgatcccaaatacgcgatcgatgtgacaaaggttaaccctttataaacttaacccattataaaacttatgattagtcacaactgaaataaccgcgtgattattttttggtataattctacacggcatggtttctgtgactatgaattcaacccccgttacattagtgaaatctttaacaaacagcaagggttcgtcaaagacataaaactcattgtttacaatcgaaatagaccccctatcacacttaaaataaaaaatatccttatcctttaccaccaaataaaattctgattggtcaatgtgaatgtattcacttaacagttccacaaatttatttattaactccgaggcacatacatcgtcggtattttttatggcaaactttactcttccagcatccgtttctaaaaaaatattaacgagttccatttatatcatccaatattattgaaatgacgttgatggacagatgatacaaataagaaggtacggtacctttgtccaccatctcctccaattcatgctctattttgtcattaactttaatgtatgaaaacagtacgccacatgcttccatgacagtgtgtaacactttggatacaaaatgtttgacattagtataattgtccaagactgtcaatctataatagatagtagctataatatattctatgatggtattgaagaagatgacaaccttggcatattgatcatttaacacagacatggtatcaacagatagcttgaatgaaagagaatcagtaattggaataagcgtcttctcgatagagtgtccgtataccaacatgtctgatattttgatgtattccattaaattatttagttttttctttttattctcgttaaacagcatttctgtcaacggaccccaacatcgttgaccgattaagttttgattgatttttccgtgtaaggcgtatctagtcagatcgtatagcctatccaataatccatcgtctgtgtgtagatcacatcgtacactttttaattctctatagaagagcgacagacatctggagcaattacagacagcaatttctttattctctacagatgtaagatacttgaagacattcctatgatgatgcagaattttggataacacggtattgatggtatctgttaccataattcctttgatggctgatagtgtcagagcacaagatttccaatctttgacaatttttagcaccattatctttgttttgatatctatatcagacagcatggtgcgtctgacaacacagggattaagacggaaagatgaaatgattctctcaacatcttcaatagataccttgctattttttctggcattatctatatgtgcgagaatatcctctagagaatcagtatcctttttgatgatagtggatctcaatgacatgggacgtttaaaccttcttattctatcaccagattgcatggtgatttgtcttctttcttttatcataatgtaatctctaaattcatcggcaaattgtctatatctaaaatcataatatgagatgtttacctctacaaatatctgttcgtccaatgttagagtatttacatcagttttgtattccaaattaaacatggcaacggatttaattttatattcctctattaagtcctcgtcgataataacagaatgtagataatcatttaatccgtcgtacatggttggaagatgcttgttgacaaaatctttaattgtcttgatgaaggtgggactatatctaacatcttgattaataaaatttataacattgtccataggatactttgtaactagttttatacacatctcttcatcggtaagtttagacagaatatcgtgaacaggtggtatattatattcatcagatatacgaagaacaatgtccaaatctatattgtttaatatattatatagatgtagcgtagctcctacaggaatatctttaactaagtcaatgatttcatcaaccgttagatctattttaaagttaatcatataggcattgatttttaaaaggtatgtagccttgactacattctcattaattaaccattccaagtcattgtgtgtaagaagattatattctatcataagcttgactacatttggtcccgataccattaaagaattcttatgatataaggaaacagattttaggtactcatctactctacaagaattttggagagccttaacgatatcagtgacgtttattatttcaggaggaaagaatctaacattgagaatatcggaattaatagcttccagatacagtgattttggcaatagtccgtgtaatccataatccagtaacacgagctggtgcttgctagacaccttttcaatgtttaatttttttgaaataagctttgataaagccttcctcgcaaattccggatacatgaacatgtcggcgacatgattaagtattgttttttcattatttttatattttctcaacaagttctcaataccccaatagatgatagaatatcacccaatgcgtccatgttgtctatttccaacaggtcgctatatccaccaatagaagtttttccaaaaaagattctaggaacagttctaccaccagtaatttgttcaaaataatcccgcaattcattttcgggtttaaattctttaatatcgacaatttcatacgctcctcttttgaaactaaacttatttagaatatccagtgcatttctacaaaaaggacatgtatacttgacaaaaattgtcactttgttattggccaacctttgttgtacaaattcctcggccattttaatatttaagtgatataaaactatctcgacttatttaactctttagtcgagatatatggacgcagatagctatatgatagccaactacagaaggcaaacgctataaaaaacataattacgacgagcatatttataaatatttttattcagcattacttgatatagtaatattaggcacagtcaaacattcaaccactctcgatacattaactctctcattttctttaacaaattctgcaatatcttcgtaaaaagattcttgaaactttttagaatatctatcgactctagatgaaatagcgttcgtcaacatactatgttttgtatacataaaggcgcccattttaacagtttctagtgacaaaatgctagcgatcctaggatcctttagaatcacatagattgacgattcgtctctcttagtaactctagtaaaataatcatacaatctagtacgcgaaataatattatccttgacttgaggagatctaaacaatctagttttgagaacatcgataagttcatcgggaatgacatacatactatctttaatagaactcttttcatccagttgaatggattcgtccttaaccaactgattaatgagatcttctattttatcattttccagatgatatgtatgtccattaaagttaaattgtgtagcgcttctttttagtctagcagccaatactttaacatcactaatatcgatatacaaaggagatgatttatctatggcattaagaattcgtttttcgacatccgtcaaaaccaattcctttttgcctgtatcatccagttttccatcctttgtaaagaaattattttctactagactattaataagactgataaggattcctccataattgcacaatccaaactttttaacaaaactagactttacgagatctacaggaatgcgtacttcaggttttttagcttgtgattttttcttttgcggacattttctagtaaccaactcatctaccatttcattgattttagcagtgaaataagctttcaatgcacgggcactgatactattgaaaacgagttgatcttcaaattccgccatttaagttcaccaaacaacttttaaatacaaatatatcaatagtagtagaataagaactataaaaaaaataataattaaccaaccccaacaaccggtattattagttgatgtggtagttttctcatcacttagaacagatttaacaatttctataaagtctgtcaaatcatcttccggagaccccataaatacaccaaatatagcggcgtacaacttatccatttatacattgaatattggcttttctttatcgctatcttcatcatattcatcatcaatatcaacaagtcccagattacgagccagatcttcttctacattttcagtcattgatacacgttcactatctccagagagtccgataacgttagccaccacttctctatcaatgattagtttcttgagcgcgaaagtaatttttgtttccgttccggatctatagaagacgataggtgtgataattgccttggccaattgtctttctcttttactgagtgattctagttcaccttctatagatctgagaatggatgattctccagtcgaaacatattctaccatggatccgtttaatttgttgatgaagatggattcatccttaaatgttttctctgtaatagtttccaccgaaagactatgcaaagaatttggaatgcgttccttgtgcttaatgtttccatagacggcttctagaagttgatacaacataggactagccgcggtaacttttatttttagaaagtatccatcgcttctatcttgtttagatttatttttataaagtttagtctctccttccaacataataaaagtggaagtcatttgactagataaactatcagtaagttttatagagatagacgaacaattagcgtattgagaagcatttagtgtaacgtattcgatacattttgcattagatttactaatcgattttgcatactctataacacccgcacaagtctgtagagaatcgctagatgcagtaggtcttggtgaagtttcaactctcttcttgattaccttactcatgattaaacctaaataattgtactttgtaatataatgatatatattttcactttatctcatttgagaataaaaatgtttttgtttaaccactgcatgatgtacagatttcggaatcgcaaaccaccagtggttttattttatccttgtccaatgtgaattgaatgggagcggatgcgggtttcgtacgtagatagtacattcccgtttttagaccgagactccatccgtaaaaatgcatactcgttagtttggaataactcggatctgctatatggatattcatagattgactttgatcgatgaaggctcccctgtctgcagccatttttatgatcgtcttttgtggaatttcccaaatagttttataaactcgcttaatatcttctggaaggtttgtattctgaatggatccaccatctgccataatcctattcttgatctcatcattccataattttctctcggttaaaactctaaggagatgcggattaactacttgaaattctccagacaatactctccgagtgtaaatattactggtatacggttccaccgactcattatttcccaaaatttgagcagttgatgcagtcggcataggtgccaccaataaactatttctaagaccgtatgttctgattttatcttttagaggttcccaattccaaagatccgacggtacaacattccaaagatcatattgtagaataccgttactggcgtacgatcctacatatgtatcgtatggtccttccttctcagctagttcacaactcgcctctaatgcaccgtaataaatggtttcgaagatcttcttatttagatcttgtgcttccaggctatcaaatggataatttaagagaataaacgcgtccgctaatccttgaacaccaataccgataggtctatgtctcttattagagatttcagcttctggaataggataataattaatatctataattttattgagatttctgacaattactttgaccacatccttcagtttgagaaaatcaaatcgcccatctattacaaacatgttcaaggcaacagatgccagattacaaacggctacctcattagcatccgcatattgtattatctcagtgcaaagattactacacttgatagttcctaaattttgttgattactctttttgttacacgcatccttataaagaatgaatggagtaccagtttcaatctgagattctataatcgctttccagacgactcgagcctttattatagatttgtatctcctttctctttcgtatagtgtatacaatcgttcgaactcgtctccccaaacattgtccaatccaggacattcatccggacacatcaacgaccactctccgtcatccttcactcgtttcataaagagatcaggaatccaaagagctataaatagatctctggttctatgttcctcgtttcctgtattctttttaagatcgaggaacgccataatatcagaatgccacggttccaagtatatggccataactccaggccgtttgtttcctccctgatctatgtatctagcggtgttattataaactctcaacattggaataataccgtttgatataccattggtaccggagatatagcttccactggcacgaatattactaattgatagacctattccccctgccattttagagattaatgcgcatcgttttaacgtgtcatagataccctctatgctatcatcgatcatgttaagtagaaaacagctagacatttggtgacgactagttcccgcattaaataaggtaggagaagcgtgcgtaaaccatttttcagaaagtagattgtacgtctcaatagctgagtctatatcccattgatgaattcctactgcgacacgcattaacatgtgctgaggtctttcaacgatcttgttgtttattttcaacaagtaggatttttccaaagttttaaaaccaaaatagttgtatgaaaagtctcgttcgtaaataataaccgagttgagtttatccttatatttgttaactatatccatggtgatacttgaaataatcggagaatgtttcccatttttaggattaacatagttgaataaatcctccatcacttcactaaatagtttttttgtttccttgtgtagatttgatacggctattctggcggctagaatggcataatccggatgttgtgtagtacaagtggctgctatttcggctgccagagtgtccaattctaccgttgttactccattatatattccttgaataaccttcatagctattttaataggatctatatgatccgtgtttaagccataacataattttctaatacgagacgtgattttatcaaacatgacattttccttgtatccatttcgtttaatgacaaacatttttgttggtgtaataaaaaaattatttaacttttcattaatagggatttgacgtatgtagcgtacaaaatgattgttcctggtatatagataaagagtcctatatatttgaaaatcgttacggctcgattaaactttaatgattgcatagtgaatatatcattaggatttaactccttgactatcatggcggcgccagaaattaccatcaaaagcattaatacagttataccgatcgcagttagaacggttatagcatccaccatttatatctaaaaattagatcaaagaatatgtgacaaagtcctagttgtatactgagaattgacgaaacaatgtttcttacatatttttttcttattagtaaccgacttaatagtaggaactggaaaactagacttgattattctataagtatagatacccttccaaataatattctctttgataaaagttccagaaaatgtagaattttttaaaaagttatcttttgctattaccaagattgtgtttagacgcttattattaatatgagtgatgaaatccacaccgcctctagatatcgcctttatttccacattagatggtaaatccaatagtgaaactatctttttaggaatgtatggactcgcgtttagaggagtaaacgtcttaggcgtcggaaaggatgattcatcaaacgaataaacaatttcacaaatggatgttaatgtattagtaggaaattttttgacgctattggaattgaagattctaatggatgatgttctacctatttcatccgataacatgttaatttccgacaccaacggttttaatatttcgatgatatacggtagtctctctttcggacttatatagcttattccacaatacgagtcattatatactccaaaaaacaaaataactagtataaaatctgtatcgaatgggaaaaacgaaattatcgacataggtatagaatccggaacattgaacgtattaatacttaattctttttctgtggtaagtaccgataggttattgacattgtatggttttaaatattctataacttgagacttgatagatattagtgatgaattgaaaattatttttatcaccacgtgtgtttcaggatcatcgtcgacgcccgtcaaccaaccgaacggagtaaaataaatatcattaatatatgctctagatattagtatttttatcaatcctttgattatcatcttctcgtaggcgaatgattccatgatcaagagtgatttaagaacatcctccggagtattaatgggcttagtaaacagtccatcgttgcaataataaaagttatccaagttaaaggatattatgcattcgtttaaagatatcacctcatctgacggagacaattttttggtaggttttagagactttgaagctacttgtttaacaaagttattcatcgtcgtctactattctatttaattttgtagttaatttatcacatatcacattaattgactttttggtccacttttccatacgtttatattcttttaatcctgcgttatccgtttccgttatatccagggatagatcttgcaagttaaatagaatgctcttaaataatgtcattttcttatccgctaaaaatttaaagaatgtataaacctttttcagagatttgaaactcttaggtggtgtcctagtacacaatatcataaacaaactaataaacattccacattcagattccaacagctgattaacttccacattaatacagcctattttcgctccaaatgtacattcgaaaaatctgaataaaacatcgatgtcacaatttgtattatccaatacagaatgtttgtgattcgtgttaaaaccatcggagaaggaatagaaataaaaattattatagtggtggaattcagttggaatattgcctccggagtcataaaaggatactaaacattgttttttatcataaattacacatttccaatgagacaaataacaaaatccaaacattacaaatctagaggtagaacttttaattttgtctttaagtatatacgataagatatgtttattcataaacgcgtcaaatttttcatgaatcgctaaggagtttaagaatctcatgtcaaattgtcctatataatccacttcggatccataagcaaactgagagactaagttcttaatacttcgattgctcatccaggctcctctctcaggctctattttcatcttgacgacctttggattttcaccagtatgtattcctttacgtgataaatcatcgattttcaaatccatttgtgagaagtctatcgccttagatactttttcccgtagtcgaggtttaaaaaaatacgctaacggtatactagtaggtaactcaaagacatcatatatagaatggtaacgcgtctttaactcgtcggttaactctttcttttgatcgagttcgtcgctactattgggtctgctcaggtgccccgactctactagttccaacatcataccgataggaatacaagacactttgccggcggttgtagatttatcatatttttccactacatatccgttacaatttgttaaaaatttagatacatctatattgctacataatccagctagtgaatatatatgacataataaattggtaaatcctagttctggtattttactaattactaaatctgtatatctttccatttatcatggaaaagaatttaccagatatcttcttttttccaaactgcgttaatgtattctcttacaaatattcacaagatgaattcagtaatatgagtaaaacggaacgtgatagtttctcattggccgtgtttccagttataaaacatagatggcataacgcacacgttgtaaaacataaaggaatatacaaagttagtacagaagcacgtggaaaaaaagtatctcctccatcactaggaaaacccgcacacataaacctaaccgcgaagcaatatatatacagtgaacacacaataagctttgaatgttatagttttctaaaatgtataacaaatacagaaatcaattcgttcgatgagtatatattaagaggactattagaagctggtaatagtttacagatattttccaattccgtaggtaaacgaacagatactataggtgtactagggaataagtatccatttagcaaaattccattggcctcattaactcctaaagcacaacgagagatattttcagcgtggatttctcatagacctgtagttttaactggaggaactggagtgggtaagacgtcacaggtacccaagttattgctttggtttaattatttatttggtggattctctactctagataaaatcactgactttcacgaaagaccagtcattctatctcttcctaggatagctttagttagattgcatagcaataccattttaaaatcattgggatttaaggtactagatggatctcctatttctttacggtacggatctataccggaagaattaataaacaaacaaccaaaaaaatatggaattgtattttctacccataagttatctctaacaaaactatttagttatggcactcttattatagacgaagttcatgagcatgatcaaataggagatattattatagcagtagcgagaaagcatcatacgaaaatagattctatgtttttaatgactgccacgttagaggatgacagggaacggctaaaagtatttttacctaatcccgcatttatacatattcctggagatacactgtttaaaattagcgaggtatttattcataataagataaatccatcttccagaatggcatacatagaagaagaaaagagaaatttagttactgctatacagatgtatactcctcctgatggatcatccggtatagtctttgtggcatccgttgcacagtgtcacgaatataaatcatatttagaaaaaagattaccgtatgatatgtatattattcatggtaaggtcttagatatagacgaaatattagaaaaagtgtattcatcacctaatgtatcgataattatttctactccttatttggaatccagcgttactatacgcaatgttacacacatttatgatatgggtagagtttttgtccccgctccttttggaggatcgcaacaatttatttctaaatctatgagagatcaacgaaaaggaagagtaggaagagttaatcctggtacatacgtctatttctatgatctgtcttatatgaagtctatacagcgaatagattcagaatttctacataattatatattgtacgctaataagtttaatctaacactccccgaagatttgtttataatccctacaaatttggatattctatggcgtacaaaggaatatatagactcgttcgatattagtacagaaacatggaataaattattatccaattattatatgaagatgatagagtatgctaaactttatgtactaagtcctattctcgctgaggagttggataactttgagaggacgggagaattaactagtattgtacgagaagccattttatctctaaatttacaaattaagattttaaattttaaacataaagatgatgatacgtatatacacttttgtaaaatattattcggtgtctataacggaacaaacgctactatatattatcatagacctctaacgggatatatgaatatgatttcagatactatatttgttcctgtagataataactaaaaatcaaactctaatgaccacatctttttttagagatgaaaaattttccacatctccttttgtagacacgactaaacattttgcagaaaaaagtttattagtgtttagataatcgtatacttcatcagtgtagatagtaaatgtgaacagataaaaggtattcttgctcaatagattggtaaattccatagaatatattaatcctttcttcttgagatcccacatcatttcaaccagagacgttttatccaatgatttacctcgtactataccacatacaaaactagattttgcagtgacgtcgtacctggtattcctaccaaacaaaattttacttttagttcttttagaaaattctaaggtagaatctctatttgccaatatgtcatctatggaattaccactagcaaaaaatgatagaaatatatattgatacatcgcagctggttttgatctactatactttaaaaacgaatcagattccataattgcctgtatatcatcagctgaaaaactatgttttacacgtattccttcggcatttctttttaatgatatatcttgtttagacaatgataaagttatcatgtccatgagagacgcgtctccgtatcgtataaatatttcattagatgttagacgcttcattaggggtatacttctataaggtttcttaatcagtccatcattggttgcgtcaagaactactatcggatgttgttgggtatctctagtgttacacatggccttactaaagtttgggtaaataactatgatatctctattaattatagatgcatatatttcattcgtcaaggatattagtatcgacttgctatcgtcattaatacgtgtaatgtaatcatataaatcatgcgatagccaaggaaaatttaaatagatgttcatcatataatcgtcgctataattcatattaatacgttgacattgactaatttgtaatatagcctcgccacgaagaaagctctcgtattcagtttcatcgataaaggataccgttaaatataactggttgccgatagtctcatagtctattaagtggtaagtttcgtacaaatacagaatccctaaaatattatctaatgttggattaatctttaccataactgtataaaatggagacggagtcataactattttaccgtttgtacttactggaatagatgaaggaataatctccggacatgctggtaaagacccaaatgtctgtttgaagaaatccaatgttccaggtcctaatctcttaacaaaaattacgatattcgatcccgatatcctttgcattctatttaccagcatatcacgaactatattaagattatctatcatgtctattctcccaccgttatataaatcgcctccgctaagaaacgttagtatatccatacaatggaatacttcatttctaaaatagtattcgttttctaattctttaatgtgaaatcgtatactagaaagggaaaaattatctttgagttttccgttagaaaagaaccacgaaactaatgttctgattgcgtccgattccgttgctgaattaatggatttacaccaaaaactcatataacttctagatgtagaagcattcgctaaaaaattagtagaatcaaaggatataagtagatgttccaacaagtgagcaattcccaagatttcatctatatcattctcgaatccgaaattagaaattcccaagtagatatcctttttcatccgatcgttgatgaaaatacgaactttattcggtaagacaatcatttactaaggagtaaaataggaagtaatgttcgtatgtcgttatcatcgtataaattaaaggtgtgttttttaccattaagtgacattataattttaccaatattggaattataatataggtgtatttgcgcactcgcgacggttgatgcatcggtaaatatagctgtatctaatgttctagtcggtatttcatcatttcgctgtctaataatagcgttttctctatctgtttccattacagctgcctgaagtttattggtcggataatatgtaaaataataagaaatacatacgaataacaaaaataaaataagatataataaagatgccatttagagatctaattttgtttaacttgtccaaattcctacttacagaagatgaggaatcgttggagatagtgtcttccttatgtagaggatttgaaatatcttataatgacttgataacttactttccagataggaaataccataaatatatttataaagtatttgaacatgtagatttatcggaggaattaagtatggaattccatgatacaactctgagagatttagtctatcttagattgtacaagtattccaagtgtatacggccgtgttataaattaggagataatctaaaaggcatagttgttataaaggacaggaatatttatattagggaagcaaatgatgacttgatagaatatctcctcaaggaatacactcctcagatttatacatattctaatgagcgcgtccccataactggttcaaaattaattctttgtggattttctcaagttacatttatggcgtatacaacgtcgcatataacaacaaataaaaaggtagatgttctcgtttccaaaaaatgtatagatgaactagtcgatccaataaattatcaaatacttcaaaatttatttgataaaggaagcggaacaataaacaaaatactcaggaagatattttattcggtaacaggtggccaaactccataggtagctttttctatttcggattttagaatttccaaattcaccagcgatttatcggttttggtgaaatccaaggatttattaatgtccacaaatgccatttgttttgtctgtggattgtatttgaaaatggaaacgatgtagttagatagatgcgctgcgaagtttcctattagggttccgcgcttcacgtcacccagcatacttgaatcaccatcctttaaaaaaaatgataagatatcaacatggagtatatcatactcgaattttaattcttctactgactcactgacattttcacaaatactacaatacggtttaccgaaaataatcagtacgttcttcatttatgggtatcaaaaacttaaaatcgttactgctggaaaataaatcactgacgatattagatgataatttatacaaagtatacaatggaatatttgtggatacaatgagtatttatatagccgtcgccaattgtgtcagaaacttagaagagttaactacggtattcataaaatacgtaaacggatgggtaaaaaagggagggcatgtaaccctttttatcgatagaggaagtataaaaattaaacaagacgttagagacaagagacgtaaatattctaaattaaccaaggacagaaaaatgttagaattagaaaagtgtacatccgaaatacaaaatgttaccggatttatggaagaagaaataaaggcagaaatgcaattaaaaatcgataaactcacatttcaaatatatttatctgattctgataacataaaaatatcattgaatgagatactaacacatttcaacaataatgagaatgttacattattttattgtgatgaacgagacgcagaattcgttatgtgtctcgaggctaaaacacatttctctaccacaggagaatggccgttgataataagtaccgatcaggatactatgctatttgcatctgctgataatcatcctaagatgataaaaaacttaactcaactgtttaaatttgttccctcggcagaggataactatttagcaaaattaacggcgttagtgaatggatgtgatttctttcctggactctatggggcatctataacacccaccaacttaaacaaaatacaattgtttagtgattttacaatcgataatatagtcactagtttggcaattaaaaattattatagaaagactaactctaccgtagacgtgcgtaatattgttacgtttataaacgattacgctaatttagacgatgtctactcgtatattcctccttgtcaatgcactgttcaagaatttatattttccgcattagatgaaaaatggaatgaatttaaatcatcttatttagaaagcgtgccgttaccctgccaattaatgtacgcgttagaaccacgcaaggagattgatgtttcagaagttaaaactttatcatcttatatagatttcgaaaatactaaatcagatatcgatgttataaaatctatatcctcgatcttcggatattctaacgaaaactgtaacacgatagtattcggcatctataaggataatttactactgagtataaataattcattttactttaacgatagtctgttaataaccaatactaaaagtgataatataataaatataggttactagattaaaaatggtgttccaactcgtgtgctctacatgcggtaaagatatttctcacgaacgatataaattgattatacgaaaaaaatcattaaaggatgtactcgtcagtgtaaagaacgaatgttgtaggttaaaattatctacacaaatagaacctcaacgtaacttaacagtgcaacctctattggatataaactaatatggatccggttaattttatcaagacatatgcgcctagaggttctattatttttattaattataccatgtcattaacaagtcatttgaatccatcgatagaaaaacatgtgggtatttattatggtacgttattatcggaacacttggtagttgaatctacctatagaaaaggagttcgaatagtcccattggatagtttttttgaaggatatcttagtgcaaaagtatacatgttagagaatattcaagttatgaaaatagcagctgatacgtcattaactttattgggtattccgtatggatttggtcatgatagaatgtattgttttaaattggtagctgactgttataaaaatgccggtattgatacatcgtctaaacgaatattgggcaaagatatttttctgagccaaaacttcacagacgataatagatggataaagatatatgattctaataatttaacattttggcaaattgattaccttaaagggtgagttaatatgcataactactcctccgttgttttttccctcgttctttttcttaacgttgtttgccatcactctcataatgtaaagatattctaaaatggtaaacttttgcatatcggacgcagaaattggtataaatgttgtaattgtattatttcccgtcaatggactagtcacagctccatcagttttatatcctttagagtatttctcactcgtgtctaacattctagagcattccatgatctgtttatcgttgatattggccggaaagatagattttttattttttattatattactattggcaattgtagatataacttctggtaaatatttttctaccttttcaatctcttctattttcaagccggctatatattctgctatattgttgctagtatcaataccttttctggctaagaagtcatatgtggtattcactatatcagttttaactggtagttccattagcctttccacttctgcagaataatcagaaattggttctttaccagaaaatccagctactataataggctcaccgatgatcattggcaaaatcctatattgtaccagattaatgagagcatatttcatttccaataattctgctagttcttgagacattgatttatttgatgaatctagttggttctctagatactctaccatttctgccgcatacaataacttgttagataaaatcagggttatcaaagtgtttagcgtggctagaatagtgggcttgcatgtattaaagaatgcggtagtatgagtaaaccgttttaacgaattatatagtctccagaaatctgtggcgttacatacatgagccgaatgacatcgaagattgtccaatatttttaatagctgctctttgtccattatttctatatttgactcgcaacaattgtagataccattaatcaccgattcctttttcgatgccggacaatagcacaattgtttagctttggactctatgtattcagaattaatagatatatctctcaatacagattgcactatacattttgaaactatgtcaaaaattgtagaacgacgctgttctgcagccatttaactttaaataatttacaaaaatttaaaatgagcatccgtataaaaatcgataaactgcgccaaattgtggcatatttttcagagttcagtgaagaagtgtctataaatgtagactcgacggatgagttaatgtatatttttgccgccttgggcggatctgtaaacatttgggcaattatacctctaagtgcatcagtgttttaccgaggagccgaaaatattgtgtttaatcttcctgtgtccaaggtaaaatcgtgtttgtgtagttttcacaatgatgccatcatagatatagaacctgatctggaaaataatctagtaaaactttctagttatcatgtagtaagtgtcgattgtaacaaggaactgatgcctattaggacagatactactatttgtctaagtatagatcaaaagaaatcttacgtgtttaattttcacaagtatgaagaaaaatgttgtggtagaaccgtcattcatctagaatggttgttgggctttatcaagtgtattagtcagcatcagcatctggctattatgtttaaagatgacaatattattatgaagactcctggtaatactgatgcgttttccagggaatattctatgactgaatgttctcaagaactacaaaagttttctttcaaaatagctatctcgtctctcaacaaactacgaggattcaaaaagagagtcaatgtttttgaaactagaatcgtaatggataatgacgataacattttaggaatgttgttttcggatagagttcaatcctttaagatcaacatctttatggcgtttttagattaatactttcaatgagataaatatgggtggcggagtaagtgttgagctccctaaacgggatccgcctccgggagtacccactgatgagatgttattaaacgtggataaaatgcatgacgtgatagctcccgctaagcttttagaatatgtgcatataggaccactagcaaaagataaagaggataaagtaaagaaaagatatccagagtttagattagtcaacacaggacccggtggtctttcggcattgttaagacaatcgtataatggaaccgcacccaattgctgtcgcacttttaatcgtactcattattggaagaaggatggaaagatatcagataagtatgaagagggtgcagtattagaatcgtgttggccagacgttcacgacactggaaaatgcgatgttgatttattcgactggtgtcagggggatacgttcgatagaaacatatgccatcagtggatcggttcagcctttaataggagtaatagaactgtagagggtcaacaatcgttaataaatctgtataataagatgcaaacattatgtagtaaagatgctagtgtaccaatatgcgaatcatttttgcattatttacgcgcacacaatacagaagatagcaaagagatgatcgattatattctaagacaacagtctgcggactttaaacagaaatatatgagatgtagttatcccactagagataagttagaagagtcattaaaatatgcggaacctcgagaatgttgggatccagagtgttcgaatgccaatgttaatttcttactaacacgtaattataataatttaggactttgcaatattgtacgatgtaataccagcgtgaacaacttacagatggataaaacttcctcattaagattgtcatgtggattaagcaatagtgatagattttctactgttcccgtcaatagagcaaaagtagttcaacataatattaaacactcgttcgacctaaaattgcatttgatcagtttattatctctcttggtaatatggatactaattgtagctatttaaatgggtgccgcggcaagcatacagacgacggtgaatacactcagcgaacgtatctcgtctaaattagaacaagaagcgaacgctagtgctcaaacaaaatgtgatatagaaatcggaaatttttatatccgacaaaaccatggatgtaacctcactgttaaaaatatgtgctctgcggacgcggatgctcagttggatgctgtgttatcagccgctacagaaacatatagtggattaacaccggaacaaaaagcatacgtgccagctatgtttactgctgcgttaaacattcagacgagtgtaaacactgttgttagagattttgaaaattatgtgaaacagacttgtaattctagcgcggtcgtcgataacaaattaaagatacaaaacgtaatcatagatgaatgttacggagccccaggatctccaacaaatttggaatttattaatacaggatctagcaaaggaaattgtgccattaaagcgttgatgcaattgacgactaaggccactactcaaatagcacctagacaagttgctggtacaggagttcagttttatatgattgttatcggtgttataatattggcagcgttgtttatgtactatgccaagcgtatgttgttcacatccaccaatgataaaatcaaacttattttagccaataaggaaaacgtccattggactacttacatggacacattctttagaacttctccgatggttattgctaccacggatatgcaaaactgaaaatatattgataatattttaatagattaacatggaagttatcgctgatcgtctagacgatatagtgaaacaaaatatagcggatgaaaaatttgtagattttgttatacacggtctagagcatcaatgtcctgctatacttcgaccattaattaggttgtttattgatatactattatttgttatagtaatttatatttttacggtacgtctagtaagtagaaattatcaaatgttgttggtggtgctagtcatcacattaactattttttattactttatactataatagtactagactgacttctaacaaacatctcacctgccataaataaatgcttgatattaaagtcttctatttctaacactattccatctgtggaaaataatactctgacattatcgctaattgacacatcggtgagtgatatgcctataaagtaataatcttctttgggcacatataccagtgtaccaggttctaacaacctatttactggtgctcctgtagcatactttttctttaccttgagaatatccatcgtttgcttggtcaatagcgatatgtgattttttatcaaccactcaaaaaagtaattggagtgttcatatcctctacgggctattgtctcatggccgtgtatgaaatttaagtaacacgactgtggtagatttgttctatagagccgattgccgcaaatagatagaactaccaatatgtctgtacaaatgttaaacattaattgattaacagaaaaaacaatgttcgttctgggaatagaaaccagatcaaaacaaaattcgttagaatatatgccacgtttatacatggaatataaaataactacagtttgaaaaataacagtatcatttaaacatttaacttgcggggttaatctcacaactttactgtttttgaactgttcaaaatatagcatcgatccgtgagaaatacgtttagccgcctttaatagaggaaatcccaccgcctttctggatctcaccaacgacgatagttctgaccagcaactcatttcttcatcatccacctgttttaacatataataggcaggagatagatatccgtcattgcaatattccttctcgtaggcacacaatctaatattgataaaatctccattctcttctctgcatttattatcttgtctcggtggctgattaggctgtggtcttggtttaggccttggtctatcgttgttgaatctattttggtcattaaatctttcatttcttcctggtatatttctatcacctcgtttggttggatttttgtctatattatcgtttgtaacatcggtacgggtattcatttatcacaaaaaaaacttctctaaatgagtctactgctagaaaacctcatcgaagaagataccatattttttgcaggaagtatatctgagtatgatgatttacaaatggttattgccggcgcaaaatccaaatttccaagatctatgctttctatttttaatatagtacctagaacgatgtcaaaatatgagttggagttgattcataacgaaaatatcacaggagcaatgtttaccacaatgtataatataagaaacaatttgggtctaggagatgataaactaactattgaagccattgaaaactatttcttggatcctaacaatgaagttatgcctcttattattaataatacggatatgactgccgtcattcctaaaaaaagtggtaggagaaagaataagaacatggttatcttccgtcaaggatcatcacctatcttgtgcattttcgaaactcgtaaaaagattaatatttataaagaaaatatggaatccgcgtcgactgagtatacacctatcggagacaacaaggctttgatatctaaatatgcgggaattaatgtcctgaatgtgtattctccttccacatccataagattgaatgccatttacggattcaccaataaaaataaactagagaaacttagtactaataaggaactagaatcgtatagttctagccctcttcaagaacccattaggttaaatgattttctgggactattggaatgtgttaaaaagaatattcctctaacagatattccgacaaaggattgattactataaatggagaatgttcctaatgtatactttaatcctgtgtttatagagcccacgtttaaacattctttattaagtgtttataaacacagattaatagttttatttgaagtattcgttgtattcattctaatatatgtattttttagatctgaattaaatatgttcttcatgcctaaacgaaaaatacccgatcctattgatagattacgacgtgctaatctagcgtgtgaagacgataaattaatgatctatggattaccatggatgacaactcaaacatctgcgttatcaataaatagtaaaccgatagtgtataaagattgtgcaaagcttttgcgatcaataaatggatcacaaccagtatctcttaacgatgttcttcgcagatgatgattcattttttaagtatttggctagtcaagatgatgaatcttcattatctgatatattgcaaatcactcaatatctagactttctgttattattattgatccaatcaaaaaataaattagaagctgtgggtcattgttatgaatctctttcagaggaatacagacaattgacaaaattcacagactttcaagattttaaaaaactgtttaacaaggtccctattgttacagatggaagggtcaaacttaataaaggatatttgttcgactttgtgattagtttgatgcgattcaaaaaagaatcctctctagctaccaccgcaatagatcctgttagatacatagatcctcgtcgcaatatcgcattttctaacgtgatggatatattaaagtcgaataaagtgaacaataattaattctttattgtcatcatgaacggcggacatattcagttgataatcggccccatgttttcaggtaaaagtacagaattaattagacgagttagacgttatcaaatagctcaatataaatgcgtgactataaaatattctaacgataatagatacggaacgggactatggacgcatgataagaataattttgaagcattggaagcaactaaactatgtgatgtcttggaatcaattacagatttctccgtgataggtatcgatgaaggacagttctttccagacattgtttaattctgtgagcgtatggcaaacggtaccgagctcggtttggaattagtgaaagcttaaaaattgaaattttattttttttttttggaatataaataagctcgaagtcgaccaccatgttcttggctgttttgtattgccttctgtggagtttccagatctctgatggccattttcctcgagcctgtgcctcctctaagaacttgttggcaaaagaatgctgcccaccatggatgggtgatgggagtccctgcggccagctttcaggcagaggttcctgccaggatatccttctgtccagtgcaccatctggacctcagttccccttcaaaggggtggatgaccgtgagtcctggccctctgtgttttataataggacctgccagtgctcaggcaacttcatgggtttcaactgcggaaactgtaagtttggatttgggggcccaaattgtacagagaagcgagtcttgattagaagaaacatttttgatttgagtgtctccgaaaagaataagttcttttcttacctcactttagcaaaacatactatcagctcagtctatgtcatccccacaggcacctatggccaaatgaacaatgggtcaacacccatgtttaatgatatcaacatctacgacctctttgtatggatgcattactatgtgtcaagggacacactgcttgggggctctgaaatatggagggacattgattttgcccatgaagcaccagggtttctgccttggcacagacttttcttgttattgtgggaacaagaaattcgagaactaactggggatgagaacttcactgttccatactgggattggagagatgcagaaaactgtgacatttgcacagatgagtacttgggaggtcgtcaccctgaaaatcctaacttactcagcccagcatccttcttctcctcctggcagatcatttgtagcagatcagaagagtataatagccatcaggttttatgcgatggaacacctgagggaccactattacgtaatcctggaaaccatgacaaagccaaaacccccaggctcccatcttcagcagatgtggaattttgtctgagtttgacccagtatgaatctggatcaatggatagaactgccaatttcagctttagaaacacactggaaggatttgccagtccactcacagggatagcagatccttctcaaagtagcatgcacaatgccttacatatctttatgaatggaacaatgtcccaagtacagggatcggccaacgatcccatttttcttcttcaccatgcttttgtggacagtatttttgaacaatggctgcgaaggcaccgccctcttttggaagtttacccagaagccaatgcacctatcggccataacagagactcttacatggttcctttcataccgctctatagaaatggtgatttcttcataacatccaaggatctgggatatgactacagctacctccaagagtcagatccaggcttttacagaaattatattgagccttacttggaacaagccagtcgtatctggccatggcttcttggggcagcactggtgggagctgttattgctgcagctctctctgggcttagcagtaggctatgccttcagaagaagaagaagaagaagcaaccccaggaggaaaggcagccactcctcatggacaaagacgactaccacagcttgctgtatcagagccatctgtgattaattaatttttatcgatctaattcaacaatgtctggagagctcggatccttctgtgagcgtatggcaaacgaaggaaaaatagttatagtagccgcactcgatgggacatttcaacgtaaaccgtttaataatattttgaatcttattccattatctgaaatggtggtaaaactaactgctgtgtgtatgaaatgctttaaggaggcttccttttctaaacgattgggtgaggaaaccgagataaaccgagatagaaataataggaggtaatgatatgtatcaatcggtgtgtagaaagtgttacatcgactcataatattatattttttatctaaaaaactaaaaataaacattgattaaattttaatataatacttaaaaatggatgttgtgtcgttagataaaccgtttatgtattttgaggaaattgataatgagttagattacgaaccagaaagtgcaaatgaggtcgcaaaaaaactgccgtatcaaggacagttaaaactattactaggagaattattttttcttagtaagttacagcgacacggtatattagatggtgccaccgtagtgtatataggatctgctcccggtacacatatacgttatttgagagatcatttctataatttaggagtgatcatcaaatggatgctaattgacggccgccatcatgatcctattttaaatggattgcgtgatgtgactctagtgactcggttcgttgatgaggaatatctacgatccatcaaaaaacaactgcatccttctaagattattttaatttctgatgtgagatccaaacgaggaggaaatgaacctagtacggcggatttactaagtaattacgctctacaaaatgtcatgattagtattttaaaccccgtggcgtctagtcttaaatggagatgcccgtttccagatcaatggatcaaggacttttatatcccacacggtaataaaatgttacaaccttttgctccttcatattcagctgaaatgagattattaagtatttataccggtgagaacatgagactgactcgagttaccaaattagacgctgtaaattatgaaaaaaagatgtactaccttaataagatcgtccgtaacaaagtagttgttaactttgattatcctaatcaggaatatgactattttcacatgtactttatgctgaggaccgtgtactgcaataaaacatttcctactactaaagcaaaggtactatttctacaacaatctatatttcgtttcttaaatattccaacaacatcaactgaaaaagttagtcatgaaccaatacaacgtaaaatatctagcaaaaattctatgtctaaaaacagaaatagcaagagatccgtacgcggtaataaatagaaacgtactactgagatatactaccgatatagagtataatgatttagttactttaataaccgttagacataaaattgattctatgaaaactgtgtttcaggtatttaacgaatcatccataaattatactccggttgatgatgattatggagaaccaatcattataacatcgtatcttcaaaaaggtcataacaagtttcctgtaaattttctatacatagatgtggtaatatctgacttatttcctagctttgttagactagatactacagaaactaatatagttaatagtgtactacaaacaggcgatggtaaaaagactcttcgtcttcccaaaatgttagagacggaaatagttgtcaagattctctatcgccctaatataccattaaaaattgttagatttttccgcaataacatggtaactggagtagagatagccgatagatctgttatttcagtcgctgattaatcaattagtagagatgagataagaacattataataatcaataatatatcttatatcttatatcttatatcttatatcttgtttagaaaaatgctaatattaaaatagctaacgctagtaatccaatcggaagccatttgatatctataatagggtatctaatttcctgatttaaatagcggacagctatattctcggtagctactcgtttggaatcacaaacattatttacatctaatttactatctgtaatggaaacgtttcccaatgaaatggtacaatccgatacattgcattttgttatatttttttttaaagaggctggtaacaacgcatcgcttcgtttacatggctcgtaccaacaataatagggtaatcttgtatctattcctatccgtactatgcttttatcaggataaatacatttacatcgtatatcgtctttgttagcatcacagaatgcataaatttgttcgtccgtcatgataaaaatttaaagtgtaaatataactattatttttatagttgtaataaaaagggaaatttgattgtatactttcggttctttaaaagaaactgacttgataaaaatggctgtaatctctaaggttacgtatagtctatatgatcaaaaagagattaatgctacagatattatcattagtcatgttaaaaatgacgacgatatcggtaccgttaaagatggtagactaggtgctatggatggggcattatgtaagacttgtgggaaaacggaattggaatgtttcggtcactggggtaaagtaagtatttataaaactcatatagttaagcctgaatttatttcagaaattattcgtttactgaatcatatatgtattcactgcggattattgcgttcacgagaaccgtattccgacgatattaacctaaaagagttatcgggacacgctcttaggagattaaaggataaaatattatccaagaaaaagtcatgttggaacagtgaatgtatgcaaccgtatcaaaaaattactttttcaaagaaaaaggtttgtttcgtcaacaagttggatgatattaacgttcctaattctctcatctatcaaaagttaatttctattcatgaaaagttttggccattattagaaattcatcaatatccagctaacttattttatacagactactttcccatccctccgttgattattagaccggctattagtttttggatagatagtatacccaaagagaccaatgaattaacttacttattaggtatgatcgttaagaattgtaacttgaatgctgatgaacaggttatccagaaggcggtaatagaatacgatgatattaaaattatttctaataacactaccagtatcaatttatcatatattacatccggcaaaaataatatgattagaagttatatcgtcgcccgacgaaaagatcagaccgctagatctgtaattggtcccagtacatctatcaccgttaatgaggtaggaatgcccgcatatattagaaatacacttacagaaaagatatttgttaatgcctttacagtggataaagttaaacaactattagcgtcaaaccaagttaaattttactttaataaacgattaaaccaattaacaagaatacgccaaggaaagtttattaaaaataaaatacatttattgcctggtgattgggtagaagtagctgttcaagaatatacaagtattatttttggaagacagccgtctctacatagatacaacgtcatcgcttcatctatcagagctaccgaaggagatactatcaaaatatctcccggaattgccaactctcaaaatgctgatttcgacggggatgaggaatggatgatattagaacaaaatcctaaagctgtaattgaacaaagtattcttatgtatccgacgacgttactcaaacacgatattcatggagcccccgtttatggatctattcaagatgaaatcgtagcagcgtattcattgtttaggatacaagatctttgtttagatgaagtattgaacatcttggggaaatatggaagagagttcgatcctaaaggtaaatgtaaattcagcggtaaagatatctatacttacttgataggtgaaaagattaattatccgggtctcttaaaggatggtgaaattattgcaaacgacgtagatagtaattttgttgtggctatgaggcatctgtcattggctggactcttatccgatcataagtcgaacgtggaaggtatcaactttattatcaagtcatcttatgtttttaagagatatctatctatttacggttttggggtgacattcaaagatctgagaccaaattcgacgttcactaataaattggaggccatcaacgtagaaaaaatagaacttatcaaagaagcatacgccaaatatctcaacgatgtaagagacgggaaaatagttccattatctaaagctttagaggcggactatgtggaatccatgttatccaacttgacaaatcttaatatccgagagatagaagaacatatgagacaaacgctgatagatgatccagataataacctcctgaaaatggccaaagcgggttataaagtaaatcccacagaactaatgtatattctaggtacgtatggacaacaaaggattgatggtgaaccagcagagactcgagtattgggtagagttttaccttactatcttccagactctaaggatccagaaggaagaggttacattcttaattctttaacaaaaggattaacgggttctcaatattacttttcgatgctggttgccagatctcaatctactgatatcgtctgtgaaacatcacgtaccggaacactggctagaaaaatcattaaaaagatggaggatatggtggtcgacggatacggacaagtagttataggtaatacgctcatcaagtacgccgccaattataccaaaattctaggctcagtatgtaaacctgtagatcttatctatccagatgagtccatgacttggtatttggaaattagtgctctgtggaataaaataaaacagggattcgtttactctcagaaacagaaacttgcaaagaagacattggcgccgtttaatttcctagtattcgtcaaacccaccactgaggataatgctattaaggttaaggatctgtacgatatgattcataacgtcattgatgatgtgagagagaaatacttctttacggtatctaatatagattttatggagtatatattcttgacgcatcttaatccttctagaattagaattacaaaagaaacggctatcactatctttgaaaagttctatgaaaaactcaattatactctaggtggtggaactcctattggaattatttctgcacaggtattgtctgagaagtttacacaacaagccctgtccagttttcacactactgaaaaaagtggtgccgtcaaacaaaaacttggtttcaacgagtttaataacttgactaatttgagtaagaataagaccgaaattatcactctggtatccgatgatatctctaaacttcaatctgttaagattaatttcgaatttgtatgtttgggagaattaaatccaaacatcactcttcgaaaagaaacagataaatatgtagtagatataatagtcaatagattatacatcaagagagcagaaataaccgaattagtcgtcgaatatatgattgaacgatttatctcctttagcgtcattgtaaaggaatggggtatggagacattcattgaggacgaggataatattagatttactgtctacctaaatttcgttgaaccggaagaattgaatcttagtaagtttatgatggttcttccgggggcagccaacaagggaaagattagtaaattcaagattcctatctctgattatacgggatatgacgacttcaatcaaacaaaaaagctcaataagatgactgtagaactcatgaatctaaaagaattgggttctttcgatttggaaaacgtcaacgtgtatcctggagtatggaatacatacgatatcttcggtatcgaggccgctcgtgaatacttgtgcgaagccatgttaaacacctatggagaagggttcgattatctgtatcagccttgtgatcttctcgctagtttactatgtgctagttacgaaccagaatcagtgaataaattcaagttcggcgcagctagtactcttaagagagctacgttcggagacaataaagcattgttaaacgcggctcttcataaaaagtcagaacctattaacgataatagtagctgccacttttttagcaaggtccctaatataggaactggatattacaaatactttatcgacttgggtcttctcatgagaatggaaaggaaactatctgataagatatcttctcaaaagatcaaggaaatggaagaaacagaagacttttaattcttatcaataacatatttttctatgatctgtcttttaaacgatggattttccacaaatgcgcctctcaagtccctcatagaatgatacacgtataaaaaatatagcataggcaatgactccttatttttagacattagatatgccaaaatcatagccccgcttctatttactcccgcagcacaatgaaccaacacgggctcgtttcgttgatcacatttagataaaaaggcggttacgtcgtcaaaatatttactaatatcggtagttgtatcatctaccaacggtatatgaataatattaatattagagttaggtaatgtatatttatccatcgtcaaatttaaaacatatttgaacttaacttcagatgatggtgcatccatagcatttttataatttcccaaatacacattattggttacccttgtcattatagtgggagatttggctttgtgcatatctccagttgaacgtagtagtaagtatttatacaaacttttcttatccatttataacgtacaaatggataaaactactttatcggtaaacgcgtgtaatttagaatacgttagagaaaaggctatagtaggcgtacaagcagccaaaacatcaacacttatattctttgttattatattggcaattagtgcgctattactctggtttcagacgtctgataatccagtctttaatgaattaacgagatatatgcgaattaaaaatacggttaacgattggaaatcattaacggatagcaaaacaaaattagaaagtgatagaggtagacttctagccgctggtaaggatgatatatttgaattcaaatgtgtggatttcggcgcctattttatagctatgcgattggataagaaaacatatctgccgcaagctattaggcgaggtactggagacgcgtggatggttaaaaaggcggcaaaggtcgatccatctgctcaacaattttgtcagtatttgataaaacacaagtctaataatgttattacttgtggtaatgagatgttaaatgaattaggttatagcggttattttatgtcaccgcattggtgttccgattttagtaatatggaatagtgttagataaatgcggtaacgaatgttcctgtaaggaaccataacagcttagatttaacgttaaagatgagcataaacataataaacaaaattacaatcaaacttataacattaatatcaaacaatccaaaaaatgaaatcagtggagtagtaaacgcgtacataactcctggataacgtttagcagctgccgttcctattctagaccaaaaattcggtttcatgttttcgaaacggtattctgcaacaagtcgaggatcgtgttctacatatttggcggcattatccagtatctgcctattgatcttcatttcgttttcgattctggctatttcaaaataaaatcccgatgatagacctccagactttataatttcatctacgatgttcagcgccgtagtaactctaataatataggctgataagctaacatcataccctcctgtatatgtgaatatggcatgatttttgtccattacaagctcggttttaactttattgcctgtaataatttctctcatctgtaggatatctatttttttgtcatgcattgccttcaagacgggacgaagaaacgtaatatcctcaataacgttatcgttttctacaataactacatattctacctttttattttctaactcggtaaaaaaattagaatcccatagggctaaatgtctagcgatatttcttttcgtttcctctgtacacatagtgttacaaaaccctgaaaagaagtgagtatacttgtcatcatttctaatgtttcctccagtccactgtataaacgcataatccttgtaatgatctggatcatccttgactaccacaacatttcttttttctggcataacttcgttgtcctttacatcatcgaacttctgatcattaatatgctcatgaacattaggaaatgtttctgatggaggtctatcaataactggcacaacaataacaggagttttcaccgccgccatttagttattgaaattaatcatatacaactctttaatacgagttatattttcgtctatccattgtttcacattgacatatttcgacaaaaagatataaaatgcgtattccaatgcttctctgtttaatgaattactaaaatatacaaacacgtcactgtctggcaataaatgatatcttagaatattgtaacaatttattttgtattgcacatgttcgtgatctatgagttcttcttcgaatggcataggatctccgaatctgaaaacgtataaataggagttagaataataatatttgagagtattggtaatatataaactctttagcggtataattagtttttttctctcaatttctatttttagatgtgatggaaaaatgactaattttgtagcattagtatcatgaactctaatcaaaatcttaatatcttcgtcacacgttagctctttgaagtttttaagagatgcatcagttggttctacagatggagtaggtgcaacaattttttgttctacacatgtatgtactggagccattgttttaactataatggtgcttgtatcgaaaaactttaatgcagatagcggaagctcttcgccgcgactttctacgtcgtaattgggttctaacgccgatctctgaatggatactagttttctaagttctaatgtgattctctgaaaatgtaaatccaattcctccggcattatagatgtgtatacatcggtaaataaaactatagtatccaacgatcccttctcgcaaattctagtcttaaccaaaaaatcgtatataaccacggagatggcgtatttaagagtggattcttctaccgttttgttcttggatgtcatataggaaactataaagtccgcactactgttaagaatgattactaacgcaactatatagtttaaattaagcattttggaaacataaaataactctgtagacgatacttgactttcgaataagtttgcagacaaacgaagaaagaacagacctctcttaatttcagaagaaaactttttttcgtattcctgacgtctagagtttatatcaataagaaagttaagaattagtcggttaatgttgtatttcattacccaagtttgagatttcataatattatcaaaagacatgataatattaaagataaagcgctgactatgaacgaaatagctatatggttcgctcaagaatatagtcttgttaaacgtggaaacgataactgtatttttaatcacgtcagcggcatctaaattaaatataggtatatttattccacacactctacaatatgccacaccatcttcataataaataaattcgttagcaaaattattaattttagtgaaatagttagcgtcaactttcatagcttccttcaatctaatttgatgctcacacggtgcgaattccactctaacatcccttttccatgcctcaggttcatcgatctctataatatctagttttttgcgtttcacaaacacaggctcgtctctcgcgatgagatctgtatagtaactatgtaaatgataactagatagaaagatgtagctatatagatgacgatcctttaagagaggtataataactttaccccaatcagatagactgttgttatggtcttcggaaaaagaatttttataaatttttccagtattttccaaatatacgtacttaacatctaaaaaatccttaatgataataggaatggataatccgtctattttataaagaaatacatatcgcacattatacttttttttggaaatgggaataccgatgtgtctacataaatatgcaaagtctaaatattttttagagaatcttagttggtccaaattcttttccaagtacggtaatagatttttcatattgaacggtatcttcttaatctctggttctagttccgcattaaatgatgaaactaagtcactatttttataactaacgattacatcacctctaacatcatcatttaccagaatactgatcttcttttgtcgtaaatacatgtctaatgtgttaaaaaaaagatcatacaagttatacgtcatttcatctgtggtattcttgtcattgaaggataaactcgtactaatctcttctttaacagcctgttcaaatttatatcctatatacgaaaaaatagcaaccagtgtttgatcatccgcgtcaatattctgttctatcgtagtgtataacaatcgtatatcttcttctgtgatagtcgatacgttataaaggttgataacgaaaatatttttatttcgtgaaataaagtcatcgtaggattttggacttatattcgcgtctagtagatatgcttttatttttggaatgatctcaattagaatagtctctttagagtccatttaaagttacaaacaactaggaaattggtttatgatgtataatttttttagtttttatagattctttattctatacttaaaaaatgaaaataaatacaaaggttcttgagggttgtgttaaattgaaagcgagaaataatcataaattatttcattatcgcgatatccgttaagtttgtatcgtaatggcgtggtcaattacgaataaagcggatactagtagcttcacaaagatggctgaaatcagagctcatctaaaaaatagcgctgaaaataaagataaaaacgaggatattttcccggaagatgtaataattccatctactaagcccaaaaccaaacgagccactactcctcgtaaaccagcggctactaaaagatcaaccaaaaaggaggaagtggaagaagaagtagttatagaggaatatcatcaaacaactgaaaaaaattctccatctcctggagtcagcgacattgtagaaagcgtggccgctgtagagctcgatgatagcgacggggatgatgaacctatggtacaagttgaagctggtaaagtaaatcatagtgctagaagcgatctctctgacctaaaggtggctaccgacaatatcgttaaagatcttaagaaaattattactagaatctctgcagtatcgacggttctagaggatgttcaagcagctggtatctctagacaatttacttctatgactaaagctattacaacactatctgatctagtcaccgagggaaaatctaaagttgttcgtaaaaaagttaaaacttgtaagaagtaaatgcgtgcacttttttataaagatggtaaactctttaccgataataattttttaaatcctgtatcagacgataatccagcgtatgaggttttgcaacatgttaaaattcctactcatttaacagatgtagtagtatatgaacaaacgtgggaggaggcgttaactagattaatttttgtgggaagtgattcaaaaggacgtagacaatacttttacggaaaaatgcatgtacagaatcgcaacgctaaaagagatcgtatttttgttagagtatataacgttatgaaacgaattaattgttttataaacaaaaatataaagaaatcgtccacagattccaattatcagttggcggtttttatgttaatggaaactatgttttttattagatttggtaaaatgaaatatcttaaggagaatgaaacagtagggttattaacactaaaaaataaacacatagaaataagtcccgatgaaatagttatcaagtttgtaggaaaggacaaagtttcacatgaatttgttgttcataagtctaatagactatataaaccgctattgaaactgacggatgattctagtcccgaagaatttctgttcaacaaactaagtgaacgaaaggtatacgaatgtatcaaacagtttggtattagaatcaaggatctccgaacgtatggagtcaattatacgtttttatataatttttggacaaatgtaaagtccatatctcctcttccgtcaccaaaaaagttaatagcattaactatcaaacaaactgctgaagtggtaggtcatactccatcaatttcaaaaagagcttatatggcaacgactattttagaaatggtaaaggataaaaattttttagatgtagtatctaaaactacgttcgatgaattcctatctatagtcgtagatcacgttaaatcatctacggatggatgatatagatctttacacaaataattacaagaccgataaatggaaatggataagcgtatgaaatctctcgcaatgacagctttcttcggagagctaagcacattagatattatggcattgataatgtctatatttaaacgccatccaaacaataccattttttcagtggataaggatggtcagtttatgattgatttcgaatacgataattataaggcttctcaatatttggatctgaccctcactccgatatctggagatgaatgcaagactcacgcatcgagtatagccgaacaattggcgtgtgcggatattattaaagaggatattagcgaatatatcaaaactactccccgtcttaaacgatttataaaaaaataccgcaatagatcagatactcgtatcagtcgagatacagaaaagcttaaaatagctctagctaaaggcatagattacgaatatataaaagacgcttgttaataagtaaatgaaaaaaaactagtcgtttataataaaacacgatatggatgccaacgtagtatcattttctactattgcgacgtatatagacgctttagcgaagaatgcttcggaattagaacagaggtctaccgcatacgaaataaataatgaattggaactagtatttattaagccgccattgattactttgacaaatgtagtgaatatctctacgattcaggaatcgtttattcgatttaccgttactaataaggaaggtgttaaaattagaactaagattccattatctaaggtacatggtctagatgtaaaaaatgtacagttagtagatgctatagataacatagtttgggaaaagaaatcattagtgacggaaaatcgtcttcacaaagaatgcttgttgagactatcgacagaggaacgtcatatatttttggattacaagaaatatggatcctctatccgactagaattagtcaatcttattcaagcaaaaacaaaaaactttacgatagactttaagctaaaatattttctaggatccggtgcccagtctaaaagttctttgttgcacgctattaatcatccaaagtcaaggcctaatacatctctggaaatagaattcacacctagagacaatgaaacagttccatatgatgaactaataaaggaattgacgactctctcgcgtcatatatttatggcttctccagagaatgtaattctttctccgcctattaacgcgcctataaaaacctttatgttgcctaaacaagatatagtaggtttggatctggaaaatctatatgccgtaactaagactgacggcattcctataactatcagagttacatcaaacgggttgtattgttattttacacatcttggttatattattagatatcctgttaagagaataatagattccgaagtagtagtctttggtgaggcagttaaggataagaactggaccgtatatctcattaagctaatagagcctgtgaatgcaatcaatgatagactagaagaaagtaagtatgttgaatctaaactagtggatatttgtgatcggatagtattcaagtcaaagaaatacgaaggtccgtttactacaactagtgaagtcgtcgatatgttatctacatatttaccaaagcaaccagaaggtgttattctgttctattcaaagggacctaaatctaacattgattttaaaattaaaaaggaaaatactatagaccaaactgcaaatgtagtatttaggtacatgtccagtgaaccaattatctttggagaatcgtctatctttgtagagtataagaaatttagcaacgataaaggctttcctaaagaatatggttctggtaagattgtgttatataacggcgttaattatctaaataatatctattgtttggaatatattaatacacataatgaagtgggtattaagtccgtggttgtacctattaagtttatagcagaattcttagttaatggagaaatacttaaacctagaattgataaaaccatgaaatatattaactcagaagattattatggaaatcaacataatatcatagtcgaacatttaagagatcaaagcatcaaaataggagatatctttaacgaggataaactatcggatgtgggacatcaatacgccaataatgataaatttagattaaatccagaagttagttattttacgaataaacgaactagaggaccgttgggaattttatcaaactacgtcaagactcttcttatttctatgtattgttccaaaacatttttagacgattccaacaaacgaaaggtattggcgattgattttggaaacggtgctgacctggaaaaatacttttatggagagattgcgttattggtagcgacggatccggatgctgatgctatagctagaggaaatgaaagatacaacaaattaaactctggaattaaaaccaagtactacaaatttgactacattcaggaaactattcgatccgatacatttgtctctagtgtcagagaagtattctattttggaaagtttaatatcatcgactggcagtttgctatccattattcttttcatccgagacattatgctaccgtcatgaataacttatccgaactaactgcttctggaggcaaggtattaatcactaccatggacggagacaaattatcaaaattaacagataaaaagacttttataattcataagaatttacctagtagcgaaaactatatgtctgtagaaaaaatagctgatgatagaatagtggtatataatccatcaacaatgtctactccaatgactgaatacattatcaaaaagaacgatatagtcagagtgtttaacgaatacggatttgttcttgtagataacgttgatttcgctacaattatagaacgaagtaaaaagtttattaatggcgcatctacaatggaagatagaccgtctacaaaaaactttttcgaactaaatagaggagccattaaatgtgaaggtttagatgtcgaagacttacttagttactatgttgtttatgtcttttctaagcggtaaataataatatggtatgggttctgatctcccagttctaaatgcattaaataattccaatagagcgatttttgttcctataggaccttccaactgtggatactctgtattgttaatagatatattaatacttttgtcgggtaacagaggttctacgtcttctaaaaataaaagttttataacatctggcctgttcataaataaaaacttggcgattctatatatactcttattatcaaatctagccattgtcttatagatgtgagctactgtaggtgtaccatttgattttctttctaatactatatatttctctcgaagaagttcttgcacatcatctgggaataaaatactactgttgagtaaatcagttattttttttatatcgatattgatggacatttttatagttaaggataataagtatcccaaagtcgataacgacgataacgaagtatttatacttttaggaaatcacaatgactttatcagattaaaattaacaaaattaaaggagcatgtatttttttctgaatatattgtgactccagatacatatggatctttatgcgtcgaattaaatgggtctagttttcagcacggcggtagatatatagaggtggaggaatttatagatgctggaagacaagttagatggtgttctacatccaatcatatatctaaagatatacccgaagatatgcacactgataaatttgtcatttatgatatttatacgtttgattcgttcaagaataaacgattggtattcgtacaggtacctccgtcgttaggagatgatagtcatttgactaatccgttattgtcaccgtattatcgtaattcagtagccagacaaatggtcaatgatatgatttttaatcaagattcatttttaaaatatttattagaacatctgattagaagccactatagagtttctaaacatataacaatagttagatacaaggataccgaagaattaaatctaacgagaatatgttataatagagataagtttaaggcgtttgtattcgcttggtttaacggcgtttcggaaaatgaaaaggtactagatacgtataaaaaggtatctaatttgatataatgaattcagtgactgtatcacacgcgccatatactattacttatcacgatgattgggaaccagtaatgagtcaattggtagagttttataacgaagtagccagttggctgctacgagacgagacgtcgcctattcctgataagttctttatacagttgaaacaaccgcttagaaataaacgagtatgtgtgtgtggtatagatccgtatccgaaagatggaactggtgtaccgttcgaatcaccaaattttacaaaaaaatcaattaaggagatagcttcatctatatctagattaaccggagtaattgattataaaggttataaccttaatataatagacggggttataccctggaattattacttaagttgtaaattaggagaaacaaaaagtcacgcgatttactgggataagatttccaagttactgctgcagcatataactaaacacgttagtgttctttattgtttgggtaaaacagatttctcgaatatacgggccaagttagaatccccggtaactaccatagtcggatatcatccagcggctagagaccgccaattcgagaaagatagatcatttgaaattatcaacgttttactggaattagacaacaaggcacctataaattgggctcaagggtttatttattaatgctttagtgaaattttaacttgtgttctaaatggatgcggctattagaggtaatgatgttatctttgttcttaagactataggtgtcccgtcagcgtgcagacaaaatgaagatccaagatttgtagaagcatttaaatgcgacgagttagaaagatatattgagaataatccagaatgtacactattcgaaagtcttagggatgaggaagcatactctatagtcagaattttcatggatgtagatttagacgcgtgtctagacgaaatagattatttaacggccattcaagattttattatcgaggtgtcaaactgtgtagctagattcgcgtttacagaatgcggcgccattcatgaaaatgtaataaaatccatgagatctaatttttcattgactaagtctacaaatagagataaaacaagttttcatattatctttttagatacgtataccactatggatacattgatagctatgaaacgaacactattagaattaagtagatcatctgaaaatccactaaccagatcgatagacactgccgtatataggagaaaaacaactcttcgggttgtaggtactaggaaaaatccaaattgcgacactattcatgtaatgcaaccaccgcatgataatatagaagattacctattcacttacgtggatatgaacaacaatagttattacttttctctacaacaacgattggaggatttagttcctgataagttatgggaaccagggtttatttcattcgaagacgctataaaaagagtttcaaaaatattcattaattctataataaactttaatgatctcgatgaaaataattttacaacggtaccactggtcatagattacgtaacaccttgtgcattatgtaaaaaacgatcgcataaacatccgcatcaactatcgttggaaaatggtgctattagaatttacaaaactggtaatccacatagttgtaaagttaaaattgttccgttggatggtaataaactgtttaatattgcacaaagaattttagacactaactctgttttattaaccgaacgaggagaccatatagtttggattaataattcatggaaatttaacagcgaagaacccttgataacaaaactaattttgtcaataagacatcaactacctaaggaatattcaagcgaattactctgtccaagaaaacgaaagactgtagaagctaacatacgagacatgttagtagattcagtggagaccgatacctatccggataaacttccgtttaaaaatggtgtattggacctggtagacggaatgttttactctggagatgatgctaaaaaatatacgtgtactgtatcaaccggatttaaatttgacgatacaaagttcgtcgaagacagtccagaaatggaagagttaatgaatatcattaacgatatccaaccattaacggatgaaaataagaaaaatagagagctatatgaaaaaacattatctagttgtttatgcggtgctaccaaaggatgtttaacattcttttttggagaaactgcaactggaaagtcgacaaccaaacgtttgttaaagtctgctatcggtgacctgtttgttgagacgggtcaaacaattttaacagatgtattggataaaggacctaatccatttatcgctaacatgcatttgaaaagatctgtattctgtagcgaactacctgattttgcctgtagtggatcaaagaaaattagatctgacaatattaaaaagttgacagaaccttgtgtcattggaagaccgtgtttctccaataaaattaataatagaaaccatgcgacaatcattatcgatactaattacaaacctgtttttgataggatagataacgcattaatgagaagaattgccgtcgtgcgattcagaacacacttttctcaaccttctggtagagaggctgctgaaaataatgacgcgtacgataaagtcaaactattagacgaggggttagatggtaaaatacaaaataatatatatagatttgcatttctatacttgttggtgaaatggtacaaaaaatatcatgttcctattatgaaactatatcctacacccgaagagattcctgactttgcattctatctcaaaataggtactctgttggtatctagctctgtaaagcatattccattaatgacggacctctccaaaaagggatatatattgtacgataatgtggtcactcttccgttgactactttccaacagaaaatatccaagtattttaattctagactatttggacacgatatagagagcttcatcaatagacataagaaatttgccaatgttagtgatgaatatctgcaatatatattcatagaggatatttcatctccgtaaatatatgctcatatatttatagaagatatcacatatctaaatgaataccggaatcatagatttatttgataatcatgttgatagtataccaactatattacctcatcagttagctactctagattatctagttagaactatcatagatgagaacagaagcgtgttattgttccatattatgggatcaggtaaaacaataatcgctttgttgttcgccttggtagcttccagatttaaaaaggtttacattctagtgccgaacatcaacatcttaaaaattttcaattataatatgggtgtagctatgaacttgtttaatgacgaattcatagctgagaatatctttattcattccacaacaagtttttattctcttaattataacgataacgtcattaattataacggattatctcgctacaataactctatttttatcgttgatgaggcacataatatctttgggaataatactggagaacttatgaccgtgataaaaaataaaaacaagattccttttttactattgtctggatctcccattactaacacacctaatactctgggtcatattatagatttaatgtccgaagagacgatagattttggtgaaattattagtcgtggtaagaaagtaattcagacacttcttaacgaacgcggtgtgaatgtacttaaggatttgcttaaaggaagaatatcatattacgaaatgcctgataaagatctaccaacgataagatatcacggacgtaagtttctagatactagagtagtatattgtcacatgtctaaacttcaagagagagattatatgattactagacgacagctatgttatcatgaaatgtttgataaaaatatgtataacgtgtcaatggcagtattgggacaacttaatctgatgaataatttagatactttatttcaggaacaggataaggaattgtacccaaatctgaaaataaataatggcgtgttatacggagaagaattggtaacgttaaacattagttccaaatttaaatactttattaatcggatacagacactcaacggaaaacattttatatacttttctaattctacatatggcggattggtaattaaatatatcatgctcagtaatggatattctgaatataatggttctcagggaactaatccacatatgataaacggcaaaccaaaaacatttgctatcgttactagtaaaatgaaatcgtctttagaggatctattagatgtgtataattctcctgaaaacgatgatggtagtcaattgatgtttttgttttcatcaaacattatgtccgaatcctatactctaaaagaggtaaggcatatttggtttatgactatcccagatactttttctcaatacaaccaaattcttggacgatctattagaaaattctcttacgccgatatttctgaaccagttaatgtatatcttttagccgccgtatattccgatttcaatgacgaagtgacgtcattaaacgattacacacaggatgaattaattaatgttttaccatttgacatcaaaaagctgttgtatctaaaatttaagacgaaagaaacgaatagaatatactctattcttcaagagatgtctgaaacgtattctcttccaccacatccatcaattgtaaaagttttattgggagaattggtcagacaatttttttataataattctcgtattaagtataacgataccaagttacttaaaatggttacatcagttataaaaaataaagaagacgctaggaattacatagatgatattgtaaacggtcacttctttgtatcgaataaagtatttgataaatctcttttatacaaatacgaaaacgatattattacagtaccgtttagactttcctacgaaccatttgtttggggagttaactttcgtaaagaatataacgtggtatcttctccataaaactgatgagatatataaagaaataaatgtcgagctttgttaccaatggatacctttccgttacattggaaccacacgagctgacgttagacataaaaactaatattaggaatgccgtatataagacgtatctccatagagaaattagtggtaaaatggccaagaaaatagaaattcgtgaagacgtggaattacctctcggcgaaatagttaataattctgtagttataaacgttccgtgtgtaataacctacgcgtattatcacgttggggatatagtcagaggaacattaaacatcgaagatgaatcaaatgtaactattcaatgtggagatttaatctgtaaactaagtagagattcgggtactgtatcatttagcgattcaaagtactgcttttttcgaaatggtaatgcgtatgacaatggcagcgaagtcactgccgttctaatggaggctcaacaaggtatcgaatctagttttgtttttctcgcgaatatcgtcgactcataaaaaagagaatagcggtaagtataaacacgaatactatggcaataattgcgaatgttttattctcttcgatatatttttgataatatgaaaaacatgtctctctcaaatcggacaaccatctcataaaatagttctcgcgcgctggagaggtagttgccgctcgtataatctctccagaataatatacttgcgtgtcgtcgttcaatttatacggatttctatagttctctgttatataatgcggtttgccctcatgattagacgacgacaatagtgttctaaatttagatagttgatcagaatgaatgtttattggcgttggaaaaattatccatacagcgtctgcagagtggttgatagttgttcctagatatgtaaaataatccaacttactaggcagcaaattgtctagataaaatactgaatcaaacggtgcagacgtattggcggatctaatggaatccaattgattaactatcttttgaaaatatacatttttatgatccaatacttgtaagaatatagaaataatgataagtccatcatcgtgtttttttgcctcttcataagaactatattttttcttattccaatgaacaagattaatctctccagagtatttgtacacatctatcaagtgattggatccataatcgtcttcctttccccaatatatatgtagtgatgataacacatattcattggggagaaaccctccacttatatatcctcctttaaaattaatccttactagttttccagtgttctggatagtggttggtttcgactcattataatgtatgtctaacggcttcaatcgcgcgttagaaattgcttttttagtttctatattaataggagatagttgttgcggcatagtaaaaatgaaatgataactgtttaaaaatagctcttagtatgggaattacaatggatgaggaagtgatatttgaaactcctagagaattaatatctattaaacgaataaaagatattccaagatcaaaagacacgcatgtgtttgctgcgtgtataacaagtgacggatatccgttaataggagctagaagaacttcattcgcgttccaggcgatattatctcaacaaaattcagattctatctttagagtatccactaaactattacggtttatgtactacaatgaactaagagaaatctttagacggttgagaaaaggttctatcaacaatatcgatcctcactttgaagagttaatattattgggtggtaaactagataaaaaggaatctattaaagattgtttaagaagagaattaaaagaggaaagtgatgaacgtataacagtaaaagaatttggaaatgtaattctaaaacttacaacacgggataaattatttaataaagtatatataagttattgcatggcgtgttttattaatcaatcgttggaggatttatcgcatactagtatttacaatgtagaaattagaaagattaaatcattaaatgattgtattaacgacgataaatacgaatatctgtcttatatttataatatgctagttaatagtaaatgaacttttacagatctagtataattagtcagattattaagtataatagacgactagctaagtctattatttgcgaggatgactctcaaattattacactcacggcattcgttaaccaatgcctatggtgtcataaacgagtatccgtgtccgctattttattaactactgataacaaaatattagtatgtaacagacgagatagttttctctattctgaaataattagaactagaaacatgtttagaaagaaacgattatttctgaattattccaattatttgaacaaacaggaaagaagtatactatcgtcatttttttctctagatccagctactactgataatgatagaatagacgctatttatccgggtggcatacccaaaaggggtgagaatgttccagagtgtttatccagggaaattaaagaagaagttaatatagacaattcttttgtattcatagacactcggttttttattcatggcatcatagaagataccattattaataaattttttgaggtaatcttctttgtcggaagaatatctctaacgagtgatcaaatcattgatacatttaaaagtaatcatgaaatcaaggatctaatatttttagatccgaattcaggtaatggactccaatacgaaattgcaaaatatgctctagatactgcaaaacttaaatgttacggccatagaggatgttattatgaatcattaaaaaaattaactgaggatgattgattaaaaaatataaattaatttaccatcgtgtatttttataacgggattgtccggcatatcatgtagatagttaccgtctacatcgtatactcgaccatctacgcctttaaatcctctatttattgacattaatctattagaattggaataccaaatattagtaccctcaattagtttattggtaatattttttttagacgatagatcgatggctcttgaaaccaaggttttccaaccggactcattgtcgatcggtgagaagtctttttcattagcatgaatccattctaatgatgtatgtttaaacactctaaacaattggacaaattcttttgatttgctttgaatgatttcaaataggtcttcgtctacagtaggcataccattagataatctagccattataaagtgcacgtttacatatctacgttctggaggagtaagaacgtgactattgagacgaatggctcttcctactatctgacgaagagacgcctcgttccatgtcatatctaaaatgaagatatcattaattgagaaaaaactaataccctcgcctccactagaagagaatacgcatgttttaatgcattctccgttagtgtttgattcttggttaaactcagccaccgccttgattctagtatcttttgttctagatgagaactctatattagagataccaaagactttgaaatatagtaataagatttctattcctgactgattaacaaatggttcaaagactagacatttaccatgggatgctaatattcccaaacatacatctataaatttgacgcttttctcttttaattcagtaaatagagagatatcagccgcactagcatcccctttcaatagttctccctttttaaaggtatctaatgcggatttagaaaactctctatctcttaatgaatttttaaaatcattatatagtgttgctatctcttgcgcgtattcgcccggatcacgattttgtctttcaggaaagctatcgaacgtaaacgtagtagccatacgtctcagaattctaaatgatgatatacctgtttttatttcagcgagtttagccttttgataaatttcttcttgctttttcgacatattaacgtatcgcattaatactgttttcttagcgaatgatgcagacccttctacgtcatcaaaaatagaaaactcgttattaactatatacgaacatagtcctcctagtttggagactaattctttttcatcgactagacgtttattctcaaatagcgattggtgttgtaaggatcctggtcgtagtaagttaaccaacatggtgaattcttgcacactattgacgataggtgtagccgataaacaaatcatcttatggttttttaacgcaatggtcttagataaaaaattatatactgaacgagtaggacggatcttaccatcttctttgattaatgatttagaaatgaagttatgacattcatcaataatgacgcatattctactcttggaattaatagttttgatattagtaaaaaatttatttctaaaattttgatcatcgtaattaataaaaatacaatccttcgttatctctggagcgtatctgagtatagtgttcatccaaggatcttctatcaaagcctttttcaccaataagataatagcccaattcgtataaatatccttaagatgtttgagaatatatacagtagtcattgttttaccgacacccgtttcatggaacaataaaagagaatgcatactgtctaatcctaagaaaactcttgctacaaaatgttgataatccttgaggcgtactacgtccgaccccatcatttcaacgggcatattagtagttctgcgtaaggcataatcgatataggccgcgtgtgatttactcatttatgagtgataagtaataactatgttttaaaaatcacagcagtagtttaactagtcttctctgatgtttgttttcgatactttttgaatcagaagtcatactagaataaagcaacgagtgaacgtaatagagagcttcgtatactctattcgaaaactctaagaacttattaatgaattccgtatccactggattgtttaaaatactaaattgaacactgttcacatccttccaagaagaagacttagtgacggacttaacatgagacataaataaatccaaattttttttacaaacatcactagccaccataatggcgctatctttcaaccagctatcgcttacgcattttagcagtctaacatttttaaagagactacaatatattctcatagtatcgattacacctctaccgaataaagttggaagtttaataatacaatatttttcgtttacaaaatcaaataatggtcgaaacacgtcgaaggttaacatcttataatcgctaatgtatagattgttttcagtgagatgattattagatttaatagcatctcgttcacgtttgaacagtttattgcgtgcgctgaggtcggcaactacggcgtccgctttagtactcctcccataatactttacgctattaatctttaaaatttcatagactttatctagatcgctttctggtaacatgatatcatgtgtaaaaagttttaacatgtcggtcggcattctatttagatcattaactctagaaatctgaagaaagtaattagctccgtattccagactaggtaatgggcttttacctagagacagattaagttctggcaatgtttcataaaatggaagaaggacatgcgttccctcccggatattttttacaatttcatccatttacaactctatagtttgttttcattattattagttattatctcccataatcttggtaatacttaccccttgatcgtaagataccttatacaggtcattacatacaactaccaattgtttttgtacataatagattggatggttgacatccatggtggaataaactactcgaacagatagtttatctttccccctagatacattagccgtaatagttgtcggcctaaagaatatctttggtgtaaagttaaaagttagggttcttgttccattattgctttttgtcagtagttcattataaattctcgagatgggtccgttctctgaatatagaacatcatttccaaatctaacttctagtctagaaataatatcggtcttattcttaaaatctattcccttgatgaagggatcgttaatgaacaaatccttggcctttgattcggctgatctattatctccgttatagacgttacgttgactagtccaaagacttacaggaatagatgtatcgatgatgttgatactatgtgatatgtgagcaaagattgttctcttagtggcatcactatatgttccagtaatggcggaaaactttttagaaatgttatatataaaagaattttttcgtgttccaaacattagcagattagtatgaagataaacactcatattatcaggaacattatcaatttttacatacacatcagcatcttgaatagaaacgataccatcttctggaacctctacgatctcggcagactccggataaccagtcggtgggccatcgctaacaataactagatcatccaacaatctactcacatatgcatctatataatctttttcatcttgtgagtaccctggatacgaaataaatttattatccgtatttccataataaggtttagtataaacagagagagatgttgccgcatgaacttcagttacagtcgccgttggttggtttatttgacctattactctcctaggtttctctataaacgatggtttaatttgtacattcttaaccatatatccaataaagctcaattcaggaacataaacaaattctttgttgaacgtttcaaagtcgaacgaagagtcacgaataacgatatcggatactggattgaaggttaccgttacggtaatttttgaatcggatagtttaagactgctgaatgtatcttccacatcaaacggagttttaatataaacgtatactgtagatggttctttaatagtgtcattaggagttaggccaatagaaatatcattaagttcactagaatatccagagtgtttcaaagcaattgtattattgatacaattattatataattcttcgccctcaatttcccaaataacaccgttacacgaagagatagatacgtgattaatacatttatatccaacatatggtacgtaactgaatcttcccatacctttaacttctggaagttccaaactcagaaccaaatgattaagcgcagtaatatactgatccctaatttcgaagctagcgatagcctgattgtctggaccatcgtttgtcataactccggatagagaaatatattgcggcatatacaaagttggaatttgactatcgactgcgaagacattagaccgtttaatagagtcatccccaccgatcaaagaattaatgatagtattattcattttctatttaaaatggaaaaagcttacaataaactccgtagagaaatatctataatttgtgagttttccttaaagtaacagcttccgtaaacgccgtctttatctcttagtaggtttattgtatttatgaccttttccttatcttcatagaatactaaaggcaacaaagaaatttttggttcttctctaagagctacgtgagacttaaccatagaagccaacgaatccctacatattttagaacagaaataccctacttcaccacccttgtatgtctcaatactaataggtctaaaaaccaaatcttgattacaaaaccaacacttatcaattacactatttgtcttaatagacacatctgccatagatttataatactttggtagtatacaagcgagtgcttcttctttagcgggcttaaagactgctttaggtgctgaaataaccacatctggaaggcttactcgcttagccatttaattacggaactatttttttatacttctaatgagcaagtagaaaacctctcatctacaaaaacgtactcgtgtccataatcctctaccatagttacacgttttttagatctcatatgtgctaaaaagttttcccatactaattggttactattatttttcgtataatttttaacagtttgaggttttagatttttagttacagaagtgatatcgaatattttatccaaaaagaatgaataattaattgtcttagaaggagtgttttcttggcaaaagaataccaagtgcttaaatatttctactacttcattaatcttttctgtactcagattcagtttctcatcttttacttgattgattatttcaaagactaacttataatcctttttatttattctctcgttagccttaagaaaactagatacaaaatttgcatctacatcatccgtggatatttgatttttttccatgatatccaagagttccgagataatttctccagaacattgatgagacaataatctccgcaatacatttctcaaatgaataagtttattagacacgtggaagtttgactttttttgtacctttgtacatttttgaaataccgactcgcaaaaaatacaatattcatatccttgttcagatactataccgttatgtctacaaccgctacataatcgtagattcatgttaacactctacgtatctcgtcgtccaatattttatataaaaacattttatttctagacgttgccagaaaatcctgtaatatttttagttttttgggctgtgaataaagtatcgccctaatattgttaccgtcttccgccaatatagtagttaaattatccgcacatgcagaagaacaccgcttaggcggattcagtacaatgttatatttttcgtaccaactcatttaaatatcataatctaaaatagttctgtaatatgtctagcgctaatatattgatcataatcctgtgcataaattaagatacaacaatgtctcgaaatcatcgacatggcttcttccatagttagaagatcgtcgtcaaagttagcaacgtgattcatcaacatttgctgttttgaggcagcaaatactgaaccgtcgccattcaaccattcataaaaaccatcgtctgaatccattgataatttcttgtactggtttttgagagctcgcatcaatctagcatttctagctcccggattgaaaacagaaagaggatcgtacatccagggtccattttctgtaaatagaatcgtataatgtcccttcaagaagatatcagacgatccacaatcaaagaattggtctccgagtttgtaacaaactgcggactttaacctatacatgataccgtttagcataatttctggtgatacgtcaatcggagtatcatctattagagatctaaagccggtgtaacattctccaccaaacatattcttattctgacgtcgttctacataaaacatcattgctccattaacgataacaggggaatgaacagcactacccatcacattagttcccaatggatcaatgtgtgtaactccagaacatcttccatagcctatgttaggaggagcgaacaccactcttccactattgccatcgaatgccatagaataaatatccttggaattgatagaaatcggactgtcggatgttgtgatcatcttcataggattaacaactatgtatggtgccgcctgaagtttcatatcgtaactgatgccgtttataggtctagccacagaaaccaacgtaggtctaaatccaactatagacaaaatagaagccaatatctgttcctcatctgtcataacttgagagcatccagtatgaataatcttcattagatggggatctaccgcatcatcatcgttacaataaaaaattcccattctaatgttcataattgcttttctaatcatggtatgcatgtttgctctctgaatctctgtggaaattagatctgatacacctgtaatcactatcggattatcctccgtaagacgattaaccaacaacatataattataagactttacttttctaaattcataaagttgctggattaggctataggtgtctccatgtacatacgcgttctcgagcgcaggaagtttaataccgaatagtgccatcagaataggatgaatatagtaattagtttctggttttctataaataaaagacaaatcttgtgaactagacatatcggtaaaatgcatggattggaatcgtgtagtcgacagaagaatatgatgattagatggagagtatattttatctaactctttgagttggtcaccgattctaggactagctcgagaatgaataagtactaaaggatgagtacatttcacagaaacactagcattgttcaatgtgctctttacatgggtaaggagttgaaatagctcgtttctatttgttctgacaatatttagtttattcataatgttaagcatatcctgaatagtaaagttagatgtgtcatacttgttagtagttagatatttagcaattgcattcccatcatttctcaatctcgtactccaatcatgcgtggatgctacttcgtcgatggaaaccatacaatcctttttgataggctgttgagattgatcatttcctgcacgtttaggtttggtacgttgatttctagcccctgcggatataaagtcatcgtctacaatttgggacaatgaattgcatacactacaagacaaagatttatcagaagtgtgaatatgatcttcatctaccaaagaaagagtttgattagtataactagattttagtcctgcgttagatgttaaaaaaacatcgctattgaccacggcttccattatttatattcgtagtttttactcgaaagcgtgattttaatatccaatcttattacttttggaatcgttcaaaacctttgactagttgtagaatttgatctattgccctacgcgtatactcccttgcatcatatacgttcgtcaccagatcgtttgtttcggcctgaagttggtgcatatctctttcaacattcgacatgagatccttaagggccatatcgtctagattttgttgagatgctgctcctggatttggattttgttgtgctgttgtacatactgtaccaccagtaggtgtaggagtacatacagtggccacaataggaggttgagaaagtgtaaccgttggagtagtacaagaaatacttccatccgattgttgtgtacatgtagttgttggtaacgtctgagaaggttgggtagatggcggcgtcgtcgttttttgatctttattaaatttagagataatatcctgaacagcattgctcggcgtcaacgctggaaggagtgaactcgccggcgcatcagtatcttcagacagccaatcaaaaagattagacatatcagatgatgtattagtttgttgtcgtggttttggtgtaggagcagtactactaggtagaagaataggagccgatgtagctgttggaaccggctgtggagttatatgaatagttggttgtagcggttggataggctgtctgctggcggccatcatattatctctagctagttgttctcgcaactgtctttgataatacgactcttgagactttagtcctatttcaatcgcttcatcctttttcgtatccggatccttttcttcagaataatagattgacgactttggtgtagaggattctgccagcctctgtgagaacttgttaaagaagtccatttaaggctttaaaattgaattgcgattataagattaaatggcagacacagacgatattatcgactatgaatccgatgatctcaccgaatacgaggatgatgaagaagaggaagaagatggagagtcactagaaactagtgatatagatcccaaatcttcttataagattgtagaatcagcatccactcatatagaagatgcgcattccaatcttaaacatatagggaatcatatatctgctcttaaacgacgctatactagacgtataagtctatttgaaatagcgggtataatagcagaaagctataacttgcttcaacgaggaagattacctctagtttcagaattttctgacgaaacgatgaagcaaaatatgctacatgtaattatacaagagatagaggagggttcttgtcctatagtcatcgaaaagaacggagaattgttgtcggtaaacgattttgacaaagatggtctaaaattccatctagactatattatcaaaatttggaaacttcaaaaacgatattagaatttatacgaatatcgttctctaaatgtcacaatcaagtctcgcatgttcagcaatttattgtcgtactttatatcgtgttcattaacgatatcttgcaaaatagtaatgattctatcttccttcgatagatattcttcagagattattgtcttatattctttcttgttatcagatatgaatttgataagactttgaacattattgatacccgtctgtttaattttttctacagatattttagttttggcagattctatcgtatctgtcaatagacatccaacatcgacattcgacgtcaattgtctataaatcaacgtataaattttagaaataacattagcgaattgttgtgcgttgatgtcgttattctgaaacagtatgattttaggtagcattttcttaacaaagagaacgtatttattgttactcagttgaacagatgatatatccagattactaacgcatctgattccgtataccaaactttcagaagaaatggtatacaattgtttgtattcattcaatgtctctttttcagaaattagtttagagtcgaatactgcaataattttcaagagatagttttcatcagataagattttatttagtgtagatatgataaaactattgttttgttggagaacttgatacgccgcgttctctgtagtcgacgctctcaaatgggaaacaatctccattatttttttggaatcggatactatatcttcggtatcttgacgcagtctagtatacatagagttaagagagattagagtttgtacattaagcaacatgtctctaaatgtggctacaaacttttcctttttcacatcatctagtttattatataccgatttcacaacggcaccagatttaaggaaccagaatgaaaaactctgataactacaatatttcatcatagttacgattttatcatcttctatagttggtgtaatagcgcatacctttttctccaagactggaaccaacgtcataaaaatgtttaaatcaaaatccatatcaacatctgatgcgctaagaccagtctcgcgttcaagattatctttactaatggtgacgaactcatcgtataaaactctaagtttgtccattatttatttacagatttagttgtttaatttatttgtgctcttccagagttgggatagtatttttctaacgtcggtattatattattaggatctacgttcatatgtatcataatattaatcatccacgttttgataaatctatctttagcttctgaaataacgtatttaaacaaaggagaaaaatatttagctacggcatcagacgcaataacattttttgtaaatgtaacgtatttagacgacagatcttcgttaaaaagttttccatctatgtagaatccatcggttgttaacaccattcccgcgtcagattgaataggagtttgaatagtttgttttggaaatagatccttcaataacttatagttgggtgggaaaaaatcgattttatcactagactctttcttttttactatcattacctcatgaactatttcttgaatgagtatatgtattttctttcctatatcggacgcgttcattggaaaatataccatgtcgttaactataagaatatttttatcctcgtttacaaactgaataatatcagatgtagttcgtaaacgaactatatcatcaccagcacaacatctaactatatgatatccactagtttcctttagccgtttattatcttgttccatattagcagtcattccatcatttaagaaggcgtcaaaaataatagggagaaatgacattttggattctgttacaactttaccaaaattaaggatatacggacttactatctttttctcaacgtcaatttgatgaacacacgatgaaaatgtgcttctatgagattgatcatgtagaaaacaacaagggatacaatatttccgcatatcatgaaatatattaagaaatcccaccttattatatttccccaaaggatccatgcacgtaaacattatgccgttatcattaataaagacttctttctcatcggatctgtaaaagttgttactgatttttttcattccaggatctagataattaataatgatgggttttctattcttattctttgtattttggcatatcctagaccagtaaacagtttccactttggtaaaatcagcagacttttgaacgctattaaacatggcattaatggcaataactaaaaatgtaaaatatttttctatgttaggaatatggtttttcactttaatagatatatggtttttggccaaaatgatagatatttttttatccgaggatagtaaaatattattagtcgccgtctctataaaaatgaagctagtctcgatatccaattttattctagaattgataggagtcgccaaatgtaccttatacgttatatctcccttgatgcgttccatttgtgtatctatatcggacacaagatctgtaaatagttttacgttattaatcatcacggtatcgccgtcgctagataacgctaatgtaccatccaagtcccaaatggagagatttaactgttcatcgtttagaataaaatgattaccggtcatattaataaagtgttcatcgtatctagataacaacgacttataattaatgtccaagtcttgaactcgctgaatgatcttttttaacccagttagttttagattggtacgaaatatattgttaaactttgattctacagtaatgtccaaatctagttgtggaaatacttccatcaacattgtttcaaacttgataatattattatctacatcttcgtacgatccaaattccggaatagatgtatcgcacgctctggccacccagataaccaaaaagtcacacgctccaggatatacattgtataaaaagctatcgttttttagtagggtttttttctgcgtgtatacgaagggattaaaaatagtattatcaacgtaactatattccaaattattcttatgagaatagataataatatcgtccttaatatctaacaaatttcctaaatatccctttaattgagtcattcgaagcgtcaatagaatatgtctcttaactatttccggctgttgtatatttaaatgacttcgtaaaaaataatatatgggcgacttctcatctatgtaatcatatggagtgagatatagggctcgttctacctcctgccccttacccacctgtaataccaattgcggacttactatatatcgcatatttatatcgtggggtaaagtgaaaatctactaccgatgatgtaagtcttacaatgttcgaaccagtaccagatcttaatttggaggcctccgtagaactaggggaggtaaatatagatcaaacaacacctatgataaaggagaatagcggttttatatcccgcagtagacgtctattcgcccatagatctaaggatgatgagagaaaactagcactacgattctttttacaaagactttattttttagatcatagagagattcattatttgttcagatgcgttgacgctgtaaaagacgtcactattaccaaaaaaaataacattatcgtggcgccttatatagcacttttaactatcgcatcaaaaggatgcaaacttacagaaacaatgattgaagcattctttccagaactatataatgaacatagtaagaaatttaaattcaactctcaagtatccatcatccaagaaaaactcggataccagtttggaaactatcacgtttatgattttgaaccgtattactctacagtagctctggctattcgagatgaacattcatctggcatttttaatatccgtcaagagagttatctggtaagttcattatctgaaataacatatagattttatctaattaatctaaaatctgatcttgttcaatggagtgctagtacgggcgctgtaattaatcaaatggtaaatactgtattgattacagtgtatgaaaagttacaactggtcatagaaaatgattcacaatttacatgttcattggctgtggaatcaaaacttccaataaaattacttaaagatagaaatgaattatttacaaaattcattaacgagttaaaaaagaccagttcattcaagataagcaaacgcgataaggatacgctactaaaatattttacttaggactggagttagaatttatagacgactcatttcgtttatcattgttactattattactattactatcattattagtgttggcattattagtattcttcttgtcatcttgttcagaaatatacagcaatgctatacctaatactaaatacattatcatgctcgcaatggctctaacaacaacgaaccaaaatgaatttggtcgtagcttttgttcacaaaaatacataaagaaatgtctacataaatctatggcgccattggctacttgaaatagcgccagtcctcctacagattttaatatagctgtataacatgacatttattcatcatcaaaagagacagagtcaccatctgtcatatttagattttttttcatgtgttcaaagtatcctctactcatttcattataatagtttatcatacttagaattttaggacggatcaatgagtaagacttgactagatcgtcagtagtaatttgtgcatcgtctattctgcatccgcttcgtcgaataatgtatagcatcgctttgagattctccatagctatcaagtctttatacaatgacatggaaatatctgtgaatactttatacttctccaacatcgatgccttaacatcatcgcctactttagcattgaaaatacgttctattgtgtagatggatgtagcaagatttttaaacaacaatgccatcttacacgatgattgcctcaagtctccaatcgtttgtttagaacgattagctacagagtccaatgcttggctgactagcatattattatctttagaaattgtattcttcaatgaggcgtttatcatatctgtgatttcgttagtcatattacagtctgactgggttgtaatgttatccaacatatcacctatggatacggtacacgtaccagcatttgtaataatcctatctaagatgttgtatggcattgcgcagaaaatatcttctcctgtaatatctccactctcgataaatctactcagattattcttaaatgccttattctctggagaaaagatatcagtgtccatcatttcattaatagtatacgcagaaaagataccacgagtatcaattctatccaagatacttatcggttccgagtcacagataatggtttcctctccttcgggagatcctgcatagaaatatctaggacaatagtttctatactgtctgtaactctgataatctctaaagtcactaactgataccatgaaattgagaagatcaaacgctgaagtaattaatttttctgcctcgtttttactacaactagttttcatcaatgtagtgacgatgtattgtttagttacttttggtctaatactgatgatagagatattattgcttcccataatggatcttctagtagtcaccttaaagcccattgatgcgaatagcagatagataaagtcttggtatgactcctttctaatatagtacggactacctttgtcacccaactttatacccacataagccataacaacctctttaatagccgtttcatgaggtttatcagccatgagcctgagtagttggaagaatctcatgaatcccgtctcagaaagtcctatatgcatgatagatttatctttcctgggaaactctcgtatagtcatagatgaaatactctttaaagtttctgaaataagattagtaacagtcttacctccgactactctaggtaacaaacaaactctaataggtgttttctctgcggagataatatcagaaaggatagagcaataagtagtattattgtgattataaagaccgaatacataacaggtagaatttataaacatcatgtcctgaaggtttttagacttgtattcctcgtaatccataccgtcccaaaacatggatttggtaactttgatagccgtagatctttgttccttcgccaacaggttaaagaaattaataaagaatttgttgtttctatttatgtccacaaattgcacgtttggaagcgccacggttacattcactgcagcattttgaggatcgcgagtatgaagtacgatgttattgtttactggtatatctggaaagaaatctaccagtctaggaataagagattgatatcgcatagaaatagtaaagtttataatctcatcatcgaagagcattttgttaccattgtaataaatatccactctgtcatatgtataaatgaagtactgttcaaacatgatgagatgtttatatgttggcatagtagtgagatcgacgtttggtaatggcaatgtattaagattaactccataatgtctagcagcatctgcgatgttataagcgtcgtcaaagcggggtcgatcttgtattgttatatattgtctaacacctataagattatcaaaatcttgtctgcttaatacaccgttaacaatttttgccttgaattcttttattggtgcattaataacatccttatagaggatgttaaacaaataagtgttatcaaagttaagatctggatatttcttttctgctagaacatccattgagtcggagccatctggtttaatataaccaccgataaatctagctctgtattctgtatccgtcaatctaatattaagaaggtgttgagtgaaaggtggaagatcgtaaaagctgtgagtattaatgataggattagtttccgaactaatgttaattggggtattaataatatctatatttccagcgttaagtgtaacattaaacagttttaattcacgtgacgtggtatcaattaaataattaatgcccaatttggatatagcagcctgaagctcatcttgtttagttacggatcctaatgagttattaagcaatatatcgaacggatgaacgaaggttgttttaagttggtcacatactttgtaatctagacatagatgcggaagaacggtagaaactatacgaaataaatattcagagtcctctaattgatcaagagtaactattgacttaataggcatcatttatttagtattaaatgacgaccgtaccagtgacggatatacaaaacgatttaattacagagttttcagaagataattatccatctaacaaaaattatgaaataactcttcgtcaaatgtctattctaactcacgttaacaacgtggtagatagagaacataatgccgccgtagtgtcatctccagaggaaatatcctcacaacttaatgaagatctatttccagatgatgattcaccggccactattatcgaacgagtacaacctcatactactattattgacgatactccacctcctacgtttcgtagagagttattaatatcggaacaacgtcaacaacgagaaaaaagatttaatattacagtatcgaaaaatgctgaagcaataatggaatctagatctatgataacttctatgccaacacaaacaccatccttgggagtagtttatgataaagataaaagaattcagatgttagaggatgaagtggttaatcttagaaatcaacgatctaatacaaaatcatctgataatttagataattttaccaaaatactatttggtaagactccgtacaaatcaacagaagttaataagcgtatagccatcgttaattatgcaaatttgaacgggtcccccttatcagtcgaggacttggatgtttgttcggaggatgaaatagatagaatctataaaacgattaaacaatatcacgaaagtagaaaacgaaaaattatcgtcactaacgtgattattattgtcataaacattatcgagcaggcattgctaaaactcggatttgaagaaatcaaaggactgagtaccgatatcacttcagaaattatcgatgtggagatcggagatgactgcgatgctgtagcatctaaactaggaatcggtaacagtccggttcttaatattgtattgtttatactcaagatattcgttaaacgaattaaaattatttaatttaatacattcccatatccagacaacaatcgtctggattaatctgttcctgtcgtctcataccggacgacatattaatctttttattagtgggcatctttttagatggtttctttttcccagcattaactgagtcgatacctagaagatcgtgattgatctctccgaccattccacgaacttctaattggccgtctctgacggtaccataaactattttaccagcattagtaacagcttggacaatctgaccatccatcgcattgtacgatgtagtagtaactgttgttctacgtctaggagcaccagaagtatttttggagcccttggatgttgatgtagaagaagacgaggattttgattttggtttacatgtaatacattttgaactctttgattttgtatcacatgcgccggcagtcacatctgtttgagaattaagattattgttgcctcctttgacggctgcatctccaccgatttgcgctagtagatttttaagctgtggtgtaatcttattaactgtttcgatataatcatcgtaactgcttctaacggctaaattttttttatccgccatttagaagctaaaaatatttttatttatgcagaagatttaactagattatacaatgaactaatatgatccttttccagattatttacaaacttggtattttttggttctggaggaggcgaatttaaattcggacttggattcggattttgtaagttcttgatcttattatacatcgagtataggatggcgacagtaactgctacacaaataccgatcaaaagaagaataccaatcatttattgacaataacttcactattgatcaagtatgcaatatatcatcttttcactaaataagtagtaataatgattcaacaatgtcgagatatatggacgataataatttagttcatggaaatatcgctatgattggtgtgaatgactccgctaactctgtggggtgcgcagtgctttccccacatagaataaattagcattccgactgtgataataataccaagtataaacgccataatactcaatactttccatgtacgagtgggactggtagacttactaaagtcaataaaggcgaagatacacgaaagaatcaaaagaatgattccagcgattagcacgccggaaaaataatttccaatcataagcatcatgtccatttaactaataaaaattttaaatcgccgaatgaacaaagtggaatataaaccatataaaaacaatagtttgtactgcaaaaataatatctatttttgttttcgaagatatggtaaaattaaatagtagtacacagcatgttataactaacagcagcaacggctcgtaattacttatcatttactagacgaaaaggtggtgggatattttcttgctcaaataatacgaatatatcacccatccattttatgcgatgtttatatactctaatctttaatagatctatagacgacgggtttaccaacaatatagattttatcgattcatctaatttaaacccttccttaaacgtgaatgatctattatctggcataacgatgaccctacctgatgaatcggacaatgtactgggccatgtagaataaattatcaacgaattatcgtctacgaacatttatatcatttgttttaattttaggacgcgaataaatggatataaaatagaaaataacagatattacaaccagtgttatggccgcgcccaaccaggtaggcagttttattttatcttttactacaggttctcctggatgtacgtcaccaacggcggacgtagttctagtacaattagacgtaagttccgcttgggaattttttaacgctaaagagttaacgttaatcgtgcacccaacgtatttacatctagttcgttgaacatcttgattataatataaccattttctatctctagattcgtcagtgcactcatgtaaccaacataccctaggtcctaaatatttatctccggaattagattttggataattcgcgcaccaacaatttctatttcctttatgatcgttacaaaagacgtataatgccgtatccccaaaagtaaaataatcaggacgaataattctaataaactcagaacaatatctcgcatccatatgtttggagcaaatatcggaataagtagacatagccggtttccgttttgcacgtaaccattctaaacaattggggtttccaggatcgtttctacaaaatccagtcatgaaatcgtcacaatgttctgtcttgtaattattattaaatatttttggacagtgtttggtatttgtcttagaacaacattttgccacgctatcactatcgcccaggagataatccttttttataaaatgacatcgttgcccggatgctatataatcagtagcgtgttttaaatccttaatatattcaggagttacctcgttctgataatagattaatgatccaggacgaaatttgaaagaactacatggttctccatgaattaatacatattgtttagcaaattcaggaactataaaactactacaatgatctatcgacataccatctatcaaacaaaacttgggtttaatttctcccggagatgtttcataatagtacgtataactttcttctgcaaacttaacagctctattatattcaggataattaaaacctaattccatatatttgtctcgtatatctgctattcctggtgctattttgattctattaagagtaacagctgcccccattcttaataatcgtcagtatttaaactgttaaatgttggtatatcaacatctaccttatttcccgcagtataaggtttgttgcaggtatactgttcaggaatggttacatttatacttcttctatagtcctgtctttcgatgttcatcacatatgcaaagaacagaataaacaaaataatgtaagaaataatattaaatatctgtgaattcgtaaatacattgattgccataataattacagcagctacaatacacacaatagacattcccacagtgttgccattacctccacgatacatttgagttactaagcaataggtaataactaagctagtaagaggcaatagaaaagatgagataaatatcatcaatatagagattagaggagggctatatagagccaagacgaacaaaatcaaaccgagtaacgttctaacatcattatttttgaagattcccaaataatcattcattcctccataatcgttttgcatcatacctccatctttaggcataaacgattgctgctgttcctctgtaaataaatctttatcaagcactccagcacccgcagagaagtcgtcaagcatattgtaatatcttaaataactcatttatatattaaaaaatgtcactattaaagatggagtataatctttatgccgaactaaaaaaaatgacttgtggtcaacccctaagtctttttaacgaagacggggatttcgtagaagttgaaccgggatcatcctttaagtttctgatacctaagggattttacgcctctccttccgtaaagacgagtctagtattcgagacattaacaacgaccgataataaaatcactagtatcaatccaacaaatgcgccaaagttatatcctcttcaacgcaaagtcgtatctgaagtagtttctaatatgaggaaaatgatcgaatcaaaacgtcctctatacatcactcttcacttggcgtgtggatttggtaagactattaccacgtgttatcttatggctacacacggtagaaaaaccgtcatttgcgtacccaataaaatgttaatacatcaatggaagacacaggtagaggcagtcggattggaacataagatatccatagatggagtaagtagtctattaaaggaactaaagactcaaagtccggatgtattaatagtagtcagtagacatctgacaaacgatgccttttgtaaatatatcaataagcattatgatttgttcatcttggatgaatcacatacgtataatctgatgaacaatacagcagttacaagatttttagcgtattatcctccgatgatgtgttattttttaactgctacacctagaccatctaaccgaatttattgtaacagtattattaatattgccaagttatccaatctaaaaaaaactatctatgcagtagatagtttttttgagccatattccacagataatattagacatatggtaaaacgactagatggaccatctaataaatatcatatatataccgagaagttattatctgtagacgagcctagaaatcaacttattcttgataccctggtagaagaattcaagtcaggaactattaatcgcattttagttattactaaactacgtgaacatatggtattattctacaaacgattattagattttttcggaccagaggttgtatttataggagacgcccaaaatagacgtactccagatatggtcaaatcaatcaaggaactaaatagatttatattcgtatccaccttattttattccggtactggtttagatattcctagtttggattcgttgttcatttgctcggcagtaatcaacaatatgcaaatagagcaattactagggagggtatgtcgagaaacagaactattagataggacggtatatgtatttcctaacacatccatcaaagaaataaagtacatgataggaaatttcatgcaacgaattattagtctgtctgtagataaactaggatttaaacaaaaaagttatcggaaacatcaagaatccgatcccacttctgcatgtacaacatcatccagagaagaacgtgtattaaatagaatatttaactcgcaaaatcgttaagaagtttaagcgacgatccgcatgctgcgcaggccagtgtattacccctcatagtattaatataatccaatgatacttttgtgatgtcggaaatcttaaccaatttagactgacaggcagaacacgtcatgcaatcatcatcgtcatcgataactgtagtcttgggcttctttttgcgactcttcattccggaacgcacattggtgctatccatttaggtagtaaaaaataagtcagaatatgccctataacacgatcgtgcaaaacctggtatatcgtctctatctttatcacaatatagtgtatcgacatttttattattattgacctcgtttatcttggaacatggaatgggaacatttttgttatcaacggccatctttgccttaattccagatgttgtaaaattataactaaacagtctatcatcgacacaaatgaaattcttgtttagacgtttgtagtttacgtatgcggctcgttcgcgtctcattttttcagatattgcaggtactataatattaaaaataagaatgaaataacataggattaaaaataaagttatcatgacttctagcgctgatttaactaacttaaaagaattacttagtctgtacaaaagtttgagattttcagattctgcggctatagaaaagtataattctttggtagaatggggaacatctacttactggaaaataggcgtgcaaaaggtagctaatgtcgagacgtcaatatctgattattatgatgaggtaaaaaataaaccgtttaatattgatccgggctattacattttcttaccggtatattttgggagcgtctttatttattcgaagggtaaaaatatggtagaacttggatctggaaactcttttcaaataccagatgatatgcgaagtgcgtgtaacaaagtattagacagcgataacggaatagactttctgagatttgttttgttaaacaatagatggataatggaagatgctatatcaaaatatcagtctccagttaatatatttaaactagctagtgagtacggattaaacatacccaaatatttagaaattgaaatagaggaagacacattatttgacgacgagttatactctattatagaacgctctttcgatgataaatttccaaaaatatccatatcgtatattaagttgggagaacttagacggcaagttgtagactttttcaaattctcattcatgtatattgagtccatcaaggtagatcgtataggagataatatttttattcctagcgttataacaaaatcaggaaaaaagatattagtaaaagatgtagaccatttaatacgatccaaggttagagaacatacatttgtaaaagtaaaaaagaaaaacacattttccattttatacgactatgatggaaacggaacagaaactagaggagaagtaataaaacgaattatagacactataggacgagactattatgttaacggaaagtatttctctaaggttggtagtgcaggcttaaagcaattgactaataaattagatattaatgagtgcgcaactgtcgatgagttagttgatgagattaataaatccggaactgtaaaacgaaaaataaaaaaccaatcagcatttgatttaagcagagaatgtttgggatatccagaagcggattttataacgttagttaataacatgcggttcaaaatagaaaattgtaaggttgtaaatttcaatattgaaaatactaattgtttaaataacccgagtattgaaactatatatggaaactttaaccagttcgtctcaatctttaatgtcgtcaccgatgtcaaaaaaagattattcgagtgaaataatatgcgcctttgatataggtgcaaaaaatcctgccagaactgttttagaagtcaaggataactccgttagggtattggatatatcaaaattagactggagttctgattgggaaaggcgcatagctaaagatttgtcacaatatgaatacactacagttcttctagaacgtcagcctagaaggtcgccgtatgttaaatttatctattttattaaaggctttttatatcatacatcggctgccaaagttatttgcgtctcgcctgtcatgtctggtaattcatatagagatcgaaaaaagagatcggtcgaagcatttcttgattggatggacacattcggattgcgagactccgttccggatagacgcaaattagacgatgtagcggatagtttcaatttggctatgagatacgtattagataaatggaatactaattatacaccttataataggtgtaaatctagaaattacataaaaaaaatgtaataacgttagtaacgccattatggataatctatttacctttctacatgaaatagaagatagatatgccagaactatttttaactttcatctaataagttgcgatgaaataggagatatatatggtcttatgaaagaacgcatttcctcagaggatatgtttgataatatagtgtataataaagatatacatcctgccattaagaaactagtgtattgcgacatccaacttactaaacacattattaatcagaatacgtatccggtatttaacgattcttcacaagtgaaatgttgtcattatttcgacataaactcagataatagcaatattagctctcgtacagtagagatatttgagagggaaaagtcatctcttgtatcatatattaaaactaccaataagaagagaaaggtcaattacggcgaaataaagaaaactgttcatggaggcactaatgcaaattacttttccggtaaaaagtctgacgagtatctgagtactacagttagatccaacattaatcaaccttggatcaaaaccatctctaagaggatgagagttgatatcattaatcactctatagtaacgcgtggaaaaagctctatattacaaactatagaaattatttttactaatagaacatgtgtgaaaatattcaaggattctactatgcacattattctatccaaggacaaggatgaaaaggggtgtatacacatgattgacaaattattctatgtctattataatttatttctgttgttcgaagatatcatccaaaacgagtactttaaagaagtagctaatgttgtaaaccacgtactcacggctacggcattagatgagaaattattcctaattaagaaaatggctgaacacgatgtttatggagttagcaatttcaaaatagggatgtttaacctgacatttattaagtcgttggatcataccgttttcccctctctgttagatgaggatagcaaaataaagttttttaaggggaaaaagctcaatattgtagcattacgatctctggaggattgtataaattacgtgactaaatccgagaatatgatagaaatgatgaaggaaagatcgactattttaaatagcatagatatagaaacggaatcggtagatcgtctaaaagaattgcttctaaaatgaaaaaaaacactaattcagaaatggatcaacgactagggtataagtttttggtgcctgatcctaaagccggagttttttatagaccgttacatttccaatatgtatcgtattctaattttatattgcatcgattgcatgaaatcttgaccgtcaagcggccactcttatcgtttaagaataatacagaacgaattatgatagaaattagcaatgttaaagtgactcctccagattactcacctataatcgcgagtattaaaggtaagagttatgacgcattagccacgttcactgtaaatatctttaaagaggtaatgaccaaagagggtatatccatcactaaaataagtagttatgagggaaaagattctcatttgataaaaattccgctactaataggatacgggaataaaaatccacttgatacagccaagtatcttgttcctaatgtcataggtggagtctttatcaataaacaatctgtcgaaaaagtaggaattaatctagtagaaaagattacaacatggccaaaatttagggttgttaagccaaactcattcactttctcgttttcctccgtatcccctcctaatgtattaccgacaagatatcgccattacaagatatctctggatatatcacaattggaagcgttgaatatatcatcgacaaagacatttataacggtcaatattgttttgctgtctcaatatttatctagagtgagtctagaattcattagacgtagtttatcatacgatatgcctccagaagttgtctatctagtaaacgcgataatagatagtgctaaacgaattactgaatctattactgactttaatattgatacatacattaatgacctggtggaagctgaacacattaaacaaaaatctcagttaacgatcaacgagttcaaatatgaaatgctgcataactttttacctcatatgaactatacacccgatcaactaaagggattttatatgatatctttactaagaaagtttctctactgtatcttccacacttctagatatccagatagagattcgatggtttgtcatcgcatcctaacgtacggcaaatattttgagacgttggcacatgatgaattagagaattacataggcaacatccgaaacgatatcatgaacaatcacaagaacagaggcacttacgcggtaaacattcatgtactaacaactcccggacttaatcacgcgttttctagcttattgagtggaaagttcaaaaagtcagacggtagttatcgaacacatcctcactattcatggatgcagaatatttctattcctaggagtgttggattttatccggatcaagtaaagatttcaaagatgttttctgtcagaaaataccatccaagtcaatatctttacttttgttcatcagacgttccggaaagaggtcctcaggtaggtttagtatctcaattgtctgtcttgagttccattacaaatatactaacgtctgagtatttggatttggaaaagaaaatttgtgagtatatcagatcatattataaagatgatataagttactttgaaacaggatttccaatcactatagaaaatgctctagtcgcatctcttaatccaaatatgatatgtgattttgtaactgactttagacgtagaaaacggatgggattcttcggtaacttggaggtaggtattactttagttagggatcacatgaatgaaattcgcattaatattggagcgggaagattagtcagaccattcttggttgtggataacggagagctcatgatggatgtgtgtccggagttagaaagcagattagacgacatgacattctctgacattcagaaagagtttccgcatgtcatcgaaatggtagatatagaacaatttacttttagtaacgtatgtgaatcggttcaaaaatttagaatgatgtcaaaggatgaaagaaagcaatacgatttatgtgactttcctgccgaatttagagatggatatgtagcatcttcattagtgggaatcaatcacaattctggacccagagctattcttggatgtgctcaagctaaacaagctatctcttgtctgagctcggatatacgaaataaaatagacaatggaattcatttgatgtatccagagaggccaatcgtgattagtaaggctttagaaacttcaaagattgcggctaattgcttcggccaacatgttactatagcattaatgtcgtacaaaggtatcaatcaagaggatggaattatcatcaaaaaacaatttattcagagaggcggtctcgatattgttacagccaagaaacatcaagtagaaattccattggaaaactttaataacaaagaaagagataggtctaacgcctattcaaaattagaaagtaatggattagttagactgaatgctttcttggaatccggagacgctatggcacgaaatatctcatcaagaactcttgaagatgattttgctagagataatcagattagcttcgatgtttccgagaaatataccgatatgtacaaatctcgcgttgaacgagtacaagtagaacttactgacaaagttaaggtacgagtattaaccatgaaagaaagaagacccattctaggagacaaatttaccactagaacgagtcaaaagggaacagtcgcgtatgtcgcggatgaaacggaacttccatacgacgaaaatggtatcacaccagatgtcattattaattctacatccatcttctctagaaaaactatatctatgttgatagaagttattttaacagccgcatattctgctaagccgtacaacaataagggagaaaaccgacctgtctgttttcctagtagtaacgaaacatccatcgatacatatatgcaattcgctaaacaatgttatgagcattcaaatccgaaattgtccgatgaagaattatcggataaaatcttttgtgaaaagattctctatgatcctgaaacggataagccttatgcatccaaagtattttttggaccaatttattacttgcgtctgaggcatttaactcaggacaaggcaaccgttagatgtagaggtaaaaagacgaagctcattagacaggcgaatgagggacgaaaacgtggaggaggtatcaagttcggagaaatggagagagactgtttaatagcgcatggtgcagccaatactattacagaagttttgaaagattcggaagaagattatcaagatgtgtatgtttgtgaaaattgtggagacatagcagcacaaatcaagggtattaatacatgtcttagatgttcaaaacttaatctctctcctctcttaacaaaaattgataccacgcacgtatctaaagtatttcttactcaaatgaacgccagaggcgtaaaagtcaaattagatttcgaacgaaggcctccttcgttttataaaccattagataaagttgatctcaagccgtcttttctggtgtaatattctagtttggtagtagatacatatcaatatcatcaaattcgagatccgaattataaaatgggcgtggattgttaactatagaatcggacgtctgatattcgaaaatctgtggagtttcaggttttggtggaggtgtaactgctacttgggatactgaagtctgatattcagaaagctgtggatgttctggttcggcatccaccgatggtgtcacatcactaatcggttcggtaacgtctgtggatggaggtgctacttctacagaacctgtagcctcagttgtcaacggagatacatttttaatgcgagaaaatgtataatttggtaatggtttcttatgtggatctgaagaagaggtaagatatctactagaaagataccgatcacgttctagttctcttttgtagaacttaactttttctttctccgcatctagttgatattccaacctcttcacgttactacgttcagattccaattcacgttcgcatgggttacctccgcagtttttacgagcgatttcacgttcagccttcatgcgtctctccctctctctatcgagtttatcagagcagtctttctgaaggcgatcgaactccataaatttctccaacgctttgattgtttccatagatttccgaagttcagcttttaggactgtgattctttttctttcgaattcacagctggatgtacaaccgtttccattaccgccatctctaagtttcttttctagatcggcaacatttcatccccatgccttttacattcctcgagtctactgtcgtcgaaatatcgttccagctccttttcgacatcaataactttagcacgttgtctctcaagctctcttttgtagttatctgattccctggcacgtttaagatcttcatgcaattgagtcagctcttaacttcctctcttgcttcttcgtcatagtacgcgcaatcactgtgagatccattgttaccacgtctacactcggcgagctcgcgtttaagagattcaatttcccgtttgtattggtccatgtttccattgctaccaccattagatttacaggctgctagttgtcgttcgagatcagaaatacgggttttcttggaattgatttcgtcgatgtacttggcatcgaaacacttattaagttctttttccaattctacgattttatttctttcgcgagtcaattccctcctgtagtaactatctgttttgtcagattcacgctctctacgtagactttcttgcaagttactaatttgttccctagcacgtccgagtttagttttatatgctgaatagagttctgattcatcctttgagcagatctctagcgatcgtttaagattcctaattctagtctttagcctatttacctcctcagaagatgttccgttaccgttgcgtttacactcgttaagctgtctatcaagatccatgattctatctctaagacgttgcatctctctttccatatcagcattgctttcattattacgtctgcagtcactcaactgtctttcaatatctgagattctatctctaagacgtcgcatctctctctgtttcggcattggtttcattattacgtttacagtcgttcaactgtctttcaagatctgatattctagattggagtctgctaatctctgtagcattttcacggcattcactcagttgtctttcaagatctgaaattttagattggagtctgctaatctctgtaagatttcctcctccgctctcgatgcagtcggtcaacttattctctagttctctaatacgcgaacgcagtgcatcaacttcttgcgtgtcttcctggttgcgtgtacattcatcgagatctctaacgcgtcgtcgttcttcctcaagttctctgcgtactacagaaagcgtgtccctatcttgttgatatttagcaatttctgattctagagtactgattttgcttacgtagttactaatagttgtcttggccttatcaagatcctccttgtatttgtcgcattccttgatatccctacgaagtctggacagttcccattcgacattacgacgtttatcgatttcagctcggagatcgtcatcgcgttgttttagccacatacgactgagttcaagttctcgttgacaagatccatctacttttccattcctaatagtatccagttccttttctagttctgaacgcatttctcgttccctatcaagcgattctctcaattctcggatagtcttcttatcaatttctaataaatctgaaccatcatctgtcccattttgaatatccctgtgttctttgatctcttttgtaagtcggtcgattctttcggttttataaacagaatccctttccaaagtcctaatcttactgagtttatcactaagttctgcattcaattcggtgagttttctcttggcttcttccaactctgttttaaactctccactatttccgcattcttcctcgcatttatctaaccattcaattagtttattaataactagttggtaatcagcgattcctatagccgttcttgtaattgtgggaacataattaggatcttctaatggattgtatggcttgatagcatcatctttatcattattagggggatggacaaccttaattggttggtcctcatctcctccagtagcgtgtggttcttcaataccagtgttagtaataggcttaggcaaatgcttgtcgtacgcgggcacttcctcatccatcaagtatttataatcgggttctacttcagaatattcttttctaagagacgcgacttcgggagttagtagaagaactctgtttctgtatctatcaacgctggaatcaatactcaagttaaggatagcgaatacctcatcgtcatcatccgtatcttctgaaacaccatcatatgacatttcatgaagtctaacgtattgataaatagaatcagatttagtattaaacagatccttaacctttttagtaaacgcatatgtatattttagatctccagatttcataatatgatcacatgccttaaatgtcagtgcttccatgatataatctggaacactaatgggtgacgaaaaagatacagcaccatatgctacgttgataaataaatctgaaccactaagtagataatgattaatgttaagaaagaggaaatattcagtgtataggtatgtcttggcgtcatatcttgtactaaacacgctaaacagtttgttaatgtgatcaatttccaatagattaattagagcagcgggaataccaacaaacatattaccacatccgtattttctatgaatatcacatatcatgttaaaaaatcttgatagaagagcgaatatctcgtctgacttaatgagtcgtagttcagcagcaacataagtcataactgtaaatagaacatactttcctgtagtgttgattctagactccacatcaacaccattattaaaaatagttttatatacatctttaatctgctctccgttaatcgtcgaacgttctagtatacggaaacactttgatttcttatctgtagttaatgacttagtgatatcacgaagaatattacgaattacatttcttgtttttcttgagagacctgattcagaactcaactcatcgttccatagtttttctacctcagtggcgaaatctttggagtgcttggtacatttttcaataaggttcgtgacctccatttattataaaaaatttattcaaaacttaactacaatcgggtaattataagatcgtagatctcccatgtggcggaatactaccatctatcgcatgtggatggacagtaggtaatggccatgggaacagtaatgtttgcatatttatctttcttgctagtattactgcatattgtcccaatgtttcgatgtgatgttctaacctatcaactgccgctgtatcacaacaatagtgtccgatgaaattaagattatgatccaatgtgtttaatatatgattatcaagtcttatacgatccgcgtcttttttgacaggatcaggttcttctacaggaagaagtttcggcctcttatgatattcatgtctgggaaacggtggtctagggtgaggctccggtatcggagtgggttttggattataatcatcatcgtctatgacatcatcttcgacttcgatatttattttgctatcttgatgatgtcctgtatcagttgcattttcagcactcgactgaatattagcgcattcattgtctattattaccatatttctaaacccaaaatgtatgtgttgaacatcagtactatcgttgatgagtcttatagcatgaattcgcttatcgttatcgggtttatcttctgtcaccttagcaattccttttttattaaactctacataatcatatccatttctattgtttgttctaatataaacgagtatagcatcattgctaaatttttcaatagtatcaaaaacagaatatcctaaaccatataatatatattcaggaacactcaaactaaatgtccaggattctcctaaatacgtaaactttaatagtgcgaaatcattcaaaaatctaccacttatagatagatagtacataaatgcgtatagtagtctacctatctctttattatgaaaaccggcattacgatcatatatgtcgtgatatacctgtgatccgtttacgttaaaccataaatacatgggtgatcctataaacatgaatttatttctaattctcagagctatagttaattgaccgtgtaatatttgcttacatgcatacttgatacgcttattaataagatttttatcattgctcgttatttcagaatcgtatatataaggagtaccatcgtgattcttaccagatattatacaaaatactatatataaaatatattgacccacgttagtaatcatataaatgtttaacgttttaaattttgtattcaatgatccattatcatacgctatcatggtcttgtaatattcattctttaaaatataatattgtgttagccattgcattggagctcctaatggagattttctattctcatccattttaggataggctttcataaagtccctaataacttcgtgaataatgtttctatgttttctactgatgcatgtatttgcttcgatttttttatcccatgtttcatctatcatagatttaaacgcagtaatgctcgcaacattaacatcttgaaccgttggtacaattccgttccataaatttataatgttcgccatttatataactcattttttgaatatacttttaattaacaaaagagttaagttactcatatggacgccgtccagtctgaacatcaatctttttagccagagatatcatagccgctcttagagtttcagcgtgattttccaacctaaatagaacttcatcgttgcgtttacaacacttttctatttgttcaaactttgttgttacattagtaatctttttttccaaattagttagccgttgtttgagagtttcctcattgtcgtcttcatcggctttaacaattgcttcgcgtttagcctctggctttttagcagcctttgtagaaaaaaattcagttgctggaattgcaagatcgtcatctccggggaaaagagttccgtccatttaaagtacagattttagaaactgacactctgcgttatttatatttggtacaacacatggattataaatattgatgttaataacatcagaaaatgtaaagtctatacattgttgcatcgtgttaaattttctaatggatctagtattattgggtccaacttctgcctgaaatccaaatatggaagcggatacaaaaccgtttcctggataaaccacacatctccacttttgctttacatcagaaattgtgtcgttgacatcttgaactctcctatctaatgccggtgttccacctatagattttgaatattcgaatgctgcatgagtagcattaaattccttaatattgccataattttcatatattgagtaaccctggataaaaagtaaacacaccgcagccgtcgctaccacaataaaaaaaattgatagagagttcatttataatctattagaagctgacaaaatttttttacacgcatcagacaatgctttaataaatagttcaacatctacttttgtcatatcgaaccgatggtatgattctaacctagaattacatccgaaaaagttgactatgttcatagtcattaagtcattaacaaacaacattccagactctggattataagacgatactgtttcgtcacaattacctaccttaatcatgtgattatgaatattggctattagagcaccttctaagaaatctataatatctttgaaacacgatttaaaatcaaaccacgaatatacttctacgaagaaagttagtttacccataggagaaataactataaatggagatctaaatacaaaatccggatctatgatagttttaacattattatattctctattaaatacctccacatctaaaaatgttaattttgaaactatgtcttcgtttattaccgtacctgaactaaacgctataagctctattgtttgagaactctttaaacgatattcttgaaatacatgtaacaaagtttcctttaactcggtcggtttatctaccatagttacagaatttgtatccttatctataatataataatcaaaatcgtataaagttatataattatcgcgttcagattgtgatcttttcaaatagactaaaaaccccatttctctagtaagtatcttatgtatatgtttgtaaaatatcttcatggtgggaatatgctctaccgcagttagccattcctcattgacagcggtagatgtattagacaaaactattccaatgtttaacaagggccattttacgagattattaaatccttgtttgataaatgtagccaatgagggttcgagttcaacgacgattgaattctcttcccgcggatgctgcatgatgaacgacgggatgttgttcgattgatttggaattctttttcgactttttgtttatattaaatattttaaaatttatagcggatagcaattcatgtaccacggataatgtagacgcgtattgcgcatcgatatctttattattagataaatttatcaataaatgtgagaagtttgcctcgttaaggtcttccatttaaatattatataaacatttgtgtttgtatcttattcgtcttttatggaatagttttttactagtaaagctgcaattacacactttgtccgtaaaacataaatataaacaccagcttttatcaatcgttccaaaaagtcgacggcggacatttttaacatggcatctattttaaatacacttaggtttttggaaaaaacatcattttataattgtaacgattcaataactaaagaaaagattaagattaaacataagggaatgtcatttgtattttataagccaaagcattctaccgttgttaaatacttgtctggaggaggtatatatcatgatgatttggttgtattggggaaggtaacaattaataatctaaagatgatgctattttacatggatttatcatatcatggagtgacaagtagtggagcaatttacaaattgggatcgtctatcgatagactttctctaaataggactattgttacaaaagttaataattatgatgatacattttttgacgacgatgattgatcgctattgcacaattttgtttttgtactttctaatatagtgtttaggttctttttcatatgagaatattgatttactaaaatatctatgtttaacttttgttctatgacgtccttatcggcggtatcggtacatatacgtaattcaccttcacaaaatacggagtcttcgataataatagccaatcgattattggatctagctgtctgtatcatattcaacatgtttaatatatcctttcgtttcccctttacaggcatcgatcgtagcatattttccgcgtctgatatggaaatgttaaaactacaaaaatgcgtaatgttagcccgtcctaatattggtacgtgtctataagtttggcatagtagaataatagacgtgtttaaatgccttccaaagtttaagaattctattagagtattgcattttgatagtttatcgcctacatcatcaaaaataagtaaaaagtgtgctgattttttatgattttgtgcgacagcaatacatttttctatgttacttttagttcgtatcagattatattctagagattcctgactactaacgaaattaatatgatttggccaaatgtatccatcataatctgggttataaacgggtgtaaacaagaatatatgtttatattttttaactagtgtagaaaacagagatagtaaatagatagtttttccagatccagatcctcctgttaaaaccattctaaacggcatttttaataaattttctcttgaaaattgtttttcttggaaacaattcataattatatttacagttactaaattaatttgataataaatcaaaatatggaaaactaaggttgttagtagggaggagaacaaagaaggcacatcgtgatataaataacatttattatcatgatgacaccagaaaacgacgaagagcagacatctgtgttctccgctactgtttacggagacaaaattcagggaaagaataaacgcaaacgcgtgattggtctatgtattagaatatctatggttatttcactactatctatgattaccatgtccgcgtttctcatagtgcgcctaaatcaatgcatgtctgctaacgaggctgctattactgacgccgctgttgccgttgctgctgcatcatctactcatagaaaggttgcgtctagcactacacaatatgatcacaaagaaagctgtaatggtttatattaccagggttcttgttatatattacattcagactaccagttattctcggatgctaaagcaaattgcactgcggaatcatcaacactacccaataaatccgatgtcttgactacctggctcattgattatgttgaggatacatggggatctgatggtaatccaattacaaaaactacatccgattatcaagattctgatgtatcacaagaagttagaaagtatttttgtgttaaaacaatgaactaatatttatttttgtacattaataaatgaaatcgcttaatagacaaactgtaagtaggtttaagaagttgtcggtgccggccgctataatgatgatactctcaaccattattagtggcataggaacatttctgcattacaaagaagaactgatgcctagtgcttgcgccaatggatggatacaatacgataaacattgttatttagatactaacattaaaatgtctacagataatgcggtttatcagtgtcgtaaattacgagctagattgcctagacctgatactagacatctgagagtattgtttagtattttttataaagattattgggtaagtttaaaaaagaccaatgataaatggttagatattaataatgataaagatatagatattagtaaattaacaaattttaaacaactaaacagtacgacggatgctgaagcgtgttatatatacaagtctggaaaactggttaaaacagtatgtaaaagtactcaatctgtactatgtgttaaaaaattctacaagtgacaacaaaaaatgaattaataataagtcgttaacgtacgccgccatggacgccgcgtttgttattactccaatgggtgtgttgactataacagatacattgtatgatgatctcgatatctcaatcatggactttataggaccatacattataggtaacataaaaactgtccaaatagatgtacgggatataaaatattccgacatgcaaaaatgctactttagctataagggtaaaatagttcctcaggattctaatgatttggctagattcaacatttatagcatttgtgccgcatacagatcaaaaaataccatcatcatagcatgcgactatgatatcatgttagatatagaagataaacatcagccattttatctattcccatctattgatgtttttaacgctacaatcatagaagcgtataacctgtatacagctggagattatcatctaatcatcaatccttcagataatctgaaaatgaaattgtcgtttaattcttcattctgcatatcagacggcaatggatggatcataattgatgggaaatgcaatagtaattttttatcataaaagttgtaaagtaaataataaaacaataaatattgaactagtagtacgtatattgagcaatcagaaatgatgctggtacctcttatcacggtgaccgtagttgcgggaacaatattagtatgttatatattatatatttgtaggaaaaagatacgtactgtctataatgacaataaaattatcatgacaaaattaaaaaagataaagagttctaattccagcaaatctagtaaatcaactgatagcgaatcagactgggaggatcactgtagtgctatggaacaaaacaatgacgtagataatatttctaggaatgagatattggacgatgatagcttcgctggtagtttaatatgggataacgaatccaatgttatggcgcctagcacagaacacatttacgatagtgttgctggaagcacgctgctaataaataatgatcgtaatgaacagactatttatcagaacactacagtagtaattaatgaaacggagactgttgaagtacttaatgaagataccaaacagaatcctaactattcatccaatcctttcgtaaattataataaaaccagtatttgtagcaagtcaaatccgtttattacagaacttaacaataaatttagtgagaataatccgtttagacgagcacatagcgatgattatcttaataagcaagaacaagatcatgaacacgatgatatagaatcatcggtcgtatcattggtgtgattagtttcctttttataaaattgaagtaatatttagtattattgctgccgtcacgttgtacaaatggagatattccctgtattcggcatttctaaaattagcaattttattgctaataatgactgtagatattatatagatacagaacatcaaaaaattatatctgatgagatcaatagacagatggatgaaacggtacttcttaccaacatcttaagcgtagaagttgtaaatgacaatgagatgtaccatcttattcctcatagattatcgacgattatactctgtattagttctgtcggaggatgtgttatctctatagataatgacatcaatggcaaaaatattctaacctttcccattgatcatgctgtaatcatatccccactgagtaaatgtgtcgtagttagcaagggtcctacaaccatattggttgttaaagcggatatacctagcaaacgattggtaacatcgtttacaaacgacatactatatgtaaacaatctgtcactgattaattatttgccgttgtctgtattcattattagacgagtcaccgactatttggatagacacatatgcgatcagatatttgctaataataagtggtattcccttataaccatcgacgataagcaatatcctattccatcaaactgtataggtatgtcctctgccaagtacataaattctagcatcgagcaagatactttaatccatgtttgtaacctcgagcatccgttcgactcagtatacaaaaaaatgcagtcgtacaattctctacctatcaaggaacaaatattgtacggtagaattgataatataaatatgagcattagtatttctgtggattaatagatttctagtatggggatcattaatcatctctaatctctaaatacctcataaaacgaaaaaaaagctattatcaaatactgtacggaatggattcattctcttctctttttatgaaactctgttgtatatctactgataaaactggaagcaaaaaatctgatagaaagaataagaataagatcaaggattatatggaacacgattattataaaataacaatagttcctggttcctcttccacgtctactagctcgtggtattatacacatgcctagtaatagtctctttgcgttgacggaaagcagactagaaataacaggctaaaatgttcagacaccataatagttcccaacccagataataacagagttccatcaacacattcctttaaactcaatcccaaacccaaaaccgttaaaatgtatccggccaattgatagtagataatgaggtgtacagcgcatgataatttacacagtaaccaaaatgaaaatactttagtaattataagaaatatagacggtaatgtcatcatcaacaatccgataatatgcctgagagtaaacattgacggataaaacaaaaatgctccgcataactctatcatggcaataacacaaccaaatacttgtaagattcctaaattagtagaaaatacaacgaatatcgatgtataagtgatctcgagaaataataagaataaagtaatgcccgtaaagataaacatcaacattgtttggtaatcattaaaccaattagtatgaagttgaactaatttcacagtagattttattccagtgttatcctcgcatgtataagtacctggtaagatatctttatattccataatcaatgagacatcactatctgataacgaatgaagtctagcactagtatgccatttacttaatattgtcgtcttggaagttttattataagttaaaatatcatggttatccaatttccatctaatatactttgtcggattatctatagtacacggaataatgatggtatcattacatgctgtatactctatggtctttgtagttgttataacaaccaacgtatagaggtatatcaacgatattctaactcttgacattttttatttatttaaaatgatacctttgttatttattttattctattttgctaacggtattgaatggcataagtttgaaacgagtgaagaaataatttctacttacttattagacgacgtattatacacgggtgttaatggggcggtatacacattttcaaataataaactaaacaaaactggtttaactaataataattatataacaacatctataaaagtagaggatgcggataaggatacattagtatgcggaaccaataacggaaatcccaaatgttggaaaatagacggttcagacgacccaaaacatagaggtagaggatacgctccttatcaaaatagcaaagtaacgataatcagtcacaacggatgtgtactatctgacataaacatatcaaaagaaggaattaaacgatggagaagatttgacggaccatgtggttatgatttattcacggcggataacgtaattccaaaagatggtttacgaggagcattcgtcgataaagacggtacttatgacaaagtttacattcttttcactgatactatcggctcaaagagaattgtcaaaattccgtatatagcacaaatgtgcctaaacgacgaaggtggtccatcatcattgtctagtcatagatggtcgacgtttctcaaagtcgaattagaatgtgatatcgacggaagaagttatagacaaattattcattctagaactataaaaacagataatgatacgatactatatgtattcttcgatagtccttattccaagtccgcattatgtacctattctatgaataccattaaacaatctttttctacgtcaaaattggaaggatatacaaagcaattgccgtctccagctcctggtatatgtttaccagctggaaaagttgttccacataccacgtttgaagtcatagaacaatataatgtactagatgatattataaagcctttatctaaccaacctatcttcgaaggaccgtctggtgttaaatggttcgatataaaggagaaggaaaatgaacatcgggaatatagaatatacttcataaaagaaaattctatatattcgttcgatacaaaatctaaacaaactcgtagctcgcaagtcgatgcgcgactattttcagtaatggtaactgcgaaaccgttatttatagcagatatagggataggagtaggaatgccacaaatgaaaaaaatacttaaaatgtaatcttaatcgagtacaccacacgacaatgaacaaacataagacagattatgctggttatgcttgctgcgtaatatgcggtctaattgtcggaattatttttacagcgacactattaaaagttgtagaacgtaaattagttcatacaccattaatagataaaacgataaaagatgcatatattagagaagattgtcctactgactggataagctataataataaatgtatccatttatctactgatcgaaaaacctgggaggaaggacgtaatgcatgcaaagctctaaattcaaattcggatctaattaagatagagactccaaacgagttaagttttttaagaagccttagacgaggctattgggtaggagaatccgaaatattaaaccagacaaccccatataattttatagctaagaatgccacgaagaatggaactaaaaaacggaaatatatttgtagcacaacgaatactcccaaactgcattcgtgttacactatataacaattacactacatttttatcataccactacttcggttagatgttttagaaaaaaataaatatcgccgtaccgttcttgtttttataaaaataacaattaacaattatcaaattttttctttaatattttacgtggttgaccattcttggtggtaaaataatctcttagtgttggaatggaatgctgtttaatgtttccacactcatcgtatattttgacgtatgtagtcacatcgtttacgcaatagtcagactgtagttctatcatgcttcctacatcagaaggaggaacagttttaaagtctcttggttttaatctattaccgttagttttcatgaaatcctttgttttatccacttcacattttaaataaatgtccactatacattcttttgttaattttactagatcgtcatgggtcatagaatttataggttccgtagtccatggatccaaactagcaaacttcgcgtatacggtatcgcgattagtgtatacaccaactgtatgaaaattaagaaaacagtttaataaatcaacagaaatatttaatcctccgtttgatacagatgcgccatatttatggatttcggattcacacgttgtttgtctgaggtgttcgtctagtgttgcttctacgtaaacttcgattcccatatattctttattgtcagaatcgcataccgatttatcatcatacactgtttgaaaactaaatggtatacacatcaaaataataaataataacgagtacattctgcaatattgttatcgtaattggaaaaatagtgttcgagtgagttggattatgtgagtattggattgtatattttattttatattttgtaataagaataaaatgctaatgtcaagtttattccaatagatgtcttattaaaaacatatataataaataacaatggctgaatggcataaaattatcgaggatatctcaaaaaataataagttcgaggatgccgccatcgttgattacaagactacaaagaatgttctagctgctattcctaacagaacatttgccaagattaatccgggtgaaattattcctctcatcactaatcgtaatattctaaaacctcttattggtcagaaatattgtattgtatatactaactctctaatggatgagaacacgtatgctatggagttgcttactgggtacgcccctgtatctccgatcgttatagcgagaactcataccgcacttatatttttgatgggtaagccaacaacatccagacgtgacgtgtatagaacgtgtagagatcacgctacccgtgtacgtgcaactggtaattaaaataaaaagtaatattcatatgtagtgtcaattttaaatgatgatgatgaaatggataatatccatattgacgatgtcaataatgccggtattggcatacagttcatcgatttttagatttcattcagaggatgtggaattatgttatgggcatttgtattttgataggatctataatgtagtaaatataaaatataatccgcatattccatatagatataattttattaatcgcacgttaaccgtagatgaactagacgataatgtcttttttacacatggttattttttaaaacacaaatatggttcacttaatcctagtttgattgtctcattatcaggaaacttaaaatataatgatatacaatgctcagtaaatgtatcgtgtctcattaaaaatttggcaacgagtacatctactatattaacatctaaacataagacttattctctacatcggtccacgtgtattactataataggatacgattctattatatggtataaagatataaatgacaagtataatgacatctatgattttactgcaatatgtatgctaatagcgtctacattgatagtgaccatatacgtgtttaaaaaaataaaaatgaactcttaattatgctatgctattagaaatggataaaatcaaaattacggttgattcaaaaattggtaatgttgttaccatatcgtataacttggaaaagataactattgatgtcacacctaaaaagaaaaaagaaaaggatgtattattagcgcaatcagttgctgtcgaagaggcaaaagatgtcaaggtagaagaaaaaaatattatcgatattgaagatgacgatgatatggatgtagaaagcgcgtaatacgatctataaaaataagtatataaatactttttatttactgtactcttactgtgtagtggtgataccctactcgattatttttttaaaaaaaaaatacttattctgattcttctagccatttccgtgttcgtttgaatgccacatcgacgtcaaagataggggagtagttgaaatctagttctgcattgttggtacgcacctcaaatgtagtgttggatatcttcaacgtatagttgttgagtagtgatggttttctaaatagaattctcttcatatcattcttgcacgcgtacatttttagcatccatcttggaatcctagatccttgttctattcccaatggtttcatcaatagaagattaaacatatcgtacgaacacgatggagagtaatcgtagcaaaagtaagcatttcctttaatcttagatcccggatactggatatattttgcagccaacacgtgcatccatgcagcatttcctacatatacccggctatgcaccgcgtcatcatcgactgtacgatacataatgttaccgtgttgcttacattgctcgtaaaagactttcatcaatttgtctccttctccgtaaattccagtgggtcttaggcaacaagtatacaattttgctccattcatgattacggaattattggctttcataaccagttgctcggccatacgtttactttttgcgtatacatgtcctggtgatatatcataaagggtatgctcatggccgatgaatggatcaccgtgtttattgggtcctattgcttccatgctactagtatagatcaaatacttgattcctaggtccacacaagctgccaaaatagtctgtgttccataatagtttactttcatgatttcattatcggtgtattttccaaatacatccactagagcagccgtatgaataatcagatttaccccatctagcgcttctctcaccttatcaaagtcgtttatatcacattgtatatagtttataaccttaactttcgaggttattggttgtggatcttctacaatatctatgactctgatttcttgaacatcatctgcactaattaacagttttactatatacctgcctagaaatccggcaccaccagtaaccgcgtacacggccattgctgccactcataatatcagactacttattctattttactaaataatggctgtttgtataatagaccacgataatatcagaggagttatttactttgaaccagtccatggaaaagataaagttttaggatcagttattggattaaaatccggaacgtatagtttgataattcatcgttacggagatattagtcaaggatgtgattccataggcagtccagaaatatttatcggtaacatctttgtaaacagatatggtgtagcatatgtttatttagatacagatgtaaatatatttacaattattggaaaggcgttatctatttcaaaaaatgatcagagattagcgtgtggagttattggtatttcttacataaatgaaaagataatacattttcttacaattaacgagaatggcgtttgatatatcagttaatgcgtctaaaacaataaatgcattagtttacttttctactcagcaaaataaattagtcatacgtaatgaagttaatgatacacactacactgtcgaatttgatagggacaaagtagttgacacgtttatttcatataatagacataatgacaccatagagataagaggggtgcttccagaggaaactaatattggttgcgcggttagtatgacttacttgtataataagtatagttttaaactgattttagcagaatatataagacacagaaatactatatccggcaatatttattcggcattgatgacactagatgatttggctattaaacagtatggagacattgatctattatttaatgagaaacttaaagtagactccgattcgggactatttgactttgtcaactttgtaaaggatatgatatgttgtgattctagaatagtagtagctctatctagtctagtatctaaacattgggaattgacaaataaaaaatataggtgtatggcattagccgaacatatatctgatagtattccaatatctgagctatctagactacgatacaatctatgtaagtatctacgcggacacactgagagcatagaggataaatttgattattttgaagacgatgattcgtctacatgttctgccgtaaccgacagggaaacggatgtataattttttttatagcgtgaaggatatgataaaaaatataattgttgtatttatcccattccaatcaccttatatgattctgtaacacaataaaggagtcttatagatgtatagaggtcagatactggtttgataaactgtttattccacataagtatgtttgactttatggttagacccgcatactttaacaaatcactgaaaattggagttaggtattgacctctcagaatcagttgccgttctggaacattaaatgtattttttatgatatactccaacgcatttatgtgggcatacaacaagtcattactaatggaatattccaagagttttagttgtctagtatttaacaagagaagagatttcaacagactgtttatgaactcgaatgccgcctcattgtcgcttatattgatgatgtcgaattctcccaatatcatcaccgatgagtagctcatcttgttatcgggatccaagttttctaaagatgtcattaaaccctcgatcatgaatggatttatcatcatcgtttttatgttggacatgagcttagtccgtttgtccacatctatagaagatgatttctgaattatttcatatatctctctctttaactccaggaacttgtcaggatggtctactttaatatgttctcgtctaagagatgaaaatctttggatggttgcacgcgacttttctctaaaggatgacgttgcccaagatcctctcttaaatgaatccatcttatccttggacaagatggacagtctattttccttagatggtttaatatttttgttacccatgatctataaaggtagacctaatcgtctcggatgaccatatatttattttcagttttattatacgcataaattgtaaaaaatatgttaggtttacgaaaatgtctcgtggggcattaatcgtttttgaaggattggacaaatctggaaaaacaacacaatgtatgaacatcatggaatcaataccttcaaacacaataaaataccttaactttcctcagagatccactgtcactggaaagatgatagatgactatctaactcgtaaaaaaacctataatgatcatatagttaatctattattttgtgcaaatagatgggagtttgcatcttttatacaagaacaactagaacagggaattactttaatagttgatagatacgcattttctggagtagcgtatgccgccgctaaaggcgcgtcaatgactctcagtaagagttatgaatctggattgcctaaacccgacttagttatattcttggaatctggtagcaaagaaattaatagaaacgtcggtgaggaaatttatgaagatgttacattccaacaaaaggtattacaagaatataaaaaaatgattgaagaaggagatattcattggcaaattatttcttctgaattcgaggaagatgtaaagaaggagttgattaagaatatagttatagaggctatacacacggttactggaccagtggggcaactgtggatgtaatagtgaaattacattttttataaatagatgttagtacagtgttataaatggatgaagcatattactctggcaacttggaatcagtactcggatacgtgtccgatatgcataccgaactcgcatcaatatctcaattagttattgccaagatagaaactatagataatgatatattaaacaaggacattgtaaattttatcatgtgtagatcaaacttggataatccatttatctctttcctagatactgtatatactattatagatcaagagaactatcagactgagttgattaattcattagacgacaatgaaattatcgattgtatagttaataagtttatgagcttttataaggataacctagaaaatatagtagatgctatcattactctaaaatatataatgaataatccagattttaaaactacgtatgccgaagtactcggttccagaatagccgatatagatattaaacaagtgatacgtaagaatatactacaattgtctaataatatccgcgaacgatatttgtgaaaatattaaaaaaaaatactttttttattaaatgacgtcttttcgtgaatttagaaaattatgctgtgctatatatcacgcatcaggatataaagaaaaatctaaattaattagagactttataacagatagggatgataaatatttgatcattaagctattgcttcccggattagacgatagaatttataacatgaacgataaacaaattataaaattatatagtataatatttaaacaatctcaggaagatatgctacaagatttaggatacggatatataggagacactattaggactttcttcaaagagaacacagaaatccgtccacgagataaaagcattttaactttagaagaagtggatagttttttaactacgttatcatccgtaactaaagaatcgcatcaaataaaattattgactgatgtagcatctgtttgtacatgtaatgatttaaaatgtgtagtcatgcttattgataaagatctaaaaattaaagcgggtcctcggtacgtacttaacgctattagtcctaatgcctatgatgtgtttagaaaatctaataacttgaaagagataatagaaaattcatctaaacaaaatctagactctatatctatttctgttatgactccaattaatcccatgttagcggaatcgtgtgattctgtcaataaggcgtttaaaaaatttccatcaggaatgtttgcggaagtcaaatacgatggtgaaagagtacaagttcataaaaataataacgagtttgccttctttagtagaaacatgaaaccagtactctctcataaagtggattatctcaaagaatacataccgaaagcatttaaaaaagctacgtctatcgtattggattctgaaattgttcttgtagacgaacataatgtaccgctcccgtttggaagtttaggtatacacaaaaagaaagaatataaaaactctaacatgtgtttgttcgtgtttgactgtttgtactttgatggattcgatatgacggacattccattgtacgaacgaagatcttttctcaaagatgttatggttgaaatacccaatagaatagtattctcagagttgacgaatattagtaacgagtctcagttaactgacgtattggatgatgcactaacgagaaaattagaaggattggtcttaaaagatattaatggagtatacgaaccgggaaagagaagatggttaaaaataaagcgagactatttgaacgagggttccatggcagattctgccgatttagtagtactaggtgcctactatggtaaaggagcaaagggtggtatcatggcagtctttctaatgggttgttacgacgatgaatccggtaaatggaagacggttaccaagtgttcaggacacgatgataatacgttaagggagttgcaagaccaattaaagatgattaaaattaacaaggatcccaaaaaaattccagagtggttagtagttaataaaatctatattcccgattttgtagtagaggatccgaaacaatctcagatatgggaaatttcaggagcagagtttacatcttccaagtcccataccgcaaatggaatatccattagatttcctagatttactaggataagagaggataaaacgtggaaagaatctactcatctaaacgatttagtaaacttgactaaatcttaatagttacatacaaactgaaaattaaaataacactatttagttggtggtcgccatggatggtgttattgtatactgtctaaacgcgctagtaaaacatggcgaggaaataaatcatataaaaaatgatttcatgattaaaccatgttgtgaaagagtttgtgaaaaagtcaagaacgttcacattggcggacaatctaaaaacaatacagtgattgcagatttgccatatatggataatgcggtatccgatgtatgcaattcactgtataaaaagaatgtatcaagaatatccagatttgctaatttgataaagatagatgacgatgacaagactcctactggtgtatataattattttaaacctaaagatgccattcctgttatcatatctataggaaaggataaagatgtctgtgaactattaatctcatcagacatatcgtgtgcatgcgtggagttaaattcatatcacgtagccattcttcccatggatgtttccttttttaccaaaggaaatgcatcattgattattctcctgtttgatttctctatcgatgcggcacctctcttaagaagtgtaaccgataataatgttattatatctagacaccagcgtctacatgacgagcttccgagttccaattggttcaagttttacataagtataaagtccgactattgttctatattatatatggttgttgatggatctgtgatgcatgcgatagctgataatagaactcacgcaattattagcaaaaatatattagacaatactacgattaacgatgagtgtagatgctgttattttgaaccacagattaggattcttgatagagatgagatgctcaatggatcatcgtgtgatatgaacagacattgtattatgatgaatttacctgatgtaggcgaatttggatctagtatgttggggaaatatgaacctgacatgattaagattgctctttcggtggctggtaatttaataagaaatcgagactacattcccgggagacgaggatatagctactacgtttacggtatagcctctagataatttttttaagcacgaaataaaaaacataattttaaaccaatctatttcatactattttgtgtgatcaccatggacataaagatagatattagtatttctggtgataaatttacggtgactactaggagggaaaatgaagaaagaaaaaaatatctacctctccaaaaagaaaaaactactgatgttatcaaacctgattatcttgagtacgatgacttgttagatagagatgagatgtttactattctagaggaatattttatgtacagaggtctattaggcctcagaataaaatatggacgactctttaacgaaattaaaaaattcgacaatgatgcggaagaacaattcggtactatagaagaactcaagcagaaacttagattaaattctgaagagggagcagataactttatagattatataaaggtacaaaaacaggatatcgtcaaacttactgtatacgattgcatatctatgataggattgtgtgcatgcgtggtagatgtttggagaaatgagaaactgttttctagatggaaatattgtttacgagcgattaaactgtttattgatgatcacatgcttgataagataaaatctatactgcagaatagactagtatatgtggaaatgtcatagaaagttaaaagttaatgagagcaaaaatatataaggttgtattccatatttgttatttttttctgtaatagttagaaaaatacattcgatggtctatctatcagattattatgtgttataaggtactttttctcataataaactagagtatgagtaagatagtgtttttcaaaacatataaatctaaaattgatggatgagatatacagctattaatttcgaaaatatattttaatctgataactttaaacatggatttttaatggtggtttaacgttttaaaaaaagattttgttattgtagtatatgataatattaaaagatggatataaagaatttgctgactgcatgtactattttttacattactacattggctacggcagatatacctacttcgtcactgccacacgctccggtaaacggggcatgtgacgagggagaatatcttgataagaggcataatcaatgttgtaatcagtgtccacctggagaatttgccaaggttagatgtaatggtaacgataacacaaaatgtgaacgctgcccacctcatacatataccgcaatccccaattactctaatggatgtcatcaatgtagaaaatgcccaacaggatcatttgataaggtaaagtgtaccggaacacagaacagtaaatgttcgtgtcttcctggttggtattgcgctactgattcttcacagactgaagattgtcgagattgtataccaaaaaggagatgtccatgcggatactttggtggaatagatgaacaaggaaatcctatttgtaaatcgtgttgtgttggtgaatattgcgactacctacgtaattatagacttgatccatttcctccatgcaaactatctaaatgtaattaattatgattttgatgataatgttaccatacattatatcgctacttggttagtgtattattcagtatgaagacctattaataattacttatcttttgacgatcttgttataattataatataaaaatacttatggcatagtaactcataattgctgacgcgataaattcgtaataatctgttttgttcaaatttttataaggaatctacaggcataaaaataaaaatataatttataatatactcttacagcgcgccatcatgaataacagcagtgaattgattgctgttattaatggatttagaaatagtggacgattttgtgatattaatatagttattaatgatgaaaggataaacgctcacagactcatcctatctggagcctccgaatatttttccattctgttttccaataattttatcgattctaatgaatacgaagttaatctaagtcatttagattatcaaagtgttaacgatttgatcgattacatttatgggatacctttgagcctaactaacgataacgtgaaatatattctttcaaccgctgattttttacaaattggatctgctattacggagtgtgaaaattacatacttaaaaatctttgttctagaaactgtatcgatttctacatatacgctgataaatataataacaagaaaatagaatcagcgtcgtttaacacaatattacaaaatattttgagactcatcaacgatgaaaactttaaatacttaacagaggaatcaatgataaaaattttaagcgatgatatgttaaatataaaaaatgaggatttcgccccactaattctcattaaatggttagagagtactcaacaaccatgcaccgtcgagttacttaaatgcctcagaatatcattgctttccccacaagttataaaatcactttatagtcatcgactggttagttcaatctacgaatgtataacattcttaaacaatatagcattcttggatgaatcatttcctagataccatagcatcgagttgatatctatcggtataagtaattcgcatgataagatttccataaactgctacaatcataaaaaaaatacatgggaaatgatatcttcacgtagatataggtgtagtttcgcagtggccgtcctggataatattatctatatgatgggtggatatgatcagtccccgtatagaagttcaaaggttatagcgtacaatacatgtacaaattcttggatatatgatataccagagctaaaatatcctcgttctaattgtgggggactggctgatgacgaatacatttattgtataggcggcatacgcgatcaggattcatcgttgacatctagtattgatagatggaagccatcaaaaccatattggcagaagtatgctaaaatgcgcgaaccaaaatgtgatatgggggttgcgatgttaaacggattaatatatgttataggtggaatcgttaaaggtgacacgtgtaccgacgcactagagagtttatcagaagatggatggatgaagcatcaacgtcttccaataaaaatgtccaatatgtcgacgattgttcatgatggcaagatttatatatctggaggttacaacaatagtagtgtagttaatgtaatatcgaatctagtccttagctataattcgatatatgatgaatggaccaaattatcatcattaaacattcctagaattaatcccgctctatggtcagcgcataataaattatatgtaggaggaggaatatctgatgatgttcgaactaatacatctgagacatacgacaaagaaaaagattgttggacattggataatggtcacgtgttaccacgcaattatataatgtataaatgcgaaccgattaaacataaatatccattggaaaaaacacagtacacgaatgattttctaaagtatttggaaagttttataggtagttgatagaacaaaatacataattttgtaaaaataaatcactttttatactaatatgacacgattaccaatacttttgttactaatatcattagtatacgctacaccttttcctcagacatctaaaaaaataggtgatgatgcaactctatcatgtaatcgaaataatacaaatgactacgttgttatgagtgcttggtataaggagcccaattccattattcttttagctgctaaaagcgacgtcttgtattttgataattataccaaggataaaatatcttacgactctccatacgatgatctagttacaactatcacaattaaatcattgactgctagagatgccggtacttatgtatgtgcattctttatgacatcaactacaaatgacactgataaagtagattatgaagaatactccacagagttgattgtaaatacagatagtgaatcgactatagacataatactatctggatctacacattcaccggaaactagttctaagaaacctgattatatagataattctaattgctcgtcggtattcgaaatcggtacccggggatcagcttgcatgcctgcagcaattcccgaggctgtagccgacgatggtgcgccaggagagttgttgattcattgtttgcctccctgctgcggtttttcaccgaagttcatgccagtccagcgtttttgcagcagaaaagccgccgacttcggtttgcggtcgcgagtgaagatccctttcttgttaccgccaacgcgcaatatgccttgcgaggtcgcaaaatcggcgaaattccatacctgttcaccgacgacggcgctgacgcgatcaaagacgcggtgatacatatccagccatgcacactgatactcttcactccacatgtcggtgtacattgagtgcagcccggctaacgtatccacgccgtattcggtgatgataatcggctgatgcagtttctcctgccaggccagaagttctttttccagtaccttctctgccgtttccaaatcgccgctttggacataccatccgtaataacggttcaggcacagcacatcaaagagatcgctgatggtatcggtgtgagcgtcgcagaacattacattgacgcaggtgatcggacgcgtcgggtcgagtttacgcgttgcttccgccagtggcgcgaaatattcccgtgcaccttgcggacgggtatccggttcgttggcaatactccacatcaccacgcttgggtggtttttgtcacgcgctatcagctctttaatcgcctgtaagtgcgcttgctgagtttccccgttgactgcctcttcgctgtacagttctttcggcttgttgcccgcttcgaaaccaatgcctaaagagaggttaaagccgacagcagcagtttcatcaatcaccacgatgccatgttcatctgcccagtcgagcatctcttcagcgtaagggtaatgcgaggtacggtaggagttggccccaatccagtccattaatgcgtggtcgtgcaccatcagcacgttatcgaatcctttgccacgcaagtccgcatcttcatgacgaccaaagccagtaaagtagaacggtttgtggttaatcaggaactgttcgcccttcactgccactgaccggatgccgacgcgaagcgggtagatatcacactctgtctggcttttggctgtgacgcacagttcatagagataaccttcacccggttgccagaggtgcggattcaccacttgcaaagtcccgctagtgccttgtccagttgcaaccacctgttgatccgcatcacgcagttcaacgctgacatcaccattggccaccacctgccagtcaacagacgcgtggttacagtcttgcgcgacatgcgtcaccacggtgatatcgtccacccaggtgttcggcgtggtgtagagcattacgctgcgatggattccggcatagttaaagaaatcatggaagtaagactgctttttcttgccgttttcgtcggtaatcaccattcccggcgggatagtctgccagttcagttcgttgttcacacaaacggtgatacgtacacttttcccggcaataacatacggcgtgacatcggcttcaaatggcgtatagccgccctgatgctccatcacttcctgattattgacccacactttgccgtaatgagtgaccgcatcgaaacgcagcacgatacgctggcctgcccaacctttcggtataaagacttcgcgctgataccagacgttgcccgcataattacgaatatctgcatcggcgaactgatcgttaaaactgcctggcacagcaattgcccggctttcttgtaacgcgctttcccaccaacgctgatcaattccacagttttcgcgatccagactgaatgcccacaggccgtcgagttttttgatttcacgggttggggtttctacaggacgtaacattctagtcgaggaattcatttatagcatagaaaaaaacaaaatgaaattctactatatttttacatacatatattctaaatatgaaagtggtgattgtgactagcgtagcatcgcttctagacatctatatactatatagtaataccaatactcaagactacgaaactgatacaatctcttatcatgtgggtaatgttctcgatgtcgatagccatatgcccggtagttgcgatatacataaactgatcactaattccaaacccacccgctttttatagtaagtttttcacccataaataataaatacaataattaatttctcgtaaaagtagaaaatatattctaatttattgcacggtaaggaagtagaatcataaagaacagtgacggatccccgatccccgacctgcaggcatgcaagctcgactccggaaccaattactgataatgtagaagatcatacagacaccgtcacatacactagtgatagcattaatacagtaagtgcatcatctggagaatccacaacagacgagactccggaaccaattactgataaagaagatcatacagttacagacactgtctcatacactacagtaagtacatcatctggaattgtcactactaaatcaaccaccgatgatgcggatctttatgatacgtacaatgataatgatacagtaccaccaactactgtaggcggtagtacaacctctattagcaattataaaaccaaggactttgtagaaatatttggtattaccgcattaattatattgtcggccgtggcaattttctgtattacatattatatatataataaacgttcacgtaaatacaaaacagagaacaaagtctagatttttgacttacataaatgtctgggatagtaaaatctatcatattgagcggaccatctggtttaggaaagacagccatagccaaaagactatgggaatatatttggatttgtggtgtcccataccactagatttcctcgtcctatggaacgagaaggtgttgattaccattacgttaacagagaggccatctggaagggaatagccgccggaaactttctagaacatactgagtttttaggaaatatttacggaacttctaaaacagctgtgaatacagcggctattaataatcgtatttgtgtgatggatctaaacatcgacggtgttagaagtcttaaaaatacgtacctaatgccttactcggtgtatataagacctacctctcttaaaatggttgagaccaagcttcgtcgtagaaacactgaagctaacgatgagattcatcgtcgtgtgatgttggcaaaaactgacatggatgaggcaggtgaagccggtctattcgacactattatcattgaagatgatgtgaatttagcatatagtaagttaattcagatactacaggaccgtattagaatgtattttaacactaattagagacttaagacttaaaacttgataattaataatataactcgtttttatatgtgtctatttcaacgtctaatgtattagttaaatattaaaacttaccacgtaaaacttaaaatttaaaatgatatttcattgacagatagatcacacattatgaactttcaaggacttgtgttaactgacaattgcaaaaatcaatgggtcgttggaccattaataggaaaaggtggattcggtagtatttatactactaatgacaataattatgtagtaaaaatagagcccaaagctaacggatcattatttaccgaacaggcattttatactagagtacttaaaccatccgttatcgaagaatggaaaaaatctcacaatataaagcacgtaggtcttatcacgtgcaaggcatttggtctatacaaatccattaatgtggaatatcgattcttggtaattaatagattaggtgcagatctagatgcggtgatcagagccaataataatagactaccaaaaaggtcggtgatgttgatcggaatcgaaatcttaaataccatacaatttatgcacgagcaaggatattctcacggagatattaaagcgagtaatatagtcttagatcaaatagataagaataaattatatctagtggattacggattggtttctaaattcatgtctaatggcgaacatgttccatttataagaaatccaaataaaatggataacggtactctagaatttacacctatagattcgcataaaggatacgttgtatctagacgtggagatctagaaacacttggatattgtatgattagatggttgggaggtatcttaccatggactaagatatctgaaacaaagaattgtgcattagtaagtgccacaaaacagaaatatgttaacaatactgcgactttgttaatgaccagtttgcaatatgcacctagagaattgctgcaatatattaccatggtaaactctttgacatattttgaggaacccaattacgacaagtttcggcacatattaatgcagggtgtatattattaagtgtggtgtttggtcgataaaaattaaaaaataacttaatttattattgatctcgtgtgtacaaccgaaatcatggcgatgttttacgcacacgctctcggtgggtacgacgagaatcttcatgcctttcctggaatatcatcgactgttgccaatgatgtcaggaaatattctgttgtgtcagtttataataacaagtatgacattgtaaaagacaaatatatgtggtgttacagtcaggtgaacaagagatatattggagcactgctgcctatgtttgagtgcaatgaatatctacaaattggaaatccgatccatgatcaagaaggaaatcaaatctctatcatcacatatcgccacaaaaactactatgctctaagcggaatcgggtacgagagtctagacttgtgtttggaaggagtagggattcatcatcacgtacttgaaacaggaaacgctgtatatggaaaagttcaacatgattattctactatcaaagagaaggccaaagaaatgagtgcacttagtccaggacctatcatcgattaccacgtctggataggagattgtatctgtcaagttactgctgtggacgtacatggaaaggaaattatgaaaatgagattcaaaaagggtgcggtgcttccgatcccaaatctggtaaaagttaaacttggggagaatgatacagaaaatctttcttctactatatcggcggcaccatcgaggtaaccacctctctggaagacagcgtgaatcatgtactcatgaaacgtttggaaactatacgccatatgtggtctgttgtatatgatcattttgatattgtgaatggtaaagaatgctgttatgtgcatacgcattcatctaatcaaaatcctataccgagtactgtaaaaacaaatttgtacatgaagactatgggatcatgcattcaaatggattccatggaagctctagagtatcttagcgaactgaaggaatcaggtggatggagtcccagaccagaaatgcaggaatttgaatatccagatggagtggaagacactgaatcaattgagagattggcagaggagttcttcaatagatcagaacttcaggctggtgaatcagtcaaatttggtaattctattaattgttaaacatacatctgtttcagctaagcaactaagaacacgtatacggcagcagcttccttctatactctcatcttttaccaacacaaagggtggatatttgttcattggagttgataataatacacacaaagtatttggattcacggtgggttacgactacctcagactgatagagaatgatatagaaaagcatatcaaaagacttcgtgttgtgcatttctgtgagaagaaagaggacatcaagtacgcgtgtcgattcatcaaggtatataaacctggggatgagactacctcgacatacgtgtgcgctatcaaagtggaaagatgctgttgtgctgtgtttgcagattggccagaatcatggtatatggatactaatggtatcaagaagtattctccagatgaatgggtgtcacatataaaattttaattaatgtaactatagagaacaaataataaggttgtaatatcatatagacaataactaacaattaattagtaactgttatctcttttttaactaaccaactaactatatacctattaatacatcgtaattatagttcttaacatctattaatcattaattcgcttctttaattttttataaactaacattgttaattgaaaagggataacatgttacagaatataaattatatatggatttttttaaaaaggaaatacttgactggagtatatatttatctcttcattatatagcacgcgtgttttccaatttttccacatcccatataatacaggattataatctcgttcgaacatacgagaaagtggataaaacaatagttgattttttatctaggttgccaaatttattccatattttagaatatggggaaaatattctacatatttattctatggatgatgctaatacgaatattataattttttttctagatagagtattaaatattaataagaacgggtcatttatacacaatctcgggttatcatcatccattaatataaaagaatatgtatatcaattagttaataatgatcatccagataataggataagactaatgcttgaaaatggacgtagaacaagacattttttgtcctatatatcagatacagttaatatctatatatgtattttaataaatcatggattttatatagatgccgaagacagttacggttgtacattattacatagatgtatatatcactataagaaatcagaatcagaatcatacaatgaattaattaagatattgttaaataatggatcagatgtagataaaaaagatacgtacggaaacacaccttttatcctattatgtaaacacgatatcaacaacgtggaattgtttgagatatgtttagagaatgctaatatagactctgtagactttaatagatatacacctcttcattatgtctcatgtcgtaataaatatgattttgtaaagttattaatttctaaaggagcaaatgttaatgcgcgtaataaattcggaactactccattttattgtggaattatacacggtatctcgcttataaaactatatttggaatcagacacagagttagaaatagataatgaacatatagttcgtcatttaataatttttgatgctgttgaatctttagattatctattatccagaggagttattgatattaactatcgtactatatacaacgaaacatctatttacgacgctgtcagttataatgcgtataatacgttggtctatctattaaacaaaaatggtgattttgagacgattactactagtggatgtacatgtatttcggaagcagtcgcaaacaacaacaaaataataatggaagtactattgtctaaacgaccatctttgaaaattatgatacagtctatgatagcaattactaaacataaacagcataatgcagatttattgaaaatgtgtataaaatatactgcgtgtatgaccgattatgatactcttatagatgtacagtcgctacagcaatataaatggtatattttaagatgtttcgatgaaatagatatcatgaagagatgttatataaaaaataaaactgtattccaattagttttttgtatcaaagacattaatactttaatgagatacggtaaacatccttctttcgtgaaatgcactagtctcgacgtatacggaagtcgtgtacgtaatatcatagcatctattagatatcgtcagagattaattagtctattatccaagaagctggatcctggagataaatggtcgtgttttcctaacgaaataaaatataaaatattggaaaactttaacgataacgaactatccacatatctaaaaatcttataaacattattaaaatataaaatctaagtaggataaaatcacactacatcattgtttccttttagtgctcgacagtgtatactatttttaacgctcataaataaaaatgaaaacgatttccgttgttacgttgttatgcgtactacctgctgttgtttattcaacatgtactgtacccactatgaataacgctaaattaacgtctaccgaaacatcgtttaatgataaccagaaagttacgtttacatgtgatcagggatatcattctttggatccaaatgctgtctgtgaaacagataaatggaaatacgaaaatccatgcaaaaaaatgtgcacagtttctgattatgtctctgaactatataataaaccgctatacgaagtgaattccaccatgacactaagttgcaacggcgaaacaaaatattttcgttgcgaagaaaaaaatggaaatacttcttggaatgatactgttacgtgtcctaatgcggaatgtcaacctcttcaattagaacacggatcgtgtcaaccagttaaagaaaaatactcatttggggaatatatgactatcaactgtgatgttggatatgaggttattggtgcttcgtacataagttgtacagctaattcttggaatgttattccatcatgtcaacaaaaatgtgatatgccgtctctatctaacggattaatttccggatctacattttctatcggtggcgttatacatcttagttgtaaaagtggttttacactaacggggtctccatcatccacatgtatcgacggtaaatggaatcccatactcccaatatgtgtacgaactaacgaaaaatttgatccagtggatgatggtcccgacgatgagacagatttgagcaaactctcgaaagacgttgtacaatatgaacaagaaatagaatcgttagaagcaacttatcatataatcatagtggcgttgacaattatgggcgtcatatttttaatctccgttatagtattagtttgttcctgtgacaaaaataatgaccaatataagttccataaattgctaccgtaaatataaatccgttaaaataattaataatttaataacaaacaagtatcaaaagattaaagacttatagctagaatcaattgagatgtcttcttcagtggatgttgatatctacgatgccgttagagcatttttactcaggcactattataacaagagatttattgtgtatggaagaagtaacgccatattacataatatatacaggctatttacaagatgcgccgttataccgttcgatgatatagtacgtactatgccaaatgaatcacgtgttaaacaatgggtgatggatacacttaatggtataatgatgaatgaacgcgatgtttctgtaagcgttggcaccggaatactattcatggaaatgtttttcgattacaataaaaatagtatcaacaatcaactaatgtatgatataattaatagcgtatctataattctagctaatgagagatatagaagcgcttttaacgacgatggtatatacatccgtagaaatatgattaacaagttgtacggatacgcatctctaactactattggcacgatcgctggaggtgtttgttattatctgttgatgcatctagttagtttgtataaataattatttcaatatactagttaaaattttaagattttaaatgtataaaaaactaataacgtttttatttgtaataggtgcattagcatcctattcgaataatgagtacactccgtttaataaactgagtgtaaaactctatatagatggagtagataatatagaaaattcatatactgatgataataatgaattggtgttaaattttaaagagtacacaatttctattattacagagtcatgcgacgtcggatttgattccatagatatagatgttataaacgactataaaattattgatatgtataccattgactcgtctactattcaacgcagaggtcacacgtgtagaatatctaccaaattatcatgccattatgataagtacccttatattcacaaatatgatggtgatgagcgacaatattctattactgcagagggaaaatgctataaaggaataaaatatgaaataagtatgatcaacgatgatactctattgagaaaacatactcttaaaattggatctacttatatatttgatcgtcatggacatagtaatacatattattcaaaatatgatttttaaaaatttaaaatatattatcacttcagtgacagtagtcaaataacaaacaacaccatgagatatattataattctcgcagttttgttcattaatagtatacatgctaaaataactagttataagtttgaatccgtcaattttgattccaaaattgaatggactggggatggtctatacaatatatcccttaaaaattatggcatcaagacgtggcaaacaatgtatacaaatgtaccagaaggaacatacgacatatccgcatttccaaagaatgatttcgtatctttctgggttaaatttgaacaaggcgattataaagtggaagagtattgtacgggactatgcgtcgaagtaaaaattggaccaccgactgtaacattgactgaatacgacgaccatatcaatttgtacatcgagcatccgtatgctactagaggtagcaaaaagattcctatttacaaacgcggtgacatgtgtgatatctacttgttgtatacggctaacttcacattcggagattctaaagaaccagtaccatatgatatcgatgactacgattgcacgtctacaggttgcagcatagactttgtcacaacagaaaaagtgtgcgtgacagcacagggagccacagaagggtttctcgaaaaaattactccatggagttcgaaagtatgtctgacacctaaaaagagtgtatatacatgcgcaattagatccaaagaagatgttcccaatttcaaggacaaaatggccagagttatcaagagaaaatttaatacacagtctcaatcttatttaactaaatttctcggtagcacatcaaatgatgttaccacttttcttagcatgcttaacttgactaaatattcataactaatttttattaatgatacaaaaacgaaataaaactgcatattatacactggttaacgcccttataggctctaaccattttcaagatgaggtccctgattatagtccttctgttcccctctatcatctactccatgtctattagacgatgtgagaagactgaagaggaaacatggggattgaaaatagggttgtgtataattgccaaagatttctatcccgaaagaactgattgcagtgttcatctcccaactgcaagtgaaggattgataactgaaggcaatggattcagggatatacgaaacaccgataaattataaaaaaagcaatgtgtccgctgtttccgttaataatactattttcgtaactggcggattattcataaataactctaatagcacgatcgtggttaacaatatggaaaaacttgacatttataaagacaaacaatggtcgattatagaaatgcctatggctagggtatatcacggcattgactcgacatttggaatgttatattttgccggaggtctatccgttaccgaacaatatggtaatttagagaaaaacaacgagatatcttgttacaatcctagaacgaataagtggtttgatatttcatatactatttataagatatccatatcatcattgtgtaaactaaataacgtcttctatgtatttagtaaggacattggatatgtggaaaagtatgatggtgcatggaagttagtacatgatcgtctccccgctataaaggcattatcaacttctccttattgattgaaaatgaaaatataaatagtttttatgtatagcagtattaccctatagttttattgcttactactaacatggatacagatgttacaaatgtagaagatatcataaatgaaatagatagagagaaagaagaaatactaaaaaatgtagaaattgaaaataataaaaacattaacaagaatcatcccaatgaatatattagagaagcactcgttattaataccagtagtaatagtgattccattgataaagaagttatagaatgtatcagtcacgatgtaggaatatagatcatatctactaatttttataatcgatacaaaacataaaaaacaactcgttattacatagcaggcatggaatccttcaagtattgttttgataacgatggcaagaaatggattatcggaaatactttatattctggtaattcaatactctataaggtcagaaaaaatttcactagttcgttctacaattacgtaatgaagatagatcacaaatcacacaagccattgttgtctgaaatacgattctatatatctgtattggatcctttgactatcgacaactggacacgggaacgtggtataaagtatttggctattccagatctgtatggaattggagaaaccgatgattatatgttcttcgttataaagaattcgggaagagtattcgccccaaaggatactgaatcagtcttcgaagcatgcgtcactatgataaacacgttagagtttatacactctcgaggatttacccatggaaaaatagaaccgaggaatatactgattagaaataaacgtctttcactaattgactattctagaactaacaaactatacaagagtggaaactcacatatagattacaacgaggacatgataacttcaggaaatatcaattatatgtgtgtagacaatcatcttggagcaacagtttcaagacgaggagatttagaaatgttgggatattgcatgatagaatggttcggtggcaaacttccatggaaaaacgaaagtagtataaaagtaataaaacaaaaaaaagaatataaaaaatttatagctactttctttgaggactgttttcctgaaggaaatgaacctctggaattagttagatatatagaattagtatacacgttagattattctcaaactcctaattatgacagactacgtaaactgtttatacaagattgaaattatattcttttttttatagagtgtggtagtgttacggatatctaatattaatattagactatctctatcgcgctacacgaccaatatcgattactatggatatcttctatgaaaggagagaatgtatttatttctccagcgtcaatctcgtcagtattgacaatactgtattatggagctaatggatccactgctgaacagctatcaaaatatgtagaaacggaggagaacacggataaggttagcgctcagaatatctcattcaaatccatgaataaagtatatgggcgatattctgccgtgtttaaagattcctttttgagaaaaattggcgataagtttcaaactgttgacttcactgattgtcgcactatagatgcaatcaacaagtgtgtagatatctttactgaggggaaaatcaatccactattggatgaaccattgtctcctagcaattagtgccgtatactttaaagcaaaatggttgacgccattcgaaaaggaatttaccagtgattatcccttttacgtatctccgacggaaatggtagacgtaagtatgatgtctatgtacggcaaggcatttaatcacgcatctgtaaaagaatcattcggcaacttttcaatcatagaactgccatatgttggagatactagtatgatggtcattcttccagacaagattgatggattagaatccatagaacaaaatctaacagatacaaattttaagaaatggtgtgactttatggatgctatgtttatagatgttcacattcccaagtttaaggtaacaggctcgtataatctggtggatactctagtaaagtcaggactgacagaggtgttcggttcaactggagattatagcaatatgtgtaatttagatgtgagtgtcgacgctatgatccacaaaacgtatatagatgtcaatgaagagtatacagaagcagctgcagcaacttctgtactagtggcagactgtgcatcaacaattacaaatgagttctgtgcagatcatccgttcatctatgtgattaggcatgttgatggaaaaattcttttcgttggtagatattgctctccgacaactaattgttaaccattttttttaaaaaaaatagaaaaaacatgtggtattagtgcaggtcgttgttcttccaattgcaattggtaagatgacggccaactttagtacccacgtcttttcaccacagcactgtggatgtgacagactgaccagtattgatgacgtcaaacaatgtttgactgaatatatttattggtcgtcctatgcataccgcaacaggcaatgcgctggacaattgtattccacactcctctcttttagagatgatgcggaattagtgttcatcgacattcgcgagctggtaaaaaatatgccgtgggatgatgtcaaagattgtacagaaatcatccgttgttatataccggatgagcaaaaaaccatcagagagatttcggccatcatcggactttgtgcatatgctgctacttactggggaggtgaagaccatcccactagtaacagtctgaacgcattgtttgtgatgcttgagatgctaaattacgtggattataacatcatattccggcgtatgaattgatgagttgtacatcttgacattttctttcttctcttctccctttcttctcttctcccttcctccctcttctccctttcccagaaacaaacttttttacccactataaaataaaatgagtatactacctattatatttcttcctatatttttttattcttcattcgttcagacttttaacgcgtctgaatgtatcgacaaagggcaatattttgcatcattcatggagttagaaaacgagccagtaatcttaccatgtcctcaaataaatacgctatcatccggatataatatattagatattttatgggaaaaacgaggagcggataatgatagaattataccgatagataatggtagcaatatgctaattctgaacccgacacaatcagactctggtatttatatatgcattaccacgaacgaaacctactgtgacatgatgtcgttaaatttgacaatcgtgtctgtctcagaatcaaatatagatcttatctcgtatccacaaatagtaaatgagagatctactggcgaaatggtatgtcccaatattaatgcatttattgctagtaacgtaaacgcagatattatatggagcggacatcgacgccttagaaataagagacttaaacaacggacacctggaattattaccatagaagatgttagaaaaaatgatgctggttattatacatgtgttttagaatatatatacggtggcaaaacatataacgtaaccagaattgtaaaattagaggtacgggatagaataataccttctactatgcaattaccagatggcattgtaacttcaataggtagtaatttgactattgcatgcagagtatcgttgagacctcccacaacggacaccgacgtcttttggataagtaatggtatgtattacgaagaagatgatggggacggaaacggtagaataagtgtagcaaataaaatctatatgaccgataagagacgtgttattacatcccggttaaacattaatcctgtcaaggaagaagatgctacaacgtttacgtgtatggcgtttactattcctagcatcagcaaaacagttactgttagtataacgtgaatgtatgttgttacatttccatgtcaattgagtttataagaatttttatacattatcttccaacaaacaattgacgaacgtattgctatgattaactcccacgatactatgcatattattaatcattaacttgcagactatacctagtgctattttgacatactcgtgttcttgtgtaattgcggtatctatattattaaagtacgtaaatctagctatagttttattatttaattttagataatataccgtctccttatttttaaaaattgccacatcctttattaaatcatgaatgggaatttctatgtcatcgttagtatattgtgaacaacaagagcagatatctataggaaagggtggaatgcgatacattgatctatgtagttttaaaacacacgcgaactttgaagaatttatataaatcattccatcgatacatccttctatgttgacatgtatatatccaggaattcttttattaatgtcaggaaatgtataaactaaaacattgcccgaaagcggtgcctctatctgcgttatatccgttcttaacttacaaaatgtaaccaatacctttgcatgacttgttttgttcggcaacgttagtttaaacttgacgaatggattaattacaatagcatgatccgcgcatctattaagtttttttactttaacgcccttgtatgtttttacagagactttatctaaatttctagtgcttgtatgtgttataaatataacgggatatagaaccgaatcacctaccttagatacccaattacattttatcagatccagataataaacaaattttgtcgccctaactaattctatattgttatatattttacaattggttatgatatcatgtaataacttggagtctaacgcgcatcgtcgtacgtttatacaattgtgatttagtgtagtatatctacacatgtatttttccgcactatagtattctggactagtgataaaactatcgttatatctgtcttcaatgaactcatcgagatattgctctctgtcatattcatacacctgcataaactttctagacatcttacaatccgtgttattttaggatcatatttacatatttacgggtatatcaaagatgttagattagttaatgggaatcgtctataataatgaatattaaacaattatatgaggacttttaccacaaagcatcataaaaatgagtcgtcgtctgatttatgttttaaatatcaaccgcaaatcaactcataaaatacaagagaatgaaatatatacatattttagtcattgcaatatagaccatacttctacagaacttgattttgtagttaaaaactatgatctaaacagacgacaacctgtaactgggtatactgcactacactgctatttgtataataattactttacaaacgatgtactgaagatattattaaatcatgacgtaaatgtaacgatgaaaaccagtagcggacgtatgcctgtttatatattgcttactagatgttgtaatatttcacatgatgtagtgatagatatgatagacaaagataaaaaccacttattacatagagactattccaacctattactagagtatataaaatctcgttacatgttattgaaggaagaggatatcgatgagaacatagtatccactttattagataagggaatcgatcctaactttaaacaagacggatatacagcgttacattattattatttgtgtctcgcacacgtttataaactaggtgagtgtagaaaaccgataacgataaaaaaggccaagcgaattatttctttgtttatacaacatggagctaatctaaacgcgttagataattgtggtaatacaccattccatttgtatcttagtattgaaatgtgtaataatattcatatgactaaaatgctgttgacttttaatccgaatttcaaaatatgtaataatcatggattaacgcctatactatgttatataacttccgactacatacaacacgatattcttgttatgttaatacatcactatgaaacaaatgttggagaaatgccgatagatgagcgtcgtatgatcgtattcgagtttatcaaaacatattctacacgtccggcagattcgataacttatttgatgaataggtttaaaaatataaatatttatacccgctatgaaggaaagacattattacacgtagcatgtgaatataataatacacaagtaatagattatcttatacgtatcaacggagatataaatgcgttaaccgacaataacaaacacgctacacaactcattatagataacaaagaaaattccccatataccattaattgtttactgtatatacttagatatattgtagataagaatgtgataagatcgttggtggatcaacttccatctctacctatcttcgatataaaatcatttgagaaattcatatcctactgtatacttttagatgacacattttacgataggcacgttaagaatcgcgattctaaaacgtatcgatacgcattttcaaaatacatgtcgtttgataaatacgatggtataataactaaatgtcacgacgaaacaatgttactcaaactgtccactgttctagacactacactatatgcagttttaagatgtcataattcgagaaagttaagaagatacctcaacgagttaaaaaaatataataacgataagtcctttaaaatatattctaatattatgaatgagagataccttaatgtatattataaagatatgtacgtgtcaaaggtatatgataaactatttcctgttttcacagataaaaattgtctactaacattactaccttcagaaattatatacgaaatattatacatgctgacaattaacgatctttataatatatcgtatccacctaccaaagtatagttgtatttttctcatgcgatgtgtgtaaaaaaactgatattatataaatattttagtgccgtataataaagatgacgatgaaaatgatggtacatatatatttcgtatcattattgttattgctattccacagttacgccatagacatcgaaaatgaaatcacagaattcttcaataaaatgagagatactctaccagctaaagactctaaatggttgaatccagcatgtatgttcggaggcacaatgaatgatatagccgctctaggagagccattcagcgcaaagtgtcctcctattgaagacagtcttttatcgcacagatataaagactatgtggttaaatgggagaggctagaaaagaatagacggcgacaggtttctaataaacgtgttaaacatggtgatttatggatagccaactatacatctaaattcagtaaccgtaggtatttgtgcaccgtaactacaaagaatggtgactgtgttcagggtatagttagatctcatattaaaaaacctccttcatgcattccaaaaacatatgaactaggtactcatgataagtatggcatagacttatactgtggaattctttacgcaaaacattataataatataacttggtataaagataataaggaaattaatatcgacgacattaagtattcacaaacgggaaaggaattaattattcataatccagagttagaagatagcggaagatacgactgttacgttcattacgacgacgttagaatcaagaatgatatcgtagtatcaagatgtaaaatacttacggttataccgtcacaagaccacaggtttaaactaatactagatccgaaaatcaacgtaacgataggagaacctgccaatataacatgcactgctgtgtcaacgtcattattgatcgacgatgtactgattgaatgggaaaatccatccggatggcttataggattcgattttgatgtatactctgttttaactagtagaggcggtatcaccgaggcgaccttgtactttgaaaatgttactgaagaatatataggtaatacatataaatgtcgtggacacaactattattttgaaaaaacccttacaactacagtagtattggagtaaatatacaatgcatttttatatacattactgaattattattactgaattattattactgaattattattaattatatcgtatttgtgctatagaatggatgaagatacgcgactatctaggtatttgtatctcaccgatagagaacatataaatgtagactctattaaacagttgtgtaaaatatcagatcctaatgcatgttatagatgtggatgtacggctttacatgagtacttttataattatagatcagtcaacggaaaatacaagtatagatacaacggttactatcaatattattcatctagcgattatgaaaattataatgaatattattatgatagaactggtatgaacagtgagagtgataatatatcaatcaaaacagaatatgaattctatgatgaaacacaagatcaaagtacacaactagtaggttacgacattaaactcaaaaccaatgaggatgattttatggctatgatagatcagtgggtgtccatgattatatagatgaatcaattaataaagtagtatatggaagagagtctcacgtaagatggcgggatatatggcaagaacataatgatggcgtatacagtataggaaaggagtgcatagataatatatacgaagacaaccataccgtagacgaattctacaagatagacagcgtatcagatgtagatgacgcggaacacatatctccgataactaaaaaaccatagaatcagttgatgataatacctacatttctaatcttccgtataccatcaaatacaaaatattcgagcaacaataagtattttttatacctttaaaactgataaataaattttttctagtgatattttggcaagatgagaatcctatttctcatcgctttcatgtatgggtgtgttcactcatatgttaacgcggttgaaaccaaatgtccaaatctagacattgtaacatcttctggagaatttcattgttcaggatgtgtggaacatatgcctgagtttagctatatgtattggttggcaaaggatatgaaatcggacgaggataccaagtttatagaacatctgggtgatggcatcaaagaagatgaaaccgttcgtaccacagatagtggaatcgtcactctacgtaaagtccttcatgtgactgatactaataaatttgataattataggttcacttgtgtcctcgctacgctagatggcatttataaaaagaatgtttgctgaagtagttgtgtgctactatttttatttatgatataatctaatggaattaatttgaattgatatttatccaatactaaagattatattagaatcaaattaatcttttatacgagaaaaaataacgacatacgtcgtcaacaaattaaactttttatttattagttaactagcttatagaacttgctcattgttatgtttctaaaacgggtacggcatataggacaattatccgacgcaccggtttctcttcgtgttctatgccatatattgatgcatgttatgcaaaatatatgagtacacgaatccaataaaccaaagtatctatcgttttgagtaaacaacttcatagcaaattccacattctttttctttacttactctatacacgtcctcgtatttatttagtattttgatgatatccaactcagaaatggttgttgtattattgggtgtatttggagtataggtattattagctatgtaccaatttaccaaccctcttaatattgattgataatcacatcggttatccaattaataactaaattgtagtgtatatatagaccatatatgtttctatttttttgacagttacgtatagtttcagtaagttttgattgttgtattcctgtatctctagataagttagtcatatagtcccttccggcgatacgttttttccaagcccgaaattgattagccaaatgtgtatttatttttgtgatattgatataatatttcggataatgcatactgttagtcttatatcatttggttcatctatgtattgtaatattgttacatgatctatagatgatgtattgattttggcaggatcgaattccatatccgcgactaaacagtgaaaaaaatgtaaatactttttaaattttaaattagtaaaacttttttttattttttatgattccaaaaatactgaatacaaagtcctaaattataaatatggagatcatactaccacaacttattattatgtatacaaggccggtgtaatagatagatatatataattctattacaccggcagacaattaccgaccggtatttgtcgttaccaacataccgtataatatgtaatatacaattccataacccattgacagttgttatacatcaaaattgcaattcttttgattacgatgttataagaatgtagttaattgatgtatgatgttaatgtgtcctctttcctcttataacatcgtaatcaaaaacttttttataatatatacctaataatgtgtcttaatagttctcgtgattcgtcaaacaatcattcttataaaatataataaagcaacgtaaaaacacataaaaataagcgtaactaataagacaatggatatttacgacgataaaggtctacagactattaaactgtttaataatgaatttgattgtataaggaatgacatcagagaattatttaaacatgtaactgattccgatagtatacaacttccgatggaagacaattctgatattatagaaaatatcagaaaaatactatatagacgattaaaaaatgtagaatgtgttgacatcgataacacaataacttttatgaaatacgatccaaatgatgataataagcgtacgtgttctaattgggtacccttaactaataactatatggaatattgtctagtaatatatttggaaacaccgatatgtggaggcaaaataaaattataccaccctacaggaaatataaagtcggataaggatattatgtttgcaaagactctagactttaaatcaacgaaagtgttaactggacgtaaaacaattgccgttctagacatatccgtttcatataatagatcaatgactactattcactacaacgacgacgttgatatagatatacatactgataaaaatggaaaagagttatgttattgttatataacaatagatgatcattacttggttgatgtggaaactataggagttatagtcaatagatctggaaaatgtctgttagtaaataaccatctaggtataggtatcgttaaagataaacgtataagcgatagttttggagatgtatgtatggatacaatatttgacttttctgaagcacgagagttattttcattaactaatgatgataacaggaatatagcatgggacactgataaactagacgatgatacagatatatggactcccgtcacagaagatgattacaaatttctttctagactagtattgtatgcaaaatctcaatcggatactgtatttgactattatgttcttactggtgatacggaaccacccactgtattcattttcaaggtaactagattttactttaatatgccgaaataaaaaatttttgtataatatctagaggtagaggtattgtttagataaatacaaataacatagatacatcgcatacttagcatttttataaatatacataagacatacactttatacatttttgtaaaaatactcataaaaaaatttataaaaattatggcacaaccatatcttgtataggtagtttagttcgtcgagtgaacctataaacagataatagacaacacataataatgcctactaatacaagcataataccgggagatgggatatatgacgttgtagtgtttgggttttctgaacgttgatagtctactaatactacatgctgacatctaatgcctgtataaccatgagagcatctacaatacataccgtcaatatctctagcgtggatacagtcaccgtgtaaacaatatccatctccctctggaccgcataatctgatagctggaatatctgttgtagcgtttgtaatttctggcaatgtcgtttcgatagcgttaccactatcggcgaatgatctgattatcatagcagcgaacaacaacatcagataatttatcaacatttttgatggattctgtgtttatgctgtttctcagtgtgtgtttatgacaagattgggaattttatattattaattcagtaatataaactaataatatattgttaattgtgtaaataatataaaaataacaatacaatattgaatgtgttgctgttaaaaatgtatgtgttaatataatagaataaaataaatgagtatgatcattttagataacgattgattttatcattaccgcttcattcttatattctttgcttacggaacctatatttagaaacatctactaacaattttttatgcttgcattattaatggtatgtaatatgattgattgtgtacgcaataccaatttgttaagtatgaatacggggtacaaacataaattgaaatttaacattatttatttatgatatatatcgttatcgttaggtctataccatggatatctttaaagaactaatcttaaaacaccctgatgaaaatgttttgatttctccagtttccattttatctactttatctattctaaatcatggagcagctggttctacagctgaacaactatcaaaatatatagagaatatgaatgagaatacacccgatgacaataatgatgacatggaggtagatattccgtattgtgcgacactagctaccgcaaataaaatatacggtagcgatagtatcgagttccacgcctccttcctacaaaaaataaaagacgattttcaaactgtaaactttaataatgctaaccaaacaaaggaactaatcaacgaatgggttaagacaatgacaaatggtaaaattaattccttattgactagtccgctatccattaatactcgtatgacagttgttagcgccgtccattttaaagcaatgtggaaatatccattttctaaacatcttacatatacagacaagttttatatttctaagaatatagttaccagcgttgatatgatggtgggtaccgagaataacttgcaatatgtacatattaatgaattattcggaggattctctattatcgatattccatacgagggaaactctagtatggtaattatactaccggacgacatagaaggtatatataacatagaaaaaaatataacagatgaaaaatttaaaaaatggtgtggtatgttatctactaaaagtatagacttgtatatgccaaagtttaaagtggaaatgacagaaccgtataatctggtaccgattttagaaaatttaggacttactaatatattcggatattatgcagattttagcaagatgtgtaatgaaactatcactgtagaaaaatttctacatacgacgtttatagatgttaatgaggagtatacagaagcatcggccgttacaggagtatttacgattaacttttcgatggtatatcgtacgaaggtctacataaaccatccattcatgtacatgattaaagacaccacaggacgtatactttttatagggaaatactgctatccgcaataaatataaacaaatagacttttataaagagtcttcaacgataagtatatcgacatactacttatgctgcgaaagattctgaacgagaacgactatctcaccctcttggatcatatccgcactgctaaatactaaatctccactacactttttatcatcttatgaggaatgattgccttcgtgaaataggaataattagcaccagaatagctatggattattgtggtagagagtgcactattctatgtcgtctactggatgaagatgtgacgtacaaaaaaataaaactagaaattgaaacgtgtcacaacttatcaaaacatatagatagacgaggaaacaatgcgctacattgttacgtctccaataaatgcgatacagacattaagattgttctctcgcggagtcgagagactttgtagaaacaacgaaggattaactccgctaggagtatacagtaagcatagatacgtaaaatctcagattgtgcatctactgatatccagctattcaaattcctctaacgaactcaagtcgaatataaatgatttcgatctgtattcggataatatcgacttacgtctgctaaaatacctaattgtggataaacggatacgtccgtccaagaatacgaattatgcaatcaatggtctcggattggtggatatatacgtaacgacgcctaatccgagaccagaagtattgctatggcttcttaaatcagaatgttacagcaccggttacgtatttcgtacctgtatgtacgacagtgatatgtgtaagaactctcttcattactatatatcgtctcatagagaatctcaatctctatccaaggatgtaattaaatgtttgatcgataacaatgtttccatccatggcagagacgaaggaggatctttacccatccaatactactggtctttctcaaccatagatatagagattgttaaattattattaataaaggatgtggacacgtgtagagtatacgacgtcagccctatattagaggcgtattatctaaacaagcgatttagagtaaccccatataatgtagacatggaaatcgttaatcttcttattgagagacgtcatactcttgtcgacgtaatgcgtagtattacttcgtacgattccagagaatataaccactacatcatcgataacattctaaagagatttagacaacaggatgaatccatcgtacaagccatactgataaactacttacattacggcgatatggtcgttcgatgcatgttagataacggacaacaactatcctctacacgactactttgttaataataatctcgtcgatgtaaacgtcgtaaggtttatcgtggaaaatatggacacgcggctgtaaatcacgtatcgaacaatggccgtctatgtatgtacggtctgatattatcgagatttaataattgcgggtatcactgttatgaaaccatactgatagatgtatttgatatactaagcaagtacatggatgatatagatatgatcgataactctactatattacgcggtcgatgtcaataatatacaatttgcaaagcggttattggaatatggagcgagtatcacgctcgataatcaatacggccatccagaaaagcagttacagaagagaaaacaaaacgaaatcgttgttctacaagatgtctctccctacgacgattactacgtaaaaaagatactagcctactgcctattaagggacgagtcattcgcggaactacatagtaaattctgtttaaacgaggactataaaagtgtatttatgaaaaatatatcattcgataagatagattccatcatcgtgacataagtcgcctcaaagagattcgaatctccgacaccgacctgtatacggtatcacagctatcttaaagccatacattcagacagtcacatttcatttcccatgtacgacgatctcatagaacagtgccatctatcgatggagcgtaaaagtaaactcgtcgacaaagcactcaataaattagagtctaccatcggtcaatctagactatcgtatttgcctccggaaattatgcgcaatatcatctaaacagtatgttgtacggaaagaaccattacaaatattatccatgatagaaagaaaatatctatatgattggagaagtaggaaacaggaacaagacaacgattactacattattaaatcatgaagtccgtattatactcgtatatattgtttctctcatgtataataataaacggaagagatatagcaccgcatgcaccatccgatggaaagtgtaaagacaacgaatacaaacgccataatttgtgtccgggaacatacgcttccagattatgcgatagcaagactaacacacgatgtacgccgtgtggttcgggtaccttcacatctcgcaataatcatttacccgcttgtctaagttgtaacggaagacgcgatcgtgtaacacgactcacaatagaatctgtgaatgctctcccggatattattgtcttctcaaaggatcatccggatgcaaggcatgtgtttcccaaacaaaatgtggaataggatacggagtatccggagacgtcatctgttctccgtgtggtctcggaacatattctcacaccgtctcttccgcagataaatgcgaacccgtacccagaaatacgtttaactatatcgatgtggaaattaacctgtatccagttaacgacacgtcgtgtactcggacgaccactaccggtctcagcgaatccatctcaacgtcggaactaactattactatgaatcataaagactgtaatcccgtatttcgtgatggatacttctccgttcttaataaggtagcgacttcaggtttctttacaggagaaaggtgtgcactctgaatttcgagattaaatgcaataacaaagattcttcctccaaacagttaacgaaagcaaagaatgatactatcatgccgcattcggagacagtaactctagtgggcgacatctatatactatatagtaataccaatactcaagactacgaaactgatacaatctcttatcatgtgggtaatgttctcgatgtcgatagccatatgcccggtagttgcgatatacataaactgatcactaattccaaacccacccactttttatagtaagtttttcacccataaataataaatacaataattaatttctcgtaaaagtagaaaatatattctaatttattgcacggtaaggaagtagaatcataaagaacagtactcaatcaatagcaattatgaaacaatatatcgtcctggcatgcatgtgcctggcggcagctgctatgcctgccagtcttcagcaatcatcctcatcctcctcctcgtgtacggaagaagaaaacaaacatcatatgggaatcgatgttattatcaaagtcacaaagcaagaccaaacaccgaccaatgataagatttgccaatccgtaacggaaattacagagtccgagtcagatccagatcccgaggtggaatcagaagatgattccacatcagtcgaggatgtagatcctcctaccacttattactccatcatcggtggaggtctgagaatgaactttggattcaccaaatgtcctcagattaaatccatctcagaatccgctgatggaaacacagtgaatgctagattgtccagcgtgtccccaggacaaggtaaggactctcccgcgatcactcatgaagaagctcttgctatgatcaaagactgtgaagtgtctatcgacatcagatgtagcgaagaagagaaagacagcgacatcaagacccatccagtactcgggtctaacatctctcataagaaagtgagttacgaagatatcatcggttcaacgatcgtcgatacaaaatgcgtcaagaatctagagtttagcgttcgtatcggagacatgtgcaaggaatcatctgaacttgaggtcaaggatggattcaagtatgtcgacggatcggcatctgaaggtgcaaccgatgatacttcactcatcgattcaacaaaactcaaagcgtgtgtctgaatcgataactctattcatctgaaattggatgagtagggttaatcgaacgattcaggcacaccacgaattaaaaaagtgtaccggacactatattccggtttgcaaaacaaaaatgttcttaactacattcacaaaaagttacctctcgcgacttcttctttttctgtctcaatagtgtgatacgattatgacactattcctattcctattcctatttcctttcagagtatcacaaaaatattaaacctctttctgatggtctcataaaaaaagttttacaaaaatatttttattctctttctctctttgatggtctcataaaaaaagttttacaaaaatatttttattctctttctctctttgatggtctcataaaaaaagttttacaaaaatatttttattctctttctctctttgatggtctcataaaaaaagttttacaaaaatatttttattctctttctctctttgatggtctcataaaaaaagttttacaaaaatatttttattctctttctctctttgatggtctcataaaaaaagttttacaaaaatatttttattctctttctctctttgatggtctcataaaaaaagttttacaaaaatatttttattctctttctctctttgatggtctcataaaaaaagttttacaaaaatatttttattctctttctctctttgatggtctcataaaaaaagttttacaaaaatatttttattctctttctctctttgatggtctcataaaaaaagttttacaaaaatatttttattctctttctctctttgatggtctcataaaaaaagttttacaaaaatatttttattctctttctctctttgatggtctcataaaaaaagttttacaaaaatatttttattctctttctctctttgatggtctcataaaaaagttttacaaaaatatttttattctctttctctctttgatggtctcataaaaaagttttacaaaaatatttttattctctttctctctttgatggtctcataaaaaaagttttacaaaaatatttttattctctttctctctttgatggtctcataa

SEQ ID NO: 71 - DNA, 7757 bp, Artificial Sequence
  pLENTI6/V5-EGFP (S. Weibel)
aatgtagtcttatgcaatactcttgtagtcttgcaacatggtaacgatgagttagcaacatgccttacaaggagagaaaaagcaccgtgcatgccgattggtggaagtaaggtggtacgatcgtgccttattaggaaggcaacagacgggtctgacatggattggacgaaccactgaattgccgcattgcagagatattgtatttaagtgcctagctcgatacataaacgggtctctctggttagaccagatctgagcctgggagctctctggctaactagggaacccactgcttaagcctcaataaagcttgccttgagtgcttcaagtagtgtgtgcccgtctgttgtgtgactctggtaactagagatccctcagacccttttagtcagtgtggaaaatctctagcagtggcgcccgaacagggacttgaaagcgaaagggaaaccagaggagctctctcgacgcaggactcggcttgctgaagcgcgcacggcaagaggcgaggggcggcgactggtgagtacgccaaaaattttgactagcggaggctagaaggagagagatgggtgcgagagcgtcagtattaagcgggggagaattagatcgcgatgggaaaaaattcggttaaggccagggggaaagaaaaaatataaattaaaacatatagtatgggcaagcagggagctagaacgattcgcagttaatcctggcctgttagaaacatcagaaggctgtagacaaatactgggacagctacaaccatcccttcagacaggatcagaagaacttagatcattatataatacagtagcaaccctctattgtgtgcatcaaaggatagagataaaagacaccaaggaagctttagacaagatagaggaagagcaaaacaaaagtaagaccaccgcacagcaagcggccgctgatcttcagacctggaggaggagatatgagggacaattggagaagtgaattatataaatataaagtagtaaaaattgaaccattaggagtagcacccaccaaggcaaagagaagagtggtgcagagagaaaaaagagcagtgggaataggagctttgttccttgggttcttgggagcagcaggaagcactatgggcgcagcgtcaatgacgctgacggtacaggccagacaattattgtctggtatagtgcagcagcagaacaatttgctgagggctattgaggcgcaacagcatctgttgcaactcacagtctggggcatcaagcagctccaggcaagaatcctggctgtggaaagatacctaaaggatcaacagctcctggggatttggggttgctctggaaaactcatttgcaccactgctgtgccttggaatgctagttggagtaataaatctctggaacagatttggaatcacacgacctggatggagtgggacagagaaattaacaattacacaagcttaatacactccttaattgaagaatcgcaaaaccagcaagaaaagaatgaacaagaattattggaattagataaatgggcaagtttgtggaattggtttaacataacaaattggctgtggtatataaaattattcataatgatagtaggaggcttggtaggtttaagaatagtttttgctgtactttctatagtgaatagagttaggcagggatattcaccattatcgtttcagacccacctcccaaccccgaggggacccgacaggcccgaaggaatagaagaagaaggtggagagagagacagagacagatccattcgattagtgaacggatctcgacggtatcgataagcttgggagttccgcgttacataacttacggtaaatggcccgcctggctgaccgcccaacgacccccgcccattgacgtcaataatgacgtatgttcccatagtaacgccaatagggactttccattgacgtcaatgggtggagtatttacggtaaactgcccacttggcagtacatcaagtgtatcatatgccaagtacgccccctattgacgtcaatgacggtaaatggcccgcctggcattatgcccagtacatgaccttatgggactttcctacttggcagtacatctacgtattagtcatcgctattaccatggtgatgcggttttggcagtacatcaatgggcgtggatagcggtttgactcacggggatttccaagtctccaccccattgacgtcaatgggagtttgttttggcaccaaaatcaacgggactttccaaaatgtcgtaacaactccgccccattgacgcaaatgggcggtaggcgtgtacggtgggaggtctatataagcagagctcgtttagtgaccgtcagatcgcctggagacgccatccacgctgttttgacctccatagaagacaccgactctagaggatccactagtccagtgtggtggaattctgcagatatcaacaagtttgtacaaaaaagcaggctgccaccatggtgagcaagggcgaggagctgttcaccggggtggtgcccatcctggtcgagctggacggcgacgtaaacggccacaagttcagcgtgtccggcgagggcgagggcgatgccacctacggcaagctgaccctgaagttcatctgcaccaccggcaagctgcccgtgccctggcccaccctcgtgaccaccctgacctacggcgtgcagtgcttcagccgctaccccgaccacatgaagcagcacgacttcttcaagtccgccatgcccgaaggctacgtccaggagcgcaccatcttcttcaaggacgacggcaactacaagacccgcgccgaggtgaagttcgagggcgacaccctggtgaaccgcatcgagctgaagggcatcgacttcaaggaggacggcaacatcctggggcacaagctggagtacaactacaacagccacaacgtctatatcatggccgacaagcagaagaacggcatcaaggtgaacttcaagatccgccacaacatcgaggacggcagcgtgcagctcgccgaccactaccagcagaacacccccatcggcgacggccccgtgctgctgcccgacaaccactacctgagcacccagtccgccctgagcaaagaccccaacgagaagcgcgatcacatggtcctgctggagttcgtgaccgccgccgggatcactctcggcatggacgagctgtacaagtaaacccagctttcttgtacaaagtggttgatatccagcacagtggcggccgctcgagtctagagggcccgcggttcgaaggtaagcctatccctaaccctctcctcggtctcgattctacgcgtaccggttagtaatgagtttggaattaattctgtggaatgtgtgtcagttagggtgtggaaagtccccaggctccccagcaggcagaagtatgcaaagcatgcatctcaattagtcagcaaccaggtgtggaaagtccccaggctccccagcaggcagaagtatgcaaagcatgcatctcaattagtcagcaaccatagtcccgcccctaactccgcccatcccgcccctaactccgcccagttccgcccattctccgccccatggctgactaattttttttatttatgcagaggccgaggccgcctctgcctctgagctattccagaagtagtgaggaggcttttttggaggcctaggcttttgcaaaaagctcccgggagcttgtatatccattttcggatctgatcagcacgtgttgacaattaatcatcggcatagtatatcggcatagtataatacgacaaggtgaggaactaaaccatggccaagcctttgtctcaagaagaatccaccctcattgaaagagcaacggctacaatcaacagcatccccatctctgaagactacagcgtcgccagcgcagctctctctagcgacggccgcatcttcactggtgtcaatgtatatcattttactgggggaccttgtgcagaactcgtggtgctgggcactgctgctgctgcggcagctggcaacctgacttgtatcgtcgcgatcggaaatgagaacaggggcatcttgagcccctgcggacggtgccgacaggtgcttctcgatctgcatcctgggatcaaagccatagtgaaggacagtgatggacagccgacggcagttgggattcgtgaattgctgccctctggttatgtgtgggagggctaagcacaattcgagctcggtacctttaagaccaatgacttacaaggcagctgtagatcttagccactttttaaaagaaaaggggggactggaagggctaattcactcccaacgaagacaagatctgctttttgcttgtactgggtctctctggttagaccagatctgagcctgggagctctctggctaactagggaacccactgcttaagcctcaataaagcttgccttgagtgcttcaagtagtgtgtgcccgtctgttgtgtgactctggtaactagagatccctcagacccttttagtcagtgtggaaaatctctagcagtagtagttcatgtcatcttattattcagtatttataacttgcaaagaaatgaatatcagagagtgagaggaacttgtttattgcagcttataatggttacaaataaagcaatagcatcacaaatttcacaaataaagcatttttttcactgcattctagttgtggtttgtccaaactcatcaatgtatcttatcatgtctggctctagctatcccgcccctaactccgcccatcccgcccctaactccgcccagttccgcccattctccgccccatggctgactaattttttttatttatgcagaggccgaggccgcctcggcctctgagctattccagaagtagtgaggaggcttttttggaggcctagggacgtacccaattcgccctatagtgagtcgtattacgcgcgctcactggccgtcgttttacaacgtcgtgactgggaaaaccctggcgttacccaacttaatcgccttgcagcacatccccctttcgccagctggcgtaatagcgaagaggcccgcaccgatcgcccttcccaacagttgcgcagcctgaatggcgaatgggacgcgccctgtagcggcgcattaagcgcggcgggtgtggtggttacgcgcagcgtgaccgctacacttgccagcgccctagcgcccgctcctttcgctttcttcccttcctttctcgccacgttcgccggctttccccgtcaagctctaaatcgggggctccctttagggttccgatttagtgctttacggcacctcgaccccaaaaaacttgattagggtgatggttcacgtagtgggccatcgccctgatagacggtttttcgccctttgacgttggagtccacgttctttaatagtggactcttgttccaaactggaacaacactcaaccctatctcggtctattcttttgatttataagggattttgccgatttcggcctattggttaaaaaatgagctgatttaacaaaaatttaacgcgaattttaacaaaatattaacgcttacaatttaggtggcacttttcggggaaatgtgcgcggaacccctatttgtttatttttctaaatacattcaaatatgtatccgctcatgagacaataaccctgataaatgcttcaataatattgaaaaaggaagagtatgagtattcaacatttccgtgtcgcccttattcccttttttgcggcattttgccttcctgtttttgctcacccagaaacgctggtgaaagtaaaagatgctgaagatcagttgggtgcacgagtgggttacatcgaactggatctcaacagcggtaagatccttgagagttttcgccccgaagaacgttttccaatgatgagcacttttaaagttctgctatgtggcgcggtattatcccgtattgacgccgggcaagagcaactcggtcgccgcatacactattctcagaatgacttggttgagtactcaccagtcacagaaaagcatcttacggatggcatgacagtaagagaattatgcagtgctgccataaccatgagtgataacactgcggccaacttacttctgacaacgatcggaggaccgaaggagctaaccgcttttttgcacaacatgggggatcatgtaactcgccttgatcgttgggaaccggagctgaatgaagccataccaaacgacgagcgtgacaccacgatgcctgtagcaatggcaacaacgttgcgcaaactattaactggcgaactacttactctagcttcccggcaacaattaatagactggatggaggcggataaagttgcaggaccacttctgcgctcggcccttccggctggctggtttattgctgataaatctggagccggtgagcgtgggtctcgcggtatcattgcagcactggggccagatggtaagccctcccgtatcgtagttatctacacgacggggagtcaggcaactatggatgaacgaaatagacagatcgctgagataggtgcctcactgattaagcattggtaactgtcagaccaagtttactcatatatactttagattgatttaaaacttcatttttaatttaaaaggatctaggtgaagatcctttttgataatctcatgaccaaaatcccttaacgtgagttttcgttccactgagcgtcagaccccgtagaaaagatcaaaggatcttcttgagatcctttttttctgcgcgtaatctgctgcttgcaaacaaaaaaaccaccgctaccagcggtggtttgtttgccggatcaagagctaccaactctttttccgaaggtaactggcttcagcagagcgcagataccaaatactgttcttctagtgtagccgtagttaggccaccacttcaagaactctgtagcaccgcctacatacctcgctctgctaatcctgttaccagtggctgctgccagtggcgataagtcgtgtcttaccgggttggactcaagacgatagttaccggataaggcgcagcggtcgggctgaacggggggttcgtgcacacagcccagcttggagcgaacgacctacaccgaactgagatacctacagcgtgagctatgagaaagcgccacgcttcccgaagggagaaaggcggacaggtatccggtaagcggcagggtcggaacaggagagcgcacgagggagcttccagggggaaacgcctggtatctttatagtcctgtcgggtttcgccacctctgacttgagcgtcgatttttgtgatgctcgtcaggggggcggagcctatggaaaaacgccagcaacgcggcctttttacggttcctggccttttgctggccttttgctcacatgttctttcctgcgttatcccctgattctgtggataaccgtattaccgcctttgagtgagctgataccgctcgccgcagccgaacgaccgagcgcagcgagtcagtgagcgaggaagcggaagagcgcccaatacgcaaaccgcctctccccgcgcgttggccgattcattaatgcagctggcacgacaggtttcccgactggaaagcgggcagtgagcgcaacgcaattaatgtgagttagctcactcattaggcaccccaggctttacactttatgcttccggctcgtatgttgtgtggaattgtgagcggataacaatttcacacaggaaacagctatgaccatgattacgccaagcgcgcaattaaccctcactaaagggaacaaaagctggagctgcaagctt

SEQ ID NO: 72 - DNA, 7776 bp, Artificial Sequence
  pLENTI6/V5-mNeptune
aatgtagtcttatgcaatactcttgtagtcttgcaacatggtaacgatgagttagcaacatgccttacaaggagagaaaaagcaccgtgcatgccgattggtggaagtaaggtggtacgatcgtgccttattaggaaggcaacagacgggtctgacatggattggacgaaccactgaattgccgcattgcagagatattgtatttaagtgcctagctcgatacataaacgggtctctctggttagaccagatctgagcctgggagctctctggctaactagggaacccactgcttaagcctcaataaagcttgccttgagtgcttcaagtagtgtgtgcccgtctgttgtgtgactctggtaactagagatccctcagacccttttagtcagtgtggaaaatctctagcagtggcgcccgaacagggacttgaaagcgaaagggaaaccagaggagctctctcgacgcaggactcggcttgctgaagcgcgcacggcaagaggcgaggggcggcgactggtgagtacgccaaaaattttgactagcggaggctagaaggagagagatgggtgcgagagcgtcagtattaagcgggggagaattagatcgcgatgggaaaaaattcggttaaggccagggggaaagaaaaaatataaattaaaacatatagtatgggcaagcagggagctagaacgattcgcagttaatcctggcctgttagaaacatcagaaggctgtagacaaatactgggacagctacaaccatcccttcagacaggatcagaagaacttagatcattatataatacagtagcaaccctctattgtgtgcatcaaaggatagagataaaagacaccaaggaagctttagacaagatagaggaagagcaaaacaaaagtaagaccaccgcacagcaagcggccgctgatcttcagacctggaggaggagatatgagggacaattggagaagtgaattatataaatataaagtagtaaaaattgaaccattaggagtagcacccaccaaggcaaagagaagagtggtgcagagagaaaaaagagcagtgggaataggagctttgttccttgggttcttgggagcagcaggaagcactatgggcgcagcgtcaatgacgctgacggtacaggccagacaattattgtctggtatagtgcagcagcagaacaatttgctgagggctattgaggcgcaacagcatctgttgcaactcacagtctggggcatcaagcagctccaggcaagaatcctggctgtggaaagatacctaaaggatcaacagctcctggggatttggggttgctctggaaaactcatttgcaccactgctgtgccttggaatgctagttggagtaataaatctctggaacagatttggaatcacacgacctggatggagtgggacagagaaattaacaattacacaagcttaatacactccttaattgaagaatcgcaaaaccagcaagaaaagaatgaacaagaattattggaattagataaatgggcaagtttgtggaattggtttaacataacaaattggctgtggtatataaaattattcataatgatagtaggaggcttggtaggtttaagaatagtttttgctgtactttctatagtgaatagagttaggcagggatattcaccattatcgtttcagacccacctcccaaccccgaggggacccgacaggcccgaaggaatagaagaagaaggtggagagagagacagagacagatccattcgattagtgaacggatctcgacggtatcgataagcttgggagttccgcgttacataacttacggtaaatggcccgcctggctgaccgcccaacgacccccgcccattgacgtcaataatgacgtatgttcccatagtaacgccaatagggactttccattgacgtcaatgggtggagtatttacggtaaactgcccacttggcagtacatcaagtgtatcatatgccaagtacgccccctattgacgtcaatgacggtaaatggcccgcctggcattatgcccagtacatgaccttatgggactttcctacttggcagtacatctacgtattagtcatcgctattaccatggtgatgcggttttggcagtacatcaatgggcgtggatagcggtttgactcacggggatttccaagtctccaccccattgacgtcaatgggagtttgttttggcaccaaaatcaacgggactttccaaaatgtcgtaacaactccgccccattgacgcaaatgggcggtaggcgtgtacggtgggaggtctatataagcagagctcgtttagtgaaccgtcagatcgcctggagacgccatccacgctgttttgacctccatagaagacaccgactctagaggatccactagtccagtgtggtggaattctgcagatatcaacaagtttgtacaaaaaagcaggcttcgccaccatggtgtctaaaggcgaggaactcatcaaagaaaacatgcatatgaaactgtacatggagggaaccgtgaacaatcatcacttcaagtgtactagcgagggcgagggcaaaccttacgagggaactcagactgggagaatcaaagtcgtggagggcggacctctgccatttgctttcgatatcctggcaacctgcttcatgtacggctccaaaacttttatcaaccacacccaggggattcccgattttttcaaacagagcttccccgagggcttcacatgggaacgagtgaccacatacgaggatggaggagtgctcaccgctacacaggacacatcactccaggacggatgtctcatctacaacgtcaaaattcgaggcgtcaatttcccttccaatggccctgtgatgcagaaaaaaaccctgggctgggaggcttctactgaaacactctaccctgccgacggaggactcgaggggcgctgtgatatggctctcaaactggtcggaggcgggcatctcatttgtaacctcaaaaccacctaccggagcaaaaaacctgccaaaaacctgaaaatgcctggcgtgtacttcgtggataggagactggaacgaatcaaagaggccgacaacgaaacatacgtggaacagcacgaggtggccgtggctcgatactgtgatctgccttctaaactcggacacaaactgaacggcatggacgaactctacaaataggacccagctttcttgtacaaagtggttgatatccagcacagtggcggccgctcgagtctagagggcccgcggttcgaaggtaagcctatccctaaccctctcctcggtctcgattctacgcgtaccggttagtaatgagtttggaattaattctgtggaatgtgtgtcagttagggtgtggaaagtccccaggctccccagcaggcagaagtatgcaaagcatgcatctcaattagtcagcaaccaggtgtggaaagtccccaggctccccagcaggcagaagtatgcaaagcatgcatctcaattagtcagcaaccatagtcccgcccctaactccgcccatcccgcccctaactccgcccagttccgcccattctccgccccatggctgactaattttttttatttatgcagaggccgaggccgcctctgcctctgagctattccagaagtagtgaggaggcttttttggaggcctaggcttttgcaaaaagctcccgggagcttgtatatccattttcggatctgatcagcacgtgttgacaattaatcatcggcatagtatatcggcatagtataatacgacaaggtgaggaactaaaccatggccaagcctttgtctcaagaagaatccaccctcattgaaagagcaacggctacaatcaacagcatccccatctctgaagactacagcgtcgccagcgcagctctctctagcgacggccgcatcttcactggtgtcaatgtatatcattttactgggggaccttgtgcagaactcgtggtgctgggcactgctgctgctgcggcagctggcaacctgacttgtatcgtcgcgatcggaaatgagaacaggggcatcttgagcccctgcggacggtgccgacaggtgcttctcgatctgcatcctgggatcaaagccatagtgaaggacagtgatggacagccgacggcagttgggattcgtgaattgctgccctctggttatgtgtgggagggctaagcacaattcgagctcggtacctttaagaccaatgacttacaaggcagctgtagatcttagccactttttaaaagaaaaggggggactggaagggctaattcactcccaacgaagacaagatctgctttttgcttgtactgggtctctctggttagaccagatctgagcctgggagctctctggctaactagggaacccactgcttaagcctcaataaagcttgccttgagtgcttcaagtagtgtgtgcccgtctgttgtgtgactctggtaactagagatccctcagacccttttagtcagtgtggaaaatctctagcagtagtagttcatgtcatcttattattcagtatttataacttgcaaagaaatgaatatcagagagtgagaggaacttgtttattgcagcttataatggttacaaataaagcaatagcatcacaaatttcacaaataaagcatttttttcactgcattctagttgtggtttgtccaaactcatcaatgtatcttatcatgtctggctctagctatcccgcccctaactccgcccatcccgcccctaactccgcccagttccgcccattctccgccccatggctgactaattttttttatttatgcagaggccgaggccgcctcggcctctgagctattccagaagtagtgaggaggcttttttggaggcctagggacgtacccaattcgccctatagtgagtcgtattacgcgcgctcactggccgtcgttttacaacgtcgtgactgggaaaaccctggcgttacccaacttaatcgccttgcagcacatccccctttcgccagctggcgtaatagcgaagaggcccgcaccgatcgcccttcccaacagttgcgcagcctgaatggcgaatgggacgcgccctgtagcggcgcattaagcgcggcgggtgtggtggttacgcgcagcgtgaccgctacacttgccagcgccctagcgcccgctcctttcgctttcttcccttcctttctcgccacgttcgccggctttccccgtcaagctctaaatcgggggctccctttagggttccgatttagtgctttacggcacctcgaccccaaaaaacttgattagggtgatggttcacgtagtgggccatcgccctgatagacggtttttcgccctttgacgttggagtccacgttctttaatagtggactcttgttccaaactggaacaacactcaaccctatctcggtctattcttttgatttataagggattttgccgatttcggcctattggttaaaaaatgagctgatttaacaaaaatttaacgcgaattttaacaaaatattaacgcttacaatttaggtggcacttttcggggaaatgtgcgcggaacccctatttgtttatttttctaaatacattcaaatatgtatccgctcatgagacaataaccctgataaatgcttcaataatattgaaaaaggaagagtatgagtattcaacatttccgtgtcgcccttattcccttttttgcggcattttgccttcctgtttttgctcacccagaaacgctggtgaaagtaaaagatgctgaagatcagttgggtgcacgagtgggttacatcgaactggatctcaacagcggtaagatccttgagagttttcgccccgaagaacgttttccaatgatgagcacttttaaagttctgctatgtggcgcggtattatcccgtattgacgccgggcaagagcaactcggtcgccgcatacactattctcagaatgacttggttgagtactcaccagtcacagaaaagcatcttacggatggcatgacagtaagagaattatgcagtgctgccataaccatgagtgataacactgcggccaacttacttctgacaacgatcggaggaccgaaggagctaaccgcttttttgcacaacatgggggatcatgtaactcgccttgatcgttgggaaccggagctgaatgaagccataccaaacgacgagcgtgacaccacgatgcctgtagcaatggcaacaacgttgcgcaaactattaactggcgaactacttactctagcttcccggcaacaattaatagactggatggaggcggataaagttgcaggaccacttctgcgctcggcccttccggctggctggtttattgctgataaatctggagccggtgagcgtgggtctcgcggtatcattgcagcactggggccagatggtaagccctcccgtatcgtagttatctacacgacggggagtcaggcaactatggatgaacgaaatagacagatcgctgagataggtgcctcactgattaagcattggtaactgtcagaccaagtttactcatatatactttagattgatttaaaacttcatttttaatttaaaaggatctaggtgaagatcctttttgataatctcatgaccaaaatcccttaacgtgagttttcgttccactgagcgtcagaccccgtagaaaagatcaaaggatcttcttgagatcctttttttctgcgcgtaatctgctgcttgcaaacaaaaaaaccaccgctaccagcggtggtttgtttgccggatcaagagctaccaactctttttccgaaggtaactggcttcagcagagcgcagataccaaatactgttcttctagtgtagccgtagttaggccaccacttcaagaactctgtagcaccgcctacatacctcgctctgctaatcctgttaccagtggctgctgccagtggcgataagtcgtgtcttaccgggttggactcaagacgatagttaccggataaggcgcagcggtcgggctgaacggggggttcgtgcacacagcccagcttggagcgaacgacctacaccgaactgagatacctacagcgtgagctatgagaaagcgccacgcttcccgaagggagaaaggcggacaggtatccggtaagcggcagggtcggaacaggagagcgcacgagggagcttccagggggaaacgcctggtatctttatagtcctgtcgggtttcgccacctctgacttgagcgtcgatttttgtgatgctcgtcaggggggcggagcctatggaaaaacgccagcaacgcggcctttttacggttcctggccttttgctggccttttgctcacatgttctttcctgcgttatcccctgattctgtggataaccgtattaccgcctttgagtgagctgataccgctcgccgcagccgaacgaccgagcgcagcgagtcagtgagcgaggaagcggaagagcgcccaatacgcaaaccgcctctccccgcgcgttggccgattcattaatgcagctggcacgacaggtttcccgactggaaagcgggcagtgagcgcaacgcaattaatgtgagttagctcactcattaggcaccccaggctttacactttatgcttccggctcgtatgttgtgtggaattgtgagcggataacaatttcacacaggaaacagctatgaccatgattacgccaagcgcgcaattaaccctcactaaagggaacaaaagctggagctgcaagctt

SEQ ID NO: 73 - DNA, 10127 bp, Artificial Sequence
  pLENTI6/V5-GW/lacZ
aatgtagtcttatgcaatactcttgtagtcttgcaacatggtaacgatgagttagcaacatgccttacaaggagagaaaaagcaccgtgcatgccgattggtggaagtaaggtggtacgatcgtgccttattaggaaggcaacagacgggtctgacatggattggacgaaccactgaattgccgcattgcagagatattgtatttaagtgcctagctcgatacataaacgggtctctctggttagaccagatctgagcctgggagctctctggctaactagggaacccactgcttaagcctcaataaagcttgccttgagtgcttcaagtagtgtgtgcccgtctgttgtgtgactctggtaactagagatccctcagacccttttagtcagtgtggaaaatctctagcagtggcgcccgaacagggacttgaaagcgaaagggaaaccagaggagctctctcgacgcaggactcggcttgctgaagcgcgcacggcaagaggcgaggggcggcgactggtgagtacgccaaaaattttgactagcggaggctagaaggagagagatgggtgcgagagcgtcagtattaagcgggggagaattagatcgcgatgggaaaaaattcggttaaggccagggggaaagaaaaaatataaattaaaacatatagtatgggcaagcagggagctagaacgattcgcagttaatcctggcctgttagaaacatcagaaggctgtagacaaatactgggacagctacaaccatcccttcagacaggatcagaagaacttagatcattatataatacagtagcaaccctctattgtgtgcatcaaaggatagagataaaagacaccaaggaagctttagacaagatagaggaagagcaaaacaaaagtaagaccaccgcacagcaagcggccgctgatcttcagacctggaggaggagatatgagggacaattggagaagtgaattatataaatataaagtagtaaaaattgaaccattaggagtagcacccaccaaggcaaagagaagagtggtgcagagagaaaaaagagcagtgggaataggagctttgttccttgggttcttgggagcagcaggaagcactatgggcgcagcgtcaatgacgctgacggtacaggccagacaattattgtctggtatagtgcagcagcagaacaatttgctgagggctattgaggcgcaacagcatctgttgcaactcacagtctggggcatcaagcagctccaggcaagaatcctggctgtggaaagatacctaaaggatcaacagctcctggggatttggggttgctctggaaaactcatttgcaccactgctgtgccttggaatgctagttggagtaataaatctctggaacagatttggaatcacacgacctggatggagtgggacagagaaattaacaattacacaagcttaatacactccttaattgaagaatcgcaaaaccagcaagaaaagaatgaacaagaattattggaattagataaatgggcaagtttgtggaattggtttaacataacaaattggctgtggtatataaaattattcataatgatagtaggaggcttggtaggtttaagaatagtttttgctgtactttctatagtgaatagagttaggcagggatattcaccattatcgtttcagacccacctcccaaccccgaggggacccgacaggcccgaaggaatagaagaagaaggtggagagagagacagagacagatccattcgattagtgaacggatctcgacggtatcgataagcttgggagttccgcgttacataacttacggtaaatggcccgcctggctgaccgcccaacgacccccgcccattgacgtcaataatgacgtatgttcccatagtaacgccaatagggactttccattgacgtcaatgggtggagtatttacggtaaactgcccacttggcagtacatcaagtgtatcatatgccaagtacgccccctattgacgtcaatgacggtaaatggcccgcctggcattatgcccagtacatgaccttatgggactttcctacttggcagtacatctacgtattagtcatcgctattaccatggtgatgcggttttggcagtacatcaatgggcgtggatagcggtttgactcacggggatttccaagtctccaccccattgacgtcaatgggagtttgttttggcaccaaaatcaacgggactttccaaaatgtcgtaacaactccgccccattgacgcaaatgggcggtaggcgtgtacggtgggaggtctatataagcagagctcgtttagtgaaccgtcagatcgcctggagacgccatccacgctgttttgacctccatagaagacaccgactctagaggatccactagtccagtgtggtggaattctgcagatatcaacaagtttgtacaaaaaagcaggctccgcggccgccccttcaccatgatagatcccgtcgttttacaacgtcgtgactgggaaaaccctggcgttacccaacttaatcgccttgcagcacatccccctttcgccagctggcgtaatagcgaagaggcccgcaccgatcgcccttcccaacagttgcgcagcctgaatggcgaatggcgctttgcctggtttccggcaccagaagcggtgccggaaagctggctggagtgcgatcttcctgaggccgatactgtcgtcgtcccctcaaactggcagatgcacggttacgatgcgcccatctacaccaacgtaacctatcccattacggtcaatccgccgtttgttcccacggagaatccgacgggttgttactcgctcacatttaatgttgatgaaagctggctacaggaaggccagacgcgaattatttttgatggcgttaactcggcgtttcatctgtggtgcaacgggcgctgggtcggttacggccaggacagtcgtttgccgtctgaatttgacctgagcgcatttttacgcgccggagaaaaccgcctcgcggtgatggtgctgcgttggagtgacggcagttatctggaagatcaggatatgtggcggatgagcggcattttccgtgacgtctcgttgctgcataaaccgactacacaaatcagcgatttccatgttgccactcgctttaatgatgatttcagccgcgctgtactggaggctgaagttcagatgtgcggcgagttgcgtgactacctacgggtaacagtttctttatggcagggtgaaacgcaggtcgccagcggcaccgcgcctttcggcggtgaaattatcgatgagcgtggtggttatgccgatcgcgtcacactacgtctgaacgtcgaaaacccgaaactgtggagcgccgaaatcccgaatctctatcgtgcggtggttgaactgcacaccgccgacggcacgctgattgaagcagaagcctgcgatgtcggtttccgcgaggtgcggattgaaaatggtctgctgctgctgaacggcaagccgttgctgattcgaggcgttaaccgtcacgagcatcatcctctgcatggtcaggtcatggatgagcagacgatggtgcaggatatcctgctgatgaagcagaacaactttaacgccgtgcgctgttcgcattatccgaaccatccgctgtggtacacgctgtgcgaccgctacggcctgtatgtggtggatgaagccaatattgaaacccacggcatggtgccaatgaatcgtctgaccgatgatccgcgctggctaccggcgatgagcgaacgcgtaacgcgaatggtgcagcgcgatcgtaatcacccgagtgtgatcatctggtcgctggggaatgaatcaggccacggcgctaatcacgacgcgctgtatcgctggatcaaatctgtcgatccttcccgcccggtgcagtatgaaggcggcggagccgacaccacggccaccgatattatttgcccgatgtacgcgcgcgtggatgaagaccagcccttcccggctgtgccgaaatggtccatcaaaaaatggctttcgctacctggagagacgcgcccgctgatcctttgcgaatacgcccacgcgatgggtaacagtcttggcggtttcgctaaatactggcaggcgtttcgtcagtatccccgtttacagggcggcttcgtctgggactgggtggatcagtcgctgattaaatatgatgaaaacggcaacccgtggtcggcttacggcggtgattttggcgatacgccgaacgatcgccagttctgtatgaacggtctggtctttgccgaccgcacgccgcatccagcgctgacggaagcaaaacaccagcagcagtttttccagttccgtttatccgggcaaaccatcgaagtgaccagcgaatacctgttccgtcatagcgataacgagctcctgcactggatggtggcgctggatggtaagccgctggcaagcggtgaagtgcctctggatgtcgctccacaaggtaaacagttgattgaactgcctgaactaccgcagccggagagcgccgggcaactctggctcacagtacgcgtagtgcaaccgaacgcgaccgcatggtcagaagccgggcacatcagcgcctggcagcagtggcgtctggcggaaaacctcagtgtgacgctccccgccgcgtcccacgccatcccgcatctgaccaccagcgaaatggatttttgcatcgagctgggtaataagcgttggcaatttaaccgccagtcaggctttctttcacagatgtggattggcgataaaaaacaactgctgacgccgctgcgcgatcagttcacccgtgcaccgctggataacgacattggcgtaagtgaagcgacccgcattgaccctaacgcctgggtcgaacgctggaaggcggcgggccattaccaggccgaagcagcgttgttgcagtgcacggcagatacacttgctgatgcggtgctgattacgaccgctcacgcgtggcagcatcaggggaaaaccttatttatcagccggaaaacctaccggattgatggtagtggtcaaatggcgattaccgttgatgttgaagtggcgagcgatacaccgcatccggcgcggattggcctgaactgccagctggcgcaggtagcagagcgggtaaactggctcggattagggccgcaagaaaactatcccgaccgccttactgccgcctgttttgaccgctgggatctgccattgtcagacatgtataccccgtacgtcttcccgagcgaaaacggtctgcgctgcgggacgcgcgaattgaattatggcccacaccagtggcgcggcgacttccagttcaacatcagccgctacagtcaacagcaactgatggaaaccagccatcgccatctgctgcacgcggaagaaggcacatggctgaatatcgacggtttccatatggggattggtggcgacgactcctggagcccgtcagtatcggcggagttccagctgagcgccggtcgctaccattaccagttggtctggtgtcaaaaaactaagggtgggcgcgccgacccagctttcttgtacaaagtggttgatatccagcacagtggcggccgctcgagtctagagggcccgcggttcgaaggtaagcctatccctaaccctctcctcggtctcgattctacgcgtaccggttagtaatgagtttggaattaattctgtggaatgtgtgtcagttagggtgtggaaagtccccaggctccccagcaggcagaagtatgcaaagcatgcatctcaattagtcagcaaccaggtgtggaaagtccccaggctccccagcaggcagaagtatgcaaagcatgcatctcaattagtcagcaaccatagtcccgcccctaactccgcccatcccgcccctaactccgcccagttccgcccattctccgccccatggctgactaattttttttatttatgcagaggccgaggccgcctctgcctctgagctattccagaagtagtgaggaggcttttttggaggcctaggcttttgcaaaaagctcccgggagcttgtatatccattttcggatctgatcagcacgtgttgacaattaatcatcggcatagtatatcggcatagtataatacgacaaggtgaggaactaaaccatggccaagcctttgtctcaagaagaatccaccctcattgaaagagcaacggctacaatcaacagcatccccatctctgaagactacagcgtcgccagcgcagctctctctagcgacggccgcatcttcactggtgtcaatgtatatcattttactgggggaccttgtgcagaactcgtggtgctgggcactgctgctgctgcggcagctggcaacctgacttgtatcgtcgcgatcggaaatgagaacaggggcatcttgagcccctgcggacggtgccgacaggtgcttctcgatctgcatcctgggatcaaagccatagtgaaggacagtgatggacagccgacggcagttgggattcgtgaattgctgccctctggttatgtgtgggagggctaagcacaattcgagctcggtacctttaagaccaatgacttacaaggcagctgtagatcttagccactttttaaaagaaaaggggggactggaagggctaattcactcccaacgaagacaagatctgctttttgcttgtactgggtctctctggttagaccagatctgagcctgggagctctctggctaactagggaacccactgcttaagcctcaataaagcttgccttgagtgcttcaagtagtgtgtgcccgtctgttgtgtgactctggtaactagagatccctcagacccttttagtcagtgtggaaaatctctagcagtagtagttcatgtcatcttattattcagtatttataacttgcaaagaaatgaatatcagagagtgagaggaacttgtttattgcagcttataatggttacaaataaagcaatagcatcacaaatttcacaaataaagcatttttttcactgcattctagttgtggtttgtccaaactcatcaatgtatcttatcatgtctggctctagctatcccgcccctaactccgcccatcccgcccctaactccgcccagttccgcccattctccgccccatggctgactaattttttttatttatgcagaggccgaggccgcctcggcctctgagctattccagaagtagtgaggaggcttttttggaggcctagggacgtacccaattcgccctatagtgagtcgtattacgcgcgctcactggccgtcgttttacaacgtcgtgactgggaaaaccctggcgttacccaacttaatcgccttgcagcacatccccctttcgccagctggcgtaatagcgaagaggcccgcaccgatcgcccttcccaacagttgcgcagcctgaatggcgaatgggacgcgccctgtagcggcgcattaagcgcggcgggtgtggtggttacgcgcagcgtgaccgctacacttgccagcgccctagcgcccgctcctttcgctttcttcccttcctttctcgccacgttcgccggctttccccgtcaagctctaaatcgggggctccctttagggttccgatttagtgctttacggcacctcgaccccaaaaaacttgattagggtgatggttcacgtagtgggccatcgccctgatagacggtttttcgccctttgacgttggagtccacgttctttaatagtggactcttgttccaaactggaacaacactcaaccctatctcggtctattcttttgatttataagggattttgccgatttcggcctattggttaaaaaatgagctgatttaacaaaaatttaacgcgaattttaacaaaatattaacgcttacaatttaggtggcacttttcggggaaatgtgcgcggaacccctatttgtttatttttctaaatacattcaaatatgtatccgctcatgagacaataaccctgataaatgcttcaataatattgaaaaaggaagagtatgagtattcaacatttccgtgtcgcccttattcccttttttgcggcattttgccttcctgtttttgctcacccagaaacgctggtgaaagtaaaagatgctgaagatcagttgggtgcacgagtgggttacatcgaactggatctcaacagcggtaagatccttgagagttttcgccccgaagaacgttttccaatgatgagcacttttaaagttctgctatgtggcgcggtattatcccgtattgacgccgggcaagagcaactcggtcgccgcatacactattctcagaatgacttggttgagtactcaccagtcacagaaaagcatcttacggatggcatgacagtaagagaattatgcagtgctgccataaccatgagtgataacactgcggccaacttacttctgacaacgatcggaggaccgaaggagctaaccgcttttttgcacaacatgggggatcatgtaactcgccttgatcgttgggaaccggagctgaatgaagccataccaaacgacgagcgtgacaccacgatgcctgtagcaatggcaacaacgttgcgcaaactattaactggcgaactacttactctagcttcccggcaacaattaatagactggatggaggcggataaagttgcaggaccacttctgcgctcggcccttccggctggctggtttattgctgataaatctggagccggtgagcgtgggtctcgcggtatcattgcagcactggggccagatggtaagccctcccgtatcgtagttatctacacgacggggagtcaggcaactatggatgaacgaaatagacagatcgctgagataggtgcctcactgattaagcattggtaactgtcagaccaagtttactcatatatactttagattgatttaaaacttcatttttaatttaaaaggatctaggtgaagatcctttttgataatctcatgaccaaaatcccttaacgtgagttttcgttccactgagcgtcagaccccgtagaaaagatcaaaggatcttcttgagatcctttttttctgcgcgtaatctgctgcttgcaaacaaaaaaaccaccgctaccagcggtggtttgtttgccggatcaagagctaccaactctttttccgaaggtaactggcttcagcagagcgcagataccaaatactgttcttctagtgtagccgtagttaggccaccacttcaagaactctgtagcaccgcctacatacctcgctctgctaatcctgttaccagtggctgctgccagtggcgataagtcgtgtcttaccgggttggactcaagacgatagttaccggataaggcgcagcggtcgggctgaacggggggttcgtgcacacagcccagcttggagcgaacgacctacaccgaactgagatacctacagcgtgagctatgagaaagcgccacgcttcccgaagggagaaaggcggacaggtatccggtaagcggcagggtcggaacaggagagcgcacgagggagcttccagggggaaacgcctggtatctttatagtcctgtcgggtttcgccacctctgacttgagcgtcgatttttgtgatgctcgtcaggggggcggagcctatggaaaaacgccagcaacgcggcctttttacggttcctggccttttgctggccttttgctcacatgttctttcctgcgttatcccctgattctgtggataaccgtattaccgcctttgagtgagctgataccgctcgccgcagccgaacgaccgagcgcagcgagtcagtgagcgaggaagcggaagagcgcccaatacgcaaaccgcctctccccgcgcgttggccgattcattaatgcagctggcacgacaggtttcccgactggaaagcgggcagtgagcgcaacgcaattaatgtgagttagctcactcattaggcaccccaggctttacactttatgcttccggctcgtatgttgtgtggaattgtgagcggataacaatttcacacaggaaacagctatgaccatgattacgccaagcgcgcaattaaccctcactaaagggaacaaaagctggagctgcaagctt

SEQ ID NO: 74 - protein, 520 aa, Artificial Sequence
  SIL-6R/IL-6 fusion protein
  SIGNAL (1)...(19): signal sequence
MLAVGCALLAALLAAPGAALAPRRCPAQEVARGVLTSLPGDSVTLTCPGVEPEDNATVHWVLRKPAAGSHPSRWAGMGRRLLLRSVQLHDSGNYSCYRAGRPAGTVHLLVDVPPEEPQLSCFRKSPLSNVVCEWGPRSTPSLTTKAVLLVRKFQNSPAEDFQEPCQYSQESQKFSCQLAVPEGDSSFYIVSMCVASSVGSKFSKTQTFQGCGILQPDPPANITVTAVARNPRWLSVTWQDPHSWNSSFYRLRFELRYRAERSKTFTTWMVKDLQHHCVIHDAWSGLRHVVQLRAQEEFGQGEWSEWSPEAMGTPWTESRSPPARGGGGSGGGGSVEPVPPGEDSKDVAAPHRQPLTSSERIDKQIRYILDGISALRKETCNKSNMCESSKEALAENNLNLPKMAEKDGCFQSGFNEETCLVKIITGLLEFEVYLEYLQNRFESSEEQARAVQMSTKVLIQFLQKKAKNLDAITTPDPTTNASLLTKLQAQNQWLQDMTTHLILRSFKEFLQSSLRALRQM

SEQ ID NO: 75 - DNA, 6305 bp, Artificial Sequence
  TK-SEL-mLIGHT1
agcgcccaatacgcaaaccgcctctccccgcgcgttggccgattcattaatgcagctggcacgacaggtttcccgactggaaagcgggcagtgagcgcaacgcaattaatgtgagttagctcactcattaggcaccccaggctttacactttatgcttccggctcgtatgttgtgtggaattgtgagcggataacaatttcacacaggaaacagctatgaccatgattacgccaagctttgttacagatggaagggtcaaacttaataaaggatatttgttcgactttgtgattagtttgatgcgattcaaaaaagaatcctctctagctaccaccgcaatagatcctgttagatacatagatcctcgtcgtgatatcgcattttctaacgtgatggatatattaaagtcgaataaagtgaacaataattaattctttattgtcatcatgaacggcggacatattcagttgataatcggccccatgttttcaggtaaaagtacagaattaattagacgagttagacgttatcaaatagctcaatataaatgcgtgactataaaatattctaacgataatagatacggaacgggactatggacgcatgataagaataattttgaagcattggaagcaactaaactatgtgatgtcttggaatcaattacagatttctccgtgataggtatcgatgaaggacagttctttccagacattgtttaattctgtgagcgtatggcaaacggtaccgagctcggtttggaattagtgaaagcttaaaaattgaaattttattttttttttttggaatataaataagctcgaagtcgacgccaccatggagagtgtggtacagccttcagtgtttgtggtggatggacagacggacatcccattcaggcggctggaacagaaccaccggagacggcgctgtggcactgtccaggtcagcctggccctggtgctgctgctaggtgctgggctggccactcagggctggtttctcctgagactgcatcaacgtcttggagacatagtagctcatctgccagatggaggcaaaggctcctgggagaagctgatacaagatcaacgatctcaccaggccaacccagcagcacatcttacaggagccaacgccagcttgataggtattggtggacctctgttatgggagacacgacttggcctggccttcttgaggggcttgacgtatcatgatggggccctggtgaccatggagcccggttactactatgtgtactccaaagtgcagctgagcggcgtgggctgcccccaggggctggccaatggcctccccatcacccatggactatacaagcgcacatcccgctacccgaaggagttagaactgctggtcagtcggcggtcaccctgtggccgggccaacagctcccgagtctggtgggacagcagcttcctgggcggcgtggtacatctggaggctggggaagaggtggtggtccgcgtgcctggaaaccgcctggtcagaccacgtgacggcaccaggtcctatttcggagctttcatggtctgattaattaatttttatcgatctaattcaacaatgtctggagagctcggatccttctgtgagcgtatggcaaacgaaggaaaaatagttatagtagccgcactcgatgggacatttcaacgtaaaccgtttaataatattttgaatcttattccattatctgaaatggtggtaaaactaactgctgtgtgtatgaaatgctttaaggaggcttccttttctaaacgattgggtgaggaaaccgagatagagataataggaggtaatgatatgtatcaatcggtgtgtagaaagtgttacgtcggctcataatattatattttttatctaaaaaactaaaaataaacattgattaaattttaatataatacttaaaaatggatgttgtgtcgttagataaaccgtttatgtattttgaggaaattgataatgagttagattacgaaccagaaagtgcaaatgaggtcgcaaaaaaactgccgtatcaaggacagttaaaactattactaggagaattattttttcttagtaagttacagcgacacggtatattagatggtgccaccgtagtgtactagttaacggccgccagtgtgctggaattctagaaaagtagaaaatatattctaatttattgcacgggatgagcgaaaaatacatcgtcacctgggacatgttgcagatccatgcacgtaaactcgcaagccgactgatgccttctgaacaatggaaaggcattattgccgtaagccgtggcggtctggtaccgggtgcgttactggcgcgtgaactgggtattcgtcatgtcgataccgtttgtatttccagctacgatcacgacaaccagcgcgagcttaaagtgctgaaacgcgcagaaggcgatggcgaaggcttcatcgttattgatgacctggtggataccggtggtactgcggttgcgattcgtgaaatgtatccaaaagcgcactttgtcaccatcttcgcaaaaccggctggtcgtccgctggttgatgactatgttgttgatatcccgcaagatacctggattgaacagccgtgggatatgggcgtcgtattcgtcccgccaatctccggtcgctaaggatcagcttggcgtaatcaagccgaattctgcagatatccatcacactggcggccgctcgagcatgcatctagagggcccaattcgccctatagtgagtcgtattacaattcactggccgtcgttttacaacgtcgtgactgggaaaaccctggcgttacccaacttaatcgccttgcagcacatccccctttcgccagctggcgtaatagcgaagaggcccgcaccgatcgcccttcccaacagttgcgcagcctgaatggcgaatggacgcgccctgtagcggcgcattaagcgcggcgggtgtggtggttacgcgcagcgtgaccgctacacttgccagcgccctagcgcccgctcctttcgctttcttcccttcctttctcgccacgttcgccggctttccccgtcaagctctaaatcgggggctccctttagggttccgatttagtgctttacggcacctcgaccccaaaaaacttgattagggtgatggttcacgtagtgggccatcgccctgatagacggtttttcgccctttgacgttggagtccacgttctttaatagtggactcttgttccaaactggaacaacactcaaccctatctcggtctattcttttgatttataagggattttgccgatttcggcctattggttaaaaaatgagctgatttaacaaaaatttaacgcgaattttaacaaaattcagggcgcaagggctgctaaaggaagcggaacacgtagaaagccagtccgcagaaacggtgctgaccccggatgaatgtcagctactgggctatctggacaagggaaaacgcaagcgcaaagagaaagcaggtagcttgcagtgggcttacatggcgatagctagactgggcggttttatggacagcaagcgaaccggaattgccagctggggcgccctctggtaaggttgggaagccctgcaaagtaaactggatggctttcttgccgccaaggatctgatggcgcaggggatcaagatctgatcaagagacaggatgaggatcgtttcgcatgattgaacaagatggattgcacgcaggttctccggccgcttgggtggagaggctattcggctatgactgggcacaacagacaatcggctgctctgatgccgccgtgttccggctgtcagcgcaggggcgcccggttctttttgtcaagaccgacctgtccggtgccctgaatgaactgcaggacgaggcagcgcggctatcgtggctggccacgacgggcgttccttgcgcagctgtgctcgacgttgtcactgaagcgggaagggactggctgctattgggcgaagtgccggggcaggatctcctgtcatcccaccttgctcctgccgagaaagtatccatcatggctgatgcaatgcggcggctgcatacgcttgatccggctacctgcccattcgaccaccaagcgaaacatcgcatcgagcgagcacgtactcggatggaagccggtcttgtcgatcaggatgatctggacgaagagcatcaggggctcgcgccagccgaactgttcgccaggctcaaggcgcgcatgcccgacggcgaggatctcgtcgtgacccatggcgatgcctgcttgccgaatatcatggtggaaaatggccgcttttctggattcatcgactgtggccggctgggtgtggcggaccgctatcaggacatagcgttggctacccgtgatattgctgaagagcttggcggcgaatgggctgaccgcttcctcgtgctttacggtatcgccgctcccgattcgcagcgcatcgccttctatcgccttcttgacgagttcttctgaattgaaaaaggaagagtatgagtattcaacatttccgtgtcgcccttattcccttttttgcggcattttgccttcctgtttttgctcacccagaaacgctggtgaaagtaaaagatgctgaagatcagttgggtgcacgagtgggttacatcgaactggatctcaacagcggtaagatccttgagagttttcgccccgaagaacgttttccaatgatgagcacttttaaagttctgctatgtggcgcggtattatcccgtattgacgccgggcaagagcaactcggtcgccgcatacactattctcagaatgacttggttgagtactcaccagtcacagaaaagcatcttacggatggcatgacagtaagagaattatgcagtgctgccataaccatgagtgataacactgcggccaacttacttctgacaacgatcggaggaccgaaggagctaaccgcttttttgcacaacatgggggatcatgtaactcgccttgatcgttgggaaccggagctgaatgaagccataccaaacgacgagcgtgacaccacgatgcctgtagcaatggcaacaacgttgcgcaaactattaactggcgaactacttactctagcttcccggcaacaattaatagactggatggaggcggataaagttgcaggaccacttctgcgctcggcccttccggctggctggtttattgctgataaatctggagccggtgagcgtgggtctcgcggtatcattgcagcactggggccagatggtaagccctcccgtatcgtagttatctacacgacggggagtcaggcaactatggatgaacgaaatagacagatcgctgagataggtgcctcactgattaagcattggtaactgtcagaccaagtttactcatatatactttagattgatttaaaacttcatttttaatttaaaaggatctaggtgaagatcctttttgataatctcatgaccaaaatcccttaacgtgagttttcgttccactgagcgtcagaccccgtagaaaagatcaaaggatcttcttgagatcctttttttctgcgcgtaatctgctgcttgcaaacaaaaaaaccaccgctaccagcggtggtttgtttgccggatcaagagctaccaactctttttccgaaggtaactggcttcagcagagcgcagataccaaatactgttcttctagtgtagccgtagttaggccaccacttcaagaactctgtagcaccgcctacatacctcgctctgctaatcctgttaccagtggctgctgccagtggcgataagtcgtgtcttaccgggttggactcaagacgatagttaccggataaggcgcagcggtcgggctgaacggggggttcgtgcacacagcccagcttggagcgaacgacctacaccgaactgagatacctacagcgtgagctatgagaaagcgccacgcttcccgaagggagaaaggcggacaggtatccggtaagcggcagggtcggaacaggagagcgcacgagggagcttccagggggaaacgcctggtatctttatagtcctgtcgggtttcgccacctctgacttgagcgtcgatttttgtgatgctcgtcaggggggcggagcctatggaaaaacgccagcaacgcggcctttttacggttcctggccttttgctggccttttgctcacatgttctttcctgcgttatcccctgattctgtggataaccgtattaccgcctttgagtgagctgataccgctcgccgcagccgaacgttgtttaattctgtgagcgtatggcaaacg

SEQ ID NO: 76 - DNA, 6270 bp, Artificial Sequence
  TK-SE-mLIGHT2
agcgcccaatacgcaaaccgcctctccccgcgcgttggccgattcattaatgcagctggcacgacaggtttcccgactggaaagcgggcagtgagcgcaacgcaattaatgtgagttagctcactcattaggcaccccaggctttacactttatgcttccggctcgtatgttgtgtggaattgtgagcggataacaatttcacacaggaaacagctatgaccatgattacgccaagctttgttacagatggaagggtcaaacttaataaaggatatttgttcgactttgtgattagtttgatgcgattcaaaaaagaatcctctctagctaccaccgcaatagatcctgttagatacatagatcctcgtcgtgatatcgcattttctaacgtgatggatatattaaagtcgaataaagtgaacaataattaattctttattgtcatcatgaacggcggacatattcagttgataatcggccccatgttttcaggtaaaagtacagaattaattagacgagttagacgttatcaaatagctcaatataaatgcgtgactataaaatattctaacgataatagatacggaacgggactatggacgcatgataagaataattttgaagcattggaagcaactaaactatgtgatgtcttggaatcaattacagatttctccgtgataggtatcgatgaaggacagttctttccagacattgtttaattctgtgagcgtatggcaaacggtaccgagctcaaaaattgaaaaactagcgtctttttttgctcgaagtcgacgccaccatggagagtgtggtacagccttcagtgtttgtggtggatggacagacggacatcccattcaggcggctggaacagaaccaccggagacggcgctgtggcactgtccaggtcagcctggccctggtgctgctgctaggtgctgggctggccactcagggctggtttctcctgagactgcatcaacgtcttggagacatagtagctcatctgccagatggaggcaaaggctcctgggagaagctgatacaagatcaacgatctcaccaggccaacccagcagcacatcttacaggagccaacgccagcttgataggtattggtggacctctgttatgggagacacgacttggcctggccttcttgaggggcttgacgtatcatgatggggccctggtgaccatggagcccggttactactatgtgtactccaaagtgcagctgagcggcgtgggctgcccccaggggctggccaatggcctccccatcacccatggactatacaagcgcacatcccgctacccgaaggagttagaactgctggtcagtcggcggtcaccctgtggccgggccaacagctcccgagtctggtgggacagcagcttcctgggcggcgtggtacatctggaggctggggaagaggtggtggtccgcgtgcctggaaaccgcctggtcagaccacgtgacggcaccaggtcctatttcggagctttcatggtctgattaattaatttttatcgatctaattcaacaatgtctggagagctcggatccttctgtgagcgtatggcaaacgaaggaaaaatagttatagtagccgcactcgatgggacatttcaacgtaaaccgtttaataatattttgaatcttattccattatctgaaatggtggtaaaactaactgctgtgtgtatgaaatgctttaaggaggcttccttttctaaacgattgggtgaggaaaccgagatagagataataggaggtaatgatatgtatcaatcggtgtgtagaaagtgttacgtcggctcataatattatattttttatctaaaaaactaaaaataaacattgattaaattttaatataatacttaaaaatggatgttgtgtcgttagataaaccgtttatgtattttgaggaaattgataatgagttagattacgaaccagaaagtgcaaatgaggtcgcaaaaaaactgccgtatcaaggacagttaaaactattactaggagaattattttttcttagtaagttacagcgacacggtatattagatggtgccaccgtagtgtactagttaacggccgccagtgtgctggaattctagaaaagtagaaaatatattctaatttattgcacgggatgagcgaaaaatacatcgtcacctgggacatgttgcagatccatgcacgtaaactcgcaagccgactgatgccttctgaacaatggaaaggcattattgccgtaagccgtggcggtctggtaccgggtgcgttactggcgcgtgaactgggtattcgtcatgtcgataccgtttgtatttccagctacgatcacgacaaccagcgcgagcttaaagtgctgaaacgcgcagaaggcgatggcgaaggcttcatcgttattgatgacctggtggataccggtggtactgcggttgcgattcgtgaaatgtatccaaaagcgcactttgtcaccatcttcgcaaaaccggctggtcgtccgctggttgatgactatgttgttgatatcccgcaagatacctggattgaacagccgtgggatatgggcgtcgtattcgtcccgccaatctccggtcgctaaggatcagcttggcgtaatcaagccgaattctgcagatatccatcacactggcggccgctcgagcatgcatctagagggcccaattcgccctatagtgagtcgtattacaattcactggccgtcgttttacaacgtcgtgactgggaaaaccctggcgttacccaacttaatcgccttgcagcacatccccctttcgccagctggcgtaatagcgaagaggcccgcaccgatcgcccttcccaacagttgcgcagcctgaatggcgaatggacgcgccctgtagcggcgcattaagcgcggcgggtgtggtggttacgcgcagcgtgaccgctacacttgccagcgccctagcgcccgctcctttcgctttcttcccttcctttctcgccacgttcgccggctttccccgtcaagctctaaatcgggggctccctttagggttccgatttagtgctttacggcacctcgaccccaaaaaacttgattagggtgatggttcacgtagtgggccatcgccctgatagacggtttttcgccctttgacgttggagtccacgttctttaatagtggactcttgttccaaactggaacaacactcaaccctatctcggtctattcttttgatttataagggattttgccgatttcggcctattggttaaaaaatgagctgatttaacaaaaatttaacgcgaattttaacaaaattcagggcgcaagggctgctaaaggaagcggaacacgtagaaagccagtccgcagaaacggtgctgaccccggatgaatgtcagctactgggctatctggacaagggaaaacgcaagcgcaaagagaaagcaggtagcttgcagtgggcttacatggcgatagctagactgggcggttttatggacagcaagcgaaccggaattgccagctggggcgccctctggtaaggttgggaagccctgcaaagtaaactggatggctttcttgccgccaaggatctgatggcgcaggggatcaagatctgatcaagagacaggatgaggatcgtttcgcatgattgaacaagatggattgcacgcaggttctccggccgcttgggtggagaggctattcggctatgactgggcacaacagacaatcggctgctctgatgccgccgtgttccggctgtcagcgcaggggcgcccggttctttttgtcaagaccgacctgtccggtgccctgaatgaactgcaggacgaggcagcgcggctatcgtggctggccacgacgggcgttccttgcgcagctgtgctcgacgttgtcactgaagcgggaagggactggctgctattgggcgaagtgccggggcaggatctcctgtcatcccaccttgctcctgccgagaaagtatccatcatggctgatgcaatgcggcggctgcatacgcttgatccggctacctgcccattcgaccaccaagcgaaacatcgcatcgagcgagcacgtactcggatggaagccggtcttgtcgatcaggatgatctggacgaagagcatcaggggctcgcgccagccgaactgttcgccaggctcaaggcgcgcatgcccgacggcgaggatctcgtcgtgacccatggcgatgcctgcttgccgaatatcatggtggaaaatggccgcttttctggattcatcgactgtggccggctgggtgtggcggaccgctatcaggacatagcgttggctacccgtgatattgctgaagagcttggcggcgaatgggctgaccgcttcctcgtgctttacggtatcgccgctcccgattcgcagcgcatcgccttctatcgccttcttgacgagttcttctgaattgaaaaaggaagagtatgagtattcaacatttccgtgtcgcccttattcccttttttgcggcattttgccttcctgtttttgctcacccagaaacgctggtgaaagtaaaagatgctgaagatcagttgggtgcacgagtgggttacatcgaactggatctcaacagcggtaagatccttgagagttttcgccccgaagaacgttttccaatgatgagcacttttaaagttctgctatgtggcgcggtattatcccgtattgacgccgggcaagagcaactcggtcgccgcatacactattctcagaatgacttggttgagtactcaccagtcacagaaaagcatcttacggatggcatgacagtaagagaattatgcagtgctgccataaccatgagtgataacactgcggccaacttacttctgacaacgatcggaggaccgaaggagctaaccgcttttttgcacaacatgggggatcatgtaactcgccttgatcgttgggaaccggagctgaatgaagccataccaaacgacgagcgtgacaccacgatgcctgtagcaatggcaacaacgttgcgcaaactattaactggcgaactacttactctagcttcccggcaacaattaatagactggatggaggcggataaagttgcaggaccacttctgcgctcggcccttccggctggctggtttattgctgataaatctggagccggtgagcgtgggtctcgcggtatcattgcagcactggggccagatggtaagccctcccgtatcgtagttatctacacgacggggagtcaggcaactatggatgaacgaaatagacagatcgctgagataggtgcctcactgattaagcattggtaactgtcagaccaagtttactcatatatactttagattgatttaaaacttcatttttaatttaaaaggatctaggtgaagatcctttttgataatctcatgaccaaaatcccttaacgtgagttttcgttccactgagcgtcagaccccgtagaaaagatcaaaggatcttcttgagatcctttttttctgcgcgtaatctgctgcttgcaaacaaaaaaaccaccgctaccagcggtggtttgtttgccggatcaagagctaccaactctttttccgaaggtaactggcttcagcagagcgcagataccaaatactgttcttctagtgtagccgtagttaggccaccacttcaagaactctgtagcaccgcctacatacctcgctctgctaatcctgttaccagtggctgctgccagtggcgataagtcgtgtcttaccgggttggactcaagacgatagttaccggataaggcgcagcggtcgggctgaacggggggttcgtgcacacagcccagcttggagcgaacgacctacaccgaactgagatacctacagcgtgagctatgagaaagcgccacgcttcccgaagggagaaaggcggacaggtatccggtaagcggcagggtcggaacaggagagcgcacgagggagcttccagggggaaacgcctggtatctttatagtcctgtcgggtttcgccacctctgacttgagcgtcgatttttgtgatgctcgtcaggggggcggagcctatggaaaaacgccagcaacgcggcctttttacggttcctggccttttgctggccttttgctcacatgttctttcctgcgttatcccctgattctgtggataaccgtattaccgcctttgagtgagctgataccgctcgccgcagccgaacgttgtttaattctgtgagcgtatggcaaacg

SEQ ID NO: 77 - DNA, 4815 bp, Artificial Sequence
  F14.5L-p7.5-tetR1
gacgtctaagaaaccattattatcatgacattaacctataaaaataggcgtatcacgaggccctttcgtctcgcgcgtttcggtgatgacggtgaaaacctctgacacatgcagctcccggagacggtcacagcttgtctgtaagcggatgccgggagcagacaagcccgtcagggcgcgtcagcgggtgttggcgggtgtcggggctggcttaactatgcggcatcagagcagattgtactgagagtgcaccatatgtagaagaattgataaatatgaaaccttttaagaatatgaataaaataacaattaatcaaaaggataattgtatattagcaaatcgatgctttgttaaaatagatactcctagatacataccatcgacatccattagcagttctaatatcatcagaatacggaatcatgattttacattatctgaattattgtattcaccgtttcattttcaacagcctcagtttcaatatctccttcctgggtttgtattaacgtgtattgataaagtttcgaaacagcaaaaagaatgtaaatattgtatctctaatcgtggagatgatgatagtttaagcattaatctatttattccgactattaacaagtctatatatattattatcggtttacggatgaaaaatttttggaagcctaaattcgaaatagaataatgtttttatattatacatgtgctaaaagaatgatcgatacagtttaagtgaaagctagagaggggtttttaaatggtcatcggtttagtcatattcgtgtctgtaagctttcactaattccaaacccacccgctttttatagtaagtttttcacccataaataataaatacaataattaatttctcgtaaaagtagaaaatatattctaatttattgcacggtaaggaagtagatcataactcgagatgtccagactggacaagagcaaagtcatcaactctgccttggagctcctgaatgaagttggcattgagggcttgaccaccaggaagctggcccagaagctgggtgtggagcagcctaccctgtactggcatgtgaagaacaagagggctctgcttgatgccctggccattgagatgttggacaggcaccacacccacttctgccctctggaaggggagtcctggcaggacttcctgaggaacaatgccaagagcttcagatgtgccttgctctcccaccgggatggtgccaaagttcacttgggcaccaggcctacagagaagcagtatgagaccctggagaaccagctggcattcctgtgccaacaaggcttctccctggaaaatgccttgtatgccctctctgctgtgggccacttcaccttgggctgtgtgctggaggaccaggagcaccaagttgccaaggaggagagggagacccccaccactgactccatgccaccactgctgcggcaagctattgagttgtttgaccaccaaggggctgagcctgcattcctttttggcctggaactgatcatctgtggcctggaaaagcagctgaaatgtgagtctggctcttgaggatcctgcggccgccatcgtcggtgtgttgtctaacgtattggacatgtttatgtacgtagaagaaaataatgaagaggatgctagaatcaaggaggagcaagaactactgttgctatattaatacataattgaaaatctaccaacttaaatacaccgcctataaatttacaatgaaacacagattgtattctgaaggattgagtattagtaatgatttaaactcgataatcggtcaacaatctacaatggatacggatatagaaatagacgaagatgacatcatggaacttcttaatatattgactgagttaggttgtgatgtcgactttgatgaaaattttagcgatatagccgatgatattctagaatcgttgatagaacaggatgtataagtttttatgttaactaaatgtggccatttgcatcggtacctgcgggagcaaaatgtaggctggtagaaacactaccagaaaatatggattttagatccgatcatttaacaacatttgaatgttttaacgaaattatcactctagctaagaaatatatatacatagcatctttttgttgtaatcctctgaattctagaaaagtagaaaatatattctaatttattgcacgggatgagcgaaaaatacatcgtcacctgggacatgttgcagatccatgcacgtaaactcgcaagccgactgatgccttctgaacaatggaaaggcattattgccgtaagccgtggcggtctggtaccgggtgcgttactggcgcgtgaactgggtattcgtcatgtcgataccgtttgtatttccagctacgatcacgacaaccagcgcgagcttaaagtgctgaaacgcgcagaaggcgatggcgaaggcttcatcgttattgatgacctggtggataccggtggtactgcggttgcgattcgtgaaatgtatccaaaagcgcactttgtcaccatcttcgcaaaaccggctggtcgtccgctggttgatgactatgttgttgatatcccgcaagatacctggattgaacagccgtgggatatgggcgtcgtattcgtcccgccaatctccggtcgctaaggatcagcttggcgtaatcatggtcatagctgtttcctgtgtgaaattgttatccgctcacaattccacacaacatacgagccggaagcataaagtgtaaagcctggggtgcctaatgagtgagctaactcacattaattgcgttgcgctcactgcccgctttccagtcgggaaacctgtcgtgccagctgcattaatgaatcggccaacgcgcggggagaggcggtttgcgtattgggcgctcttccgcttcctcgctcactgactcgctgcgctcggtcgttcggctgcggcgagcggtatcagctcactcaaaggcggtaatacggttatccacagaatcaggggataacgcaggaaagaacatgtgagcaaaaggccagcaaaaggccaggaaccgtaaaaaggccgcgttgctggcgtttttccataggctccgcccccctgacgagcatcacaaaaatcgacgctcaagtcagaggtggcgaaacccgacaggactataaagataccaggcgtttccccctggaagctccctcgtgcgctctcctgttccgaccctgccgcttaccggatacctgtccgcctttctcccttcgggaagcgtggcgctttctcatagctcacgctgtaggtatctcagttcggtgtaggtcgttcgctccaagctgggctgtgtgcacgaaccccccgttcagcccgaccgctgcgccttatccggtaactatcgtcttgagtccaacccggtaagacacgacttatcgccactggcagcagccactggtaacaggattagcagagcgaggtatgtaggcggtgctacagagttcttgaagtggtggcctaactacggctacactagaaggacagtatttggtatctgcgctctgctgaagccagttaccttcggaaaaagagttggtagctcttgatccggcaaacaaaccaccgctggtagcggtggtttttttgtttgcaagcagcagattacgcgcagaaaaaaaggatctcaagaagatcctttgatcttttctacggggtctgacgctcagtggaacgaaaactcacgttaagggattttggtcatgagattatcaaaaaggatcttcacctagatccttttaaattaaaaatgaagttttaaatcaatctaaagtatatatgagtaaacttggtctgacagttaccaatgcttaatcagtgaggcacctatctcagcgatctgtctatttcgttcatccatagttgcctgactccccgtcgtgtagataactacgatacgggagggcttaccatctggccccagtgctgcaatgataccgcgagacccacgctcaccggctccagatttatcagcaataaaccagccagccggaagggccgagcgcagaagtggtcctgcaactttatccgcctccatccagtctattaattgttgccgggaagctagagtaagtagttcgccagttaatagtttgcgcaacgttgttgccattgctacaggcatcgtggtgtcacgctcgtcgtttggtatggcttcattcagctccggttcccaacgatcaaggcgagttacatgatcccccatgttgtgcaaaaaagcggttagctccttcggtcctccgatcgttgtcagaagtaagttggccgcagtgttatcactcatggttatggcagcactgcataattctcttactgtcatgccatccgtaagatgcttttctgtgactggtgagtactcaaccaagtcattctgagaatagtgtatgcggcgaccgagttgctcttgcccggcgtcaatacgggataataccgcgccacatagcagaactttaaaagtgctcatcattggaaaacgttcttcggggcgaaaactctcaaggatcttaccgctgttgagatccagttcgatgtaacccactcgtgcacccaactgatcttcagcatcttttactttcaccagcgtttctgggtgagcaaaaacaggaaggcaaaatgccgcaaaaaagggaataagggcgacacggaaatgttgaatactcatactcttcctttttcaatattattgaagcatttatcagggttattgtctcatgagcggatacatatttgaatgtatttagaaaaataaacaaataggggttccgcgcacatttccccgaaaagtgccacct

SEQ ID NO: 78 - DNA, 1665 bp, Artificial Sequence
  Ruc-GFP cDNA
atgacttcgaaagtttatgatccagaacaaaggaaacggatgataactggtccgcagtggtgggccagatgtaaacaaatgaatgttcttgattcatttattaattattatgattcagaaaaacatgcagaaaatgctgttatttttttacatggtaacgcggcctcttcttatttatggcgacatgttgtgccacatattgagccagtagcgcggtgtattataccagatcttattggtatgggcaaatcaggcaaatctggtaatggttcttataggttacttgatcattacaaatatcttactgcatggtttgaacttcttaatttaccaaagaagatcatttttgtcggccatgattggggtgcttgtttggcatttcattatagctatgagcatcaagataagatcaaagcaatagttcacgctgaaagtgtagtagatgtgattgaatcatgggatgaatggcctgatattgaagaagatattgcgttgatcaaatctgaagaaggagaaaaaatggttttggagaataacttcttcgtggaaaccatgttgccatcaaaaatcatgagaaagttagaaccagaagaatttgcagcatatcttgaaccattcaaagagaaaggtgaagttcgtcgtccaacattatcatggcctcgtgaaatcccgttagtaaaaggtggtaaacctgacgttgtacaaattgttaggaattataatgcttatctacgtgcaagtgatgatttaccaaaaatgtttattgaatcggatccaggattcttttccaatgctattgttgaaggcgccaagaagtttcctaatactgaatttgtcaaagtaaaaggtcttcatttttcgcaagaagatgcacctgatgaaatgggaaaatatatcaaatcgttcgttgagcgagttctcaaaaatgaacaagcggccgccgccaccatgagcaagggcgaggaactgttcactggcgtggtcccaattctcgtggaactggatggcgatgtgaatgggcacaaattttctgtcagcggagagggtgaaggtgatgccacatacggaaagctcaccctgaaattcatctgcaccactggaaagctccctgtgccatggccaacactggtcactaccttcacctatggcgtgcagtgcttttccagatacccagaccatatgaagcagcatgactttttcaagagcgccatgcccgagggctatgtgcaggagagaaccatctttttcaaagatgacgggaactacaagacccgcgctgaagtcaagttcgaaggtgacaccctggtgaatagaatcgagctgaagggcattgactttaaggaggatggaaacattctcggccacaagctggaatacaactataactcccacaatgtgtacatcatggccgacaagcaaaagaatggcatcaaggtcaacttcaagatcagacacaacattgaggatggatccgtgcagctggccgaccattatcaacagaacactccaatcggcgacggccctgtgctcctcccagacaaccattacctgtccacccagtctgccctgtctaaagatcccaacgaaaagagagaccacatggtcctgctggagtttgtgaccgctgctgggatcacacatggcatggacgagctgtacaagtga

SEQ ID NO: 79 - protein, 554 aa, Artificial Sequence
  Ruc-GFP protein
MTSKVYDPEQRKRMITGPQWWARCKQMNVLDSFINYYDSEKHAENAVIFLHGNAASSYLWRHVVPHIEPVARCIIPDLIGMGKSGKSGNGSYRLLDHYKYLTAWFELLNLPKKIIFVGHDWGACLAFHYSYEHQDKIKAIVHAESVVDVIESWDEWPDIEEDIALIKSEEGEKMVLENNFFVETMLPSKIMRKLEPEEFAAYLEPFKEKGEVRRPTLSWPREIPLVKGGKPDVVQIVRNYNAYLRASDDLPKMFIESDPGFFSNAIVEGAKKFPNTEFVKVKGLHFSQEDAPDEMGKYIKSFVERVLKNEQAAAATMSKGEELFTGVVPILVELDGDVNGHKFSVSGEGEGDATYGKLTLKFICTTGKLPVPWPTLVTTFTYGVQCFSRYPDHMKQHDFFKSAMPEGYVQERTIFFKDDGNYKTRAEVKFEGDTLVNRIELKGIDFKEDGNILGHKLEYNYNSHNVYIMADKQKNGIKVNFKIRHNIEDGSVQLADHYQQNTPIGDGPVLLPDNHYLSTQSALSKDPNEKRDHMVLLEFVTAAGITHGMDELYK

SEQ ID NO: 80 - DNA, 1590 bp, Homo sapiens
  Human Tyrosinase DNA AAB37227
atgctcctggctgttttgtactgcctgctgtggagtttccagacctccgctggccatttccctagagcctgtgtctcctctaagaacctgatggagaaggaatgctgtccaccgtggagcggggacaggagtccctgtggccagctttcaggcagaggttcctgtcagaatatccttctgtccaatgcaccacttgggcctcaatttcccttcacaggggtggatgaccgggagtcgtggccttccgtcttttataataggacctgccagtgctctggcaacttcatgggattcaactgtggaaactgcaagtttggcttttggggaccaaactgcacagagagacgactcttggtgagaagaaacatcttcgatttgagtgccccagagaaggacaaattttttgcctacctcactttagcaaagcataccatcagctcagactatgtcatccccatagggacctatggccaaatgaaaaatggatcaacacccatgtttaacgacatcaatatttatgacctctttgtctggatgcattattatgtgtcaatggatgcactgcttgggggatctgaaatctggagagacattgattttgcccatgaagcaccagcttttctgccttggcatagactcttcttgttgcggtgggaacaagaaatccagaagctgacaggagatgaaaacttcactattccatattgggactggcgggatgcagaaaagtgtgacatttgcacagatgagtacatgggaggtcagcaccccacaaatcctaacttactcagcccagcatcattcttctcctcttggcagattgtctgtagccgattggaggagtacaacagccatcagtctttatgcaatggaacgcccgagggacctttacggcgtaatcctggaaaccatgacaaatccagaaccccaaggctcccctcttcagctgatgtagaattttgcctgagtttgacccaatatgaatctggttccatggataaagctgccaatttcagctttagaaatacactggaaggatttgctagtccacttactgggatagcggatgcctctcaaagcagcatgcacaatgccttgcacatctatatgaatggaacaatgtcccaggtacagggatctgccaacgatcctatcttccttcttcaccatgcatttgttgacagtatttttgagcagtggctccgaaggcaccgtcctcttcaagaagtttatccagaagccaatgcacccattggacataaccgggaatcctacatggttccttttataccactgtacagaaatggtgatttctttatttcatccaaagatctgggctatgactatagctatctacaagattcagacccagactcttttcaagactacattaagtcctatttggaacaagcgagtcggatctggtcatggctccttggggcggcgatggtaggggccgtcctcactgccctgctggcagggcttgtgagcttgctgtgtcgtcacaagagaaagcagcttcctgaagaaaagcagccactcctcatggagaaagaggattaccacagcttgtatcagagccatttataa

SEQ ID NO: 81 - protein, 529 aa, Homo sapiens [sequence omitted]

SEQ ID NO: 82 - protein, 511 aa, Homo sapiens
  Mature Human Tyrosinase Protein NP_000363
HFPRACVSSKNLMEKECCPPWSGDRSPCGQLSGRGSCQNILLSNAPLGPQFPFTGVDDRESWPSVFYNRTCQCSGNFMGFNCGNCKFGFWGPNCTERRLLVRRNIFDLSAPEKDKFFAYLTLAKHTISSDYVIPIGTYGQMKNGSTPMFNDINIYDLFVWMHYYVSMDALLGGSEIWRDIDFAHEAPAFLPWHRLFLLRWEQEIQKLTGDENFTIPYWDWRDAEKCDICTDEYMGGQHPTNPNLLSPASFFSSWQIVCSRLEEYNSHQSLCNGTPEGPLRRNPGNHDKSRTPRLPSSADVEFCLSLTQYESGSMDKAANFSFRNTLEGFASPLTGIADASQSSMHNALHIYMNGTMSQVQGSANDPIFLLHHAFVDSIFEQWLRRHRPLQEVYPEANAPIGHNRESYMVPFIPLYRNGDFFISSKDLGYDYSYLQDSDPDSFQDYIKSYLEQASRIWSWLLGAAMVGAVLTALLAGLVSLLCRHKRKQLPEEKQPLLMEKEDYHSLYQSHL

SEQ ID NO: 83 - DNA, 1602 bp, Mus musculus
  Mouse Tyrosinase DNA AAA40516.1
atgttcttggctgttttgtattgccttctgtggagtttccagatctctgatggccattttcctcgagcctgtgcctcctctaagaacttgttggcaaaagaatgctgcccaccatggatgggtgatgggagtccctgcggccagctttcaggcagaggttcctgccaggatatccttctgtccagtgcaccatctggacctcagttccccttcaaaggggtggatgaccgtgagtcctggccctctgtgttttataataggacctgccagtgctcaggcaacttcatgggtttcaactgcggaaactctaagtttggatttgggggcccaaattgtacagagaagcgagtcttgattagaagaaacatttttgatttgagtgtctccgaaaagaataagttcttttcttacctcactttagcaaaacatactatcagctcagtctatgtcatccccacaggcacctatggccaaatgaacaatgggtcaacacccatgtttaatgatatcaacatctacgacctctttgtatggatgcattactatgtgtcaagggacacactgcttgggggctctgaaatatggagggacattgattttgcccatgaagcaccagggtttctgccttggcacagacttttcttgttattgtgggaacaagaaattcgagaactaactggggatgagaacttcactgttccatactgggattggagagatgcagaaaactgtgacatttgcacagatgagtacttgggaggtcgtcaccctgaaaatcctaacttactcagcccagcatccttcttctcctcctggcagatcatttgtagcagatcagaagagtataatagccatcaggttttatgcgatggaacacctgagggaccactattacgtaatcctggaaaccatgacaaagccaaaacccccaggctcccatcttcagcagatgtggaattttgtctgagtttgacccagtatgaatctggatcaatggatagaactgccaatttcagctttagaaacacactggaagtatttgccagtccactcacagggatagcagatccttctcaaagtagcatgcacaatgccttacatatctttatgaatggaacaatgtcccaagtacagggatcggccaacgatcccatttttcttcttcaccatgcttttgtggacagtatttttgaacaatggctgcgaaggcaccgccctcttttggaagtttacccagaagccaatgcacctatcggccataacagagactcttacatggttcctttcataccgctctatagaaatggtgatttcttcataacatccaaggatctgggatatgactacagctacctccaagagtcagatccaggcttttacagaaattatattgagccttacttggaacaagccagtcgtatctggccatggcttcttggggcagcactggtgggagctgttattgctgcagctctctctgggcttagcagtaggctatgtcttcagaagaagaagaagaagaagcaaccccaggaggaaaggcagccactcctcatggacaaagacgactaccacagcttgctgtatcagagccatctgtga

SEQ ID NO: 84 - protein, 515 aa, Mus musculus
  Mature mouse tyrosinase protein
HFPRACASSKNLLAKECCPPWMGDGSPCGQLSGRGSCQDILLSSAPSGPQFPFKGVDDRESWPSVFYNRTCQCSGNFMGFNCGNCKFGFGGPNCTEKRVLIRRNIFDLSVSEKNKFFSYLTLAKHTISSVYVIPTGTYGQMNNGSTPMFNDINIYDLFVWMHYYVSRDTLLGGSEIWRDIDFAHEAPGFLPWHRLFLLLWEQEIRELTGDENFTVPYWDWRDAENCDICTDEYLGGRHPENPNLLSPASFFSSWQIICSRSEEYNSHQVLCDGTPEGPLLRNPGNHDKAKTPRLPSSADVEFCLSLTQYESGSMDRTANFSFRNTLEGFASPLTGIADPSQSSMHNALHIFMNGTMSQVQGSANDPIFLLHHAFVDSIFEQWLRRHRPLLEVYPEANAPIGHNRDSYMVPFIPLYRNGDFFITSKDLGYDYSYLQESDPGFYRNYIEPYLEQASRIWPWLLGAALVGAVIAAALSGLSSRLCLQKKKKKKQPQEERQPLLMDKDDYHSLLYQSHL

SEQ ID NO: 85 - protein, 529 aa, Gorilla gorilla
  gorilla tyrosinase protein precursor Q9BDE0
  SIGNAL (1)...(18): signal sequence
MLLAVLYCLLWSFQTSAGHFPRACVSSKNLMEKECCPPWSGDRSPCGQLSGRGSCQNILLSNAPLGPQFPFTGVDDRESWPSVFYNRTCQCSGNFMGFNCGNCKFGFWGPNCTERRLLVRRNIFDLSAPEKDKFFAYLTLAKHTISSDYVIPIGTYGQMKNGSTPMFNDINIYDLFVWMHYYVSMDALLGGSEIWRDIDFAHEAPAFLPWHRLFLLRWEQEIQKLTGDENFTIPYWDWRDAEKCDICTDEYMGGQHPTNPNLLSPASFFSSWQIVCSRLEEYNSHQSLCNGTPEGPLQRNPGNHDKSRTPRLPSSADVEFCLSLTQYESGSMDKAANFSFRNTLEGFASPLTGIADASQSSMHNALHIYMNGTMSQVQGSANDPIFLLHHAFVDSIFEQWLRRHRPLQEVYPEANAPIGHNRESYMVPFIPLYRNGDFFISSKDLGYDYSYLQDSDPDSFQDYIKSYLEQASRIWSWLLGAAMVGAVLTALLAGLVSLLCRHKRKQLPEEKQPLLMEKEDYHSLYQSHL

SEQ ID NO: 86 - DNA, 1590 bp, Gorilla gorilla
atgctcctggctgttttgtactgcctgctgtggagtttccagacctccgctggccatttccctagagcctgtgtctcctctaagaacctgatggagaaggaatgctgtccaccgtggagcggggacaggagtccctgtggccagctttcaggcagaggttcctgtcagaatatccttctgtccaatgcaccacttgggcctcaatttcccttcacaggggtggatgaccgggagtcgtggccttccgtcttttataataggacctgccagtgctctggcaacttcatgggattcaactgtggaaactgcaagtttggcttttggggaccaaactgcacagagagacgactcttggtgagaagaaacatcttcgatttgagtgccccagagaaggacaaattttttgcctacctcactttagcaaagcataccatcagctcagactacgtcatccccatagggacctatggccaaatgaaaaatggatcaacacccatgtttaacgacatcaatatttatgacctctttgtctggatgcattattatgtgtcaatggatgcactgcttgggggatctgaaatctggagagacattgattttgcccatgaagcaccagcttttctgccytggcatagactcttcttgttgcggtgggaacaagaaatccagaagctgacaggagatgaaaacttcactattccatattgggactggcgggatgcagaaaagtgtgacatttgcacagatgagtacatgggaggtcagcaccccacaaatcctaacttactcagcccagcatcattcttctcctcttggcagattgtctgtagccgattggaggagtacaacagccatcagtctttatgcaatggaacgcccgagggacctttrcagcgtaatcctggaaaccatgacaaatccagaaccccaaggctcccctcttcagctgatgtagaattttgcctgagtttgacccaatatgaatctggttccatggataaagctgccaatttcagctttagaaatacactggaaggatttgctagtccacttactgggatagcagatgcctctcaaagcagcatgcacaatgccttgcacatctatatgaatggaacaatgtcccaggtacagggatctgccaacgatcccatcttccttcttcaccatgcatttgttgacagtatttttgagcagtggctccgaaggcaccgtcctcttcaagaagtttatccrgaagccaatgcacccattggacataaccgggaatcctacatggttccttttataccactgtacagaaayrgtgatttctttatttcatccaaagatctgggctatgactatagctatctacaagattcagacccagactcttttcaagactacattaagtcctatttggaacaagcaagtcggatctggtcatggctccttggggcggcsatggtaggggccgtcctcactgccctgctggcagggcttgtgagcttgctgtgtcgtcacaagagaaagcagcttcctgaagaaaagcagccactcctcatggagaaagaggattaccacagyttgtatcagagccatttataa

SEQ ID NO: 87 - protein, 529 aa, Pan troglodytes
  chimpanzee tyrosinase protein precursor H2Q4J1
  SIGNAL (1)...(18): signal sequence
MLLAALYCLLWSFQTSTGHFPRACVSSKNLMEKECCPPWSGDRSPCGQLSGRGSCQNILLSNAPLGPQFPFTGVDDRESWPSVFYNRTCQCSGNFMGFNCGNCKFGFWGPNCTERRLLVRRNIFDLSAPEKDKFFAYLTLAKHTISSDYVIPIGTYGQMKNGSTPMFNDINIYDLFVWMHYYVSMDALLGGSEIWRDIDFAHEAPAFLPWHRLFLLRWEQEIQKLTGDENFTIPYWDWRDAEKCDICTDEYMGGQHPTNPNLLSPASFFSSWQIVCSRLEEYNSHQSLCNGTPEGPLRRNPGNHDKSRTPRLPSSADVEFCLSLTQYESGSMDKAANFSFRNTLEGFASPLTGIADASQSSMHNALHIYMNGTMSQVQGSANDPIFLLHHAFVDSIFEQWLRRHRPLQEVYPEANAPIGHNRESYMVPFIPLYRNGDFFISSKDLGYDYSYLQDSDPDSFQDYIKSYLEQASRIWSWLLGAAMVGAVLTALLAGLVSLLCRHKRKQLPEEKQPLLMEKEDYHSLYQSHL

SEQ ID NO: 88 - DNA, 1590 bp, Pan troglodytes
  chimpanzee tyrosinase DNA
atgctcctggctgctttgtactgcctgctgtggagtttccagacctccactggccatttccctcgagcctgtgtctcctctaagaacctgatggagaaggaatgctgtccaccgtggagcggggacaggagtccctgtggccagctttcaggcagaggttcctgtcagaatatccttctgtccaatgcaccgcttgggcctcaatttcccttcacaggggtggatgaccgggagtcgtggccttccgtcttttataataggacctgccagtgctctggcaacttcatgggattcaactgtggaaactgcaagtttggcttttggggaccaaactgcacagagagacgactcttggtgagaagaaacatcttcgatttgagtgccccagagaaggacaaattttttgcctacctcactttagcaaagcataccatcagctcagactatgtcatccccatagggacctatggccaaatgaaaaatggatcaacacccatgtttaacgacatcaatatttatgacctctttgtctggatgcattattatgtgtcaatggatgcactgcttgggggatctgaaatctggagagacattgattttgcccatgaagcaccagcttttctgccttggcatagactcttcttgttgcggtgggaacaagaaatccagaagctgacaggagatgaaaacttcactattccatattgggactggcgggatgcagaaaagtgtgacatttgcacagatgagtacatgggaggtcagcaccccacaaatcctaacttactcagcccagcatcattcttctcctcttggcagattgtctgtagccgattggaggagtacaacagccatcagtctttatgcaatggaacgcccgagggacctttacggcgtaatcctggaaaccatgacaaatccagaaccccaaggctcccctcttcagctgatgtagaattttgcctgagtttgacccaatatgaatctggttccatggataaagctgccaatttcagctttagaaatacactggaaggatttgctagtccacttactgggatagcggatgcctctcaaagcagcatgcacaatgccttgcacatctatatgaatggaacaatgtcccaggtacagggatctgccaacgatcccatcttccttcttcaccatgcatttgttgacagtatttttgagcagtggctccgaaggcaccgtcctcttcaagaagtttatccagaagccaatgcacccattggacataaccgggaatcctacatggttccttttataccactgtacagaaatggtgatttctttatttcatccaaagatctgggctatgactatagctatctacaagattcagacccagactcttttcaagactacattaagtcctatttggaacaagcaagtcggatctggtcatggctccttggggcggcgatggtaggggccgtcctcactgccctgctggcagggcttgtgagcttgctgtgtcgtcacaagagaaagcagcttcctgaagaaaagcagccactcctcatggagaaagaggattaccacagcttgtatcagagccatttataa

SEQ ID NO: 89 - protein, 529 aa, Pongo abelii
  orangutan tyrosinase protein precursor H2NEX0
  SIGNAL (1)...(18): signal sequence
MLLAVLYCLLWSFQTSAGHFPRACVSSKNLMEKECCPPWNGDRSPCGQLSGRGSCQNILLSNAPLGPQFPFTGVDDRESWPSVFYNRTCQCSGNFMGFNCGNCKFGFWGPNCTERRLLVRRNIFDLSAPEKDKFFAYLTLAKHTISSDYVIPIGTYGQMKNGSTPMFNDINIYDLFVWMHYYVSMDALLGGSEIWRDIDFAHEAPAFLPWHRLFLLRLEQEIQMLTGDENFTIPYWDWRDAEKCDICTDEYMGGQHPTNPNLLSPASFFSSWQIVCSRLEEYNSHQSLCNGTPEGPLRRNPGNHDKSRTPRLPSSADVEFCLSLTQYESGSMDKAANFSFRNTLEGFASPLTGIADASQSSMHNALHIYMNGTMSQVQGSANDPIFLLHHAFVDSIFEQWLRRHRPLQEVYPEANAPIGHNRESYMVPFIPLYRNGDFFISSKDLGYDYRYLQDSDPDSFQDYIKSYLEQASRIWSWLLGAAMVGAVLTALLSGLVSLLCRHKRKQLPEEKQPLLLEKEDYHSLYQSHL

SEQ ID NO: 90 - DNA, 1590 bp, Pongo abelii
  orangutan tyrosinase DNA
atgctcctggctgttttgtactgcctgctgtggagtttccagacctccgctggccatttccctcgagcctgtgtctcctctaagaacctgatggagaaggaatgctgcccaccatggaacggggacaggagtccctgtggccagctttcaggcagaggttcctgtcagaatatccttctgtccaatgcaccacttgggcctcaatttcccttcacaggggtggatgaccgggagtcgtggccttccgtcttttataataggacctgccagtgctctggcaacttcatgggattcaactgtggaaactgcaagtttggcttttggggaccaaactgcacagagagacgactcttggtgagaagaaacatctttgatttgagtgccccagagaaggacaaattttttgcctacctcactttagcaaagcataccatcagctcagactatgtcatccccatagggacctacggccaaatgaaaaatggatcaacacccatgtttaacgacatcaatatttatgacctctttgtctggatgcattattatgtgtcaatggatgcactgcttgggggatctgaaatctggagagacattgattttgcccatgaagcaccagcttttctgccttggcatagactcttcttgttgcggttggaacaagaaatccagatgctgacaggagatgaaaacttcactattccatattgggactggcgggatgcagaaaagtgtgacatttgcacagatgagtacatgggaggtcagcaccccacaaatcctaacttactcagcccagcatcattcttctcctcttggcagattgtctgtagccgattggaggagtacaacagccatcaatctttatgcaatggaacgcccgagggacctttacggcgtaatcctggaaaccatgacaaatccagaaccccaaggctcccctcttcagctgacgtagaattttgcctcagtttgacccaatatgaatctggttccatggataaagctgccaatttcagctttagaaatacactggaaggatttgctagtccacttactgggatagcagatgcctctcaaagcagcatgcacaatgccttgcacatctatatgaatggaacaatgtcccaggtacagggatctgccaacgatcccatcttccttcttcaccatgcatttgttgacagtatttttgagcagtggctccgaaggcaccgtcctcttcaagaagtttatccggaagccaatgcacccattggacataaccgggaatcctatatggttccttttataccactgtacagaaatggtgatttctttatttcatccaaagatctgggctatgactatagatatctacaagattcagacccagactcctttcaagactacattaagtcctatttggaacaagccagtcggatctggtcatggctccttggggcggcgatggtaggggccgtcctcactgccctgctgtcagggcttgtgagcttgctgtgtcgtcacaagagaaagcagcttcctgaagaaaagcagccactcctcctggagaaagaggattaccacagcttgtatcagagccatttgtaa

SEQ ID NO: 91 - protein, 530 aa, Nomascus leucogenys
  gibbon tyrosinase protein precursor G1S1X1
  SIGNAL (1)...(18): signal sequence
MLLAVLYCLLWSFQTSTGHFPRACVSSKNLMEKECCPPWSGDRSPCGQLSGRGSCQNILLSNAPLGPQFPFTGVDDRESWPSVFYNRTCQCSGNFMGFNCGNCKFGFWGPNCTERRLLVRRNIFDLSAPEKDKFFAYLTLAKHTISSDYVIPIGTYGQMKNGSTPMFNDINIYDLFVWMHYYVSMDALLGGSEIWRDIDFAHEAPAFLPWHRLFLLRWEQEIQKLTGDENFTIPYWDWRDAEKCDICTDEYMGGQHPANPTLLSPASFFSSWQIVCSRLEEYNSHQSLCNGMPEGPLRRNPGNHDKSRTPRLPSSADVEFCLSLTQYESGSMDKAANFSFRNTLEGFASPLTGIADASQSSMHNALHIYMNGTMSQVQGSANDPIFLLHHAFVDSIFEQWLRRHRPLQEVYPEANAPIGHNRESYMVPFIPLYRNGDFFISSKDLGYDYSYLQDSDPDSFQDYIKSYLEQASRIWSWLLGAAMVGAALTALLAVLVSLLCRHKRKQLPEEKQPLLMEKDDYHSLLYQSHL

SEQ ID NO: 92 - DNA, 1593 bp, Nomascus leucogenys
  gibbon tyrosinase DNA
atgctcctggctgttttgtactgcctgctgtggagtttccagacctccactggccatttccctcgagcctgtgtctcctcgaagaacctgatggagaaggaatgctgcccaccgtggagcggggacaggagtccctgtggccagctttcaggcagaggttcctgtcagaatatccttctgtccaatgcaccacttgggcctcaatttcccttcacaggggtggatgaccgcgagtcgtggccttccgtcttttataacaggacctgccagtgctctggcaacttcatgggattcaactgtggaaactgcaagtttggcttttggggaccaaactgcacagagagacgactcttggtgagaagaaatatctttgatttgagtgccccagagaaggacaaattttttgcctatctcactttagcaaagcataccatcagctcagactatgtcatccccatagggacctatggccaaatgaaaaacggatcaacacccatgtttaacgacatcaatatttatgacctctttgtctggatgcattattatgtgtcaatggatgcactgcttggaggatctgaaatctggagagacattgattttgcccatgaagcaccagcttttctgccttggcatagactgttcttgttgcggtgggaacaagaaatccagaagctgacaggagatgaaaacttcactattccatattgggactggcgggatgcagaaaagtgtgacatttgcacagatgagtacatgggaggtcagcaccctgcaaatcctactttactcagcccagcatcattcttctcctcttggcagattgtctgtagccgattggaggagtacaacagccatcagtctttatgcaatggaatgcctgagggacctttacggcgtaatcctggaaaccatgacaaatccagaaccccaaggctcccctcttcagctgacgtagaattttgcctgagtttgacccaatatgaatctggttccatggataaagctgccaatttcagctttagaaatacactggaaggatttgctagtccacttactgggatagcagatgcctctcaaagcagcatgcacaatgccttgcacatctatatgaatggaacaatgtcccaggtacagggatctgctaacgatcccatcttccttcttcaccatgcatttgttgacagtatttttgagcagtggctccgaaggcaccgtcctcttcaagaagtttatccagaagccaatgcacccattggacataaccgggaatcctacatggttccttttataccactgtacagaaacggtgatttctttatttcatccaaagatctgggctatgactatagctatctacaagattcagacccagactctttccaagactacattaagtcctatttggaacaagccagtcggatctggtcatggctccttggggcggcgatggtaggggccgccctcactgccctgctggcagtgcttgtgagcttgctgtgtcgtcacaagagaaagcagcttcctgaagaaaagcagccactcctcatggagaaagacgattaccacagcttgttgtatcagagccatttgtaa

SEQ ID NO: 93 - protein, 530 aa, Macaca fascicularis
  cynomolgus monkey tyrosinase protein precursor G7PNE9
  SIGNAL (1)...(18): signal sequence
MILAVLYCLLWSFQTSAGHFPRACVSSKNLMEKECCPPWSGDGSPCGQLSGRGSCQNILLSNAPLGPQFPFTGVDDRESWPSIFYNRTCQCSGNFTGFDCGNCKFGFWGPNCTDRRLLVRRNIFDLSAPEKDKFFAYLTLAKHTISSDYVIPIGTYGQMKNGSTPMFSDINIYDLFVWIHYYVSMDALLGGSEIWRDIDFAHEAPAFLPWHRLFLLRWEQEIQKLTGDENFTIPYWDWRDAEKCDICTDEYMGGQHPANPNLLSPASFFSSWQIICSRLEEYNSHQSLCNGMPEGPLRRNPGNHDKSRTPRLPSSADVEFCLSLTQYESGSMDKAANFSFRNTLEGFASPLTGIADASQSSMHNALHIYMNGTMSQVQGSANDPIFLLHHAFVDSIFEQWLRRHHPLQEVYPEANAPIGHNRESYMVPFIPLYRNGDFFISSKDLGYDYSYLQDSGSDSFQDYIKSYLEQAGRIWSWLLGAAMVGAALTALLAGLVSLLCGHKRKQLAEERQPLLMEKEDYHNLLYQSHL

SEQ ID NO: 94 - DNA, 1593 bp, Macaca fascicularis
  cynomolgus monkey tyrosinase DNA EH56644
atgatcctggctgttttgtactgcctgctgtggagtttccagacctccgctggccatttccctcgagcctgtgtctcctctaagaacctgatggaaaaggaatgctgcccaccatggagtggggacgggagtccctgtggccaactttcaggcagaggttcctgtcagaatatccttctgtccaatgcaccacttgggcctcaatttcccttcacaggggtggatgaccgggagtcgtggccttccatcttttataataggacctgccagtgctctggcaacttcacgggattcgactgtggaaactgcaagtttggcttttggggaccaaactgcacagacagacgactcttggtgagaagaaacatctttgatttgagtgccccagagaaggacaaattttttgcctacctcactttagcaaagcataccatcagctcagactatgtcatccccatagggacctacggccaaatgaaaaatgggtcaacacccatgtttagtgatatcaacatttatgacctctttgtctggatccattattatgtgtcaatggatgcactgcttgggggatctgaaatctggagagacattgattttgcccatgaagcaccagcttttctgccttggcatagactcttcttgttgcggtgggaacaagaaatccagaagctgacaggagatgaaaacttcactattccatattgggactggcgggatgcagaaaagtgtgacatttgcacagatgagtacatgggaggtcagcaccccgcaaatcctaacctactcagcccagcatcattcttctcctcttggcagattatctgtagccgattggaggagtacaacagccatcagtctttatgcaatggaatgcccgagggacctttacggcgcaatcctggaaaccatgacaaatccagaaccccaaggctcccctcttcagctgacgtagaattttgcctgagtttgacccagtatgaatctggttccatggataaagctgccaatttcagctttagaaatacactggaaggatttgctagtccacttactgggatagcagatgcctctcaaagcagcatgcacaatgccttgcacatctatatgaatggaacaatgtcccaggtccagggatctgccaacgatcccatcttccttcttcaccatgcatttgttgacagtatttttgagcagtggctccgaaggcaccatcctcttcaagaagtttatccagaagccaatgcacccattggacataaccgggaatcctacatggttccttttataccactgtacagaaacggtgatttctttatttcatccaaagatctgggctatgactatagctacctacaagattcaggctcagactcttttcaagactacattaagtcctatctggaacaagccggtcggatctggtcatggctccttggggcggcgatggtaggagccgccctcactgccctgctggcagggcttgtgagcttgctgtgtggtcacaagagaaagcagcttgctgaagaaaggcagccactcctcatggagaaagaggattaccacaacttgttgtatcagagccatttataa

SEQ ID NO: 95 - protein, 530 aa, Macaca mulatta; identical to SEQ ID NO: 93
  Rhesus macaque tyrosinase protein precursor F6TZA2
  SIGNAL (1)...(18): signal sequence

SEQ ID NO: 96 - DNA, 1593 bp, Macaca mulatta
  Rhesus macaque tyrosinase DNA EHH23312.1
atgatcctggctgttttgtactgcctgctgtggagtttccagacctccgctggccatttccctcgagcctgtgtctcctctaagaacctgatggaaaaggaatgctgcccaccatggagtggggacgggagtccctgtggccaactttcaggcagaggttcctgtcagaatatccttctgtccaatgcaccacttgggcctcaatttcccttcacaggggtggatgaccgggagtcgtggccttccatcttttataataggacctgccagtgctctggcaacttcacgggattcgactgtggaaactgcaagtttggcttttggggaccaaactgcacagacagacgactcttggtgagaagaaacatctttgatttgagtgccccagagaaggacaaattttttgcctacctcactttagcaaagcataccatcagctcagactatgtcatccccatagggacctacggccaaatgaaaaatgggtcaacacccatgtttagtgatatcaacatttatgacctctttgtctggatccattattatgtgtcaatggatgcactgcttgggggatctgaaatctggagagacattgattttgcccatgaagcaccagcttttctgccttggcatagactcttcttgttgcggtgggaacaagaaatccagaagctgacaggagatgaaaacttcactattccatattgggactggcgggatgcagaaaagtgtgacatttgcacagatgagtacatgggaggtcagcaccccgcaaatcctaacctactcagcccagcatcattcttctcctcttggcagattatctgtagccgattggaggagtacaacagccatcagtctttatgcaatggaatgcccgagggacctttacggcgcaatcctggaaaccatgacaaatccagaaccccaaggctcccctcttcagctgacgtagaattttgcctgagtttgacccagtatgaatctggttccatggataaagctgccaatttcagctttagaaatacactggaaggatttgctagtccacttactgggatagcagatgcctctcaaagcagcatgcacaatgccttgcacatctatatgaatggaacaatgtcccaggtccagggatctgccaacgatcccatcttccttcttcaccatgcatttgttgacagtatttttgagcagtggctccgaaggcaccatcctcttcaagaagtttatccagaagccaatgcacccattggacataaccgggaatcctacatggttccttttataccactgtacagaaacggtgatttctttatttcatccaaagatctgggctatgactatagctacctacaagattcaggctcagactcttttcaagactacattaagtcctatctggaacaagccggtcggatctggtcatggctccttggggcagcgatggtaggagccgccctcactgccctgctggcagggcttgtgagcttgctgtgtggtcacaagagaaagcagcttgctgaagaaaggcagccactcctcatggagaaagaggattaccacaacttgttgtatcagagccatttataa

SEQ ID NO: 97 - protein, 530 aa, Loxodonta africana
  elephant tyrosinase protein precursor G3TGJ7
  SIGNAL (1)...(18): signal sequence
MRLVVLYCLLWSFHTSAGHFPRACVSSKSMMEKECCPPWSGDGSPCGQLSGRGSCQDVLLSNAPLGPQFPFTGVDDRESWPSVFYNRTCQCSGNFMGFDCGNCRFGFWGPNCTERRLLVRRNIFDLSVPEKNKFLAYLTLAKHTTSADYVIPTGTYGQMNNGSRPMFRDINIYDLFVWMHYYVSRDTLLGGSEIWSDIDFAHEAPGFLPWHRLFLLQWEKEIQRLTGDENFTIPYWDWRDAEDCDICTDEYMGGHHPANPNLLSPASFFSSWQIVCSRMEEYNSRQALCDGTPEGPLLRNPGNHDKARTPRLPSSADVEFCLSLTQYESGSMNKAANFSFRNTLEGFASPLTGIADASQSSMHNALHIYMNGTMSQVQGSANDPIFLLHHAFVDSIFEQWLRRYHPLQEVYPEANAPIGHNRESYMVPFIPLYRNGDFFISSRELGYDYSYLRDSEPDSFQDYIKSYLEQASQIWQWLLGAAVVGAVLTAVLGRLASLLCRCRRKQLPEEKQPLLMEKDDYHSLLSQSHL

SEQ ID NO: 98 - DNA, 1593 bp, Loxodonta africana
  elephant tyrosinase DNA XM_003418555.1
atgcgcctggttgttttgtactgcctgctgtggagttttcatacttccgccggccatttccctcgagcctgtgtgtcttctaagagtatgatggagaaggaatgctgccctccgtggagtggggatgggagtccctgtggccagctttcaggcaggggttcctgtcaggacgtccttctgtccaatgcaccactcgggcctcaattccccttcacaggggtggatgaccgggagtcttggccttctgtcttttataacaggacctgccagtgctctggcaacttcatgggatttgactgtggaaattgtaggtttggcttttgggggccaaactgcacagagaggcgactgttagtaagaagaaacatctttgatttgagtgtcccagagaagaacaaattccttgcctacctcactttagcaaaacataccaccagtgcagactatgttatccccacaggcacctatggccaaatgaacaatggatcaagacccatgtttagagacatcaacatctatgacctctttgtctggatgcattattatgtgtccagagacacactgctcgggggatctgaaatctggagcgacattgattttgctcatgaagcaccaggcttcctgccttggcatagactcttcttgctgcagtgggaaaaagaaatccagaggctgacaggggatgagaacttcactattccgtactgggactggcgggatgcagaagactgtgacatttgcacagacgagtacatgggagggcaccacccagcaaaccctaacctactcagcccagcatccttcttctcttcttggcagatcgtctgcagccgaatggaggagtacaatagccgtcaggctttatgcgatggaacacctgagggacccttactgcgcaatcctggaaaccatgacaaagccaggaccccgaggctgccctcctcagctgatgtggaattttgcctgagtttgacccagtatgaatctggctccatgaataaagctgccaatttcagctttagaaatacactagaaggatttgctagtccacttactgggatagcagatgcctctcaaagcagtatgcacaatgctttgcacatctatatgaatggaacgatgtcccaggtgcaaggatctgccaatgaccccatctttcttcttcatcatgcatttgttgacagtatttttgaacagtggctccgaagataccatcctcttcaagaagtttatccagaagctaatgcacccattggacataaccgggaatcctacatggttccttttatacctctctacagaaatggtgatttctttatttcatccagagagctcggctatgactatagctacctacgggattcagaaccagactcctttcaagactacattaagtcctacttggaacaagccagtcagatctggcaatggctccttggggcggctgtggtaggggctgtcctcactgctgtgctggggagactcgccagcctgctgtgtcgttgcaggagaaagcagctccctgaagaaaagcagcccctcctcatggaaaaagatgattatcacagcttgttgtcacagagccatttataa

SEQ ID NO: 99 - protein, 530 aa, Oryctolagus cuniculus
  rabbit tyrosinase protein precursor Q9MYI7
  SIGNAL (1)...(18): signal sequence
MRLTVLYCLMWSFWTSAGHFPRACTSSKNLVEKECCPPWNGDGSPCGQLSGRGSCQDVLLSNAPLGPQFPFTGVDERESWPSVFYNRTCQCSGNFMGFNCGNCKFGFRGSNCTERRLLVRKNIFDLSVSEKDKFLAYLTLAKHTTSPDYVIPVGTYGQMNNGTTPMFSDINIYDLFVWMHYYVSRDTLLGGSEVWRDIDFAHEAPGFLPWHRLFLLLWEQEIQKLTGDENFTIPYWDWRDAESCDVCTDEYMGGRHPENPNLLSPASFFSSWQIICSRLEEYNSRQSLCNATSEGPLLRNPGNHDKARTPRLPSSSDVEFCLSLTQYESGSMDKAANFSFRNTLEGFANPLTGIADATQSSMHNALHMYMNGTMSQVQGSANDPIFLLHHAFVDSIFEQWLRRHRPLQEVYPAANAPIGHNRESYMVPFIPLYRNGDFFISSRDLGYDYSYLQDSDPDFFQGYIKPLLEQASRIWPWLVGAAVIGAVLTAALATLIGLLCRHKRKQLPEEKQPLLMEKEDYHSLLYQSHL

SEQ ID NO: 100 - DNA, 1593 bp, Oryctolagus cuniculus
  rabbit tyrosinase DNA AAF43895
atgcgtctgactgttttatactgcctgatgtggagtttctggacttctgctggccattttcctcgagcctgtacctcctccaagaacctggtggaaaaggaatgctgccctccatggaatggtgacgggagtccctgtggccagctctcaggcagaggctcctgtcaggacgtccttctgtctaacgccccccttgggcctcaattccccttcacaggggtggatgaacgggagtcttggccttctgtcttttacaatagaacctgccagtgctctggcaacttcatgggattcaactgtggaaactgcaagtttggctttcggggatcgaactgcacagaaaggcgactcttggtgaggaaaaacatcttcgatctgagtgtctcagaaaaggacaaattccttgcctacctcactttggcaaagcatactacgagcccagactatgtcatccctgtaggcacctatggccaaatgaataatgggacaacacccatgtttagtgacatcaatatttatgacctctttgtctggatgcattattatgtttccagagacacactgcttgggggatccgaagtctggagagacattgattttgcccatgaagcacccggtttcctgccttggcacagactcttcttgttgctgtgggaacaagaaatccagaagctgacaggggatgagaacttcactatcccatactgggactggagggatgcagaaagctgtgatgtttgtacagatgagtatatgggaggtcgccacccagaaaaccctaacctactcagcccagcatctttcttctcctcttggcagattatctgtagccggttggaggagtacaatagccgacagagcttatgtaatgcaacttccgagggacccttgctgcgcaatcctggaaaccatgacaaagccaggactccgaggctcccctcctcatcagatgtggaattttgcctaagtctgacccagtatgaatctggttccatggacaaagctgccaatttcagctttagaaatacactggaaggatttgctaatccacttactgggatagcagatgccactcaaagcagcatgcataatgctttgcatatgtatatgaatggaacgatgtcccaggtacagggatctgccaatgatcccatttttctccttcaccatgcgtttgttgacagtatttttgagcagtggctccgaaggcaccgtccacttcaagaagtttacccagcagccaatgcacccattgggcacaaccgggaatcctacatggttccttttatacctctctacagaaatggtgatttttttatttcctccagagatctgggctatgactacagctatttgcaagactcagacccagatttttttcaaggctatattaagcccttgttggaacaagccagtcggatctggccatggctcgttggagcagctgtaataggggctgtccttactgcagcgctggccacactcatcggcctgttgtgtcgtcacaagagaaagcagcttccagaagaaaagcagccactcctcatggaaaaggaggattatcacagtttgttgtatcagagccatctataa

SEQ ID NO: 101 - protein, 530 aa, Heterocephalus glaber
  naked mole-rat tyrosinase protein precursor G5BHC8
  SIGNAL (1)...(18): signal sequence
MLLFVLFCLLWNFQTSTSHFPRACTSFQNLIEKECCPPWSGDRSPCGQLSGRGSCQDILLSNAPFGPQFPFTGVDDRESWPSVFYNRTCQCSGNFMGFSCGNCKFGYWGPNCTEKRILVRRNIFDLSVPEKDKFLAYLTLAKHTISADYVIPTGTYGQMENGSTPMFNDVNIYDLFVWMHYYVSRDTLLGGSEIWRDIDFAHEAPGFLPWHRLFLLLWEEEIRKLTGDENFTIPYWDWRDAENCDICTDEYMGGRHSTNPNLLSPASFFSSWQIICSRLEEYNSRQALCDGTPEGPLLRNPGSHDKARTPRLPSSADVEFCLSLTQYESGSMDKAANFSFRNTLEGFASPVTGIADASQSSMHNALHIYMNGTMSQVQGSANDPIFLLHHAFVDSIFEQWLRRHRPLQDVYPEANAPLGHNRESYMVPFIPLYKNGDFFISSRDLGYEYSYLQDSDPGFFQNYIAPYLEQAHQIWPWLVGAALVGAALAVAVVALTNLLCHHKRKQLPEEKQPLLMEKEDYHSLLYQSHL

SEQ ID NO: 102 - DNA, 1593 bp, Heterocephalus glaber
  naked mole-rat tyrosinase DNA EHB08689
atgctcctgtttgttttgttctgcctgctgtggaatttccagacctccaccagccatttccctcgagcctgtacctcatttcagaacctgatagagaaggaatgctgtccaccatggagtggggacaggagtccctgtggccagctttcaggcagaggttcttgtcaggacatccttctgtccaatgcaccatttgggcctcaattccccttcacaggggtggatgacagggagtcttggccttctgtcttttataatagaacctgccaatgctctggcaacttcatgggattcagctgtggaaattgcaagtttggatattggggaccaaattgcacagagaaacgaatcttggtgagaagaaacatcttcgatttgagtgtcccagagaaggataaattccttgcctacctcactttagcgaagcataccatcagtgcagactatgtcattcccacaggcacatatggccaaatggagaatggatcaacccccatgtttaatgatgtcaatatttatgacctctttgtctggatgcattactatgtgtcaagggatactctgctcggaggatctgaaatctggagagatattgattttgcccatgaagcaccaggtttcctgccttggcatagactcttcttgctactgtgggaagaagaaatccggaagcttacgggtgatgagaacttcactattccatactgggactggcgggatgcagaaaactgtgacatttgcacagacgagtacatgggaggtcgccactctacaaaccctaaccttctcagcccagcatcattcttctcctcttggcagattatctgtagccgactggaggaatacaacagccgtcaggctttatgtgatggaacacctgagggacctttactgcgaaaccctggaagccatgacaaagctaggactccaaggctcccctcctcagcagatgtggaattttgcttgagtttgacgcaatatgaatctggctccatggacaaagctgccaatttcagcttcagaaatacactggaaggatttgctagcccagttaccggcatagcagatgcctcacaaagcagcatgcacaatgcattgcacatctatatgaatggaaccatgtcccaagtacaaggatcagccaacgatcccatttttcttcttcatcatgcatttgttgacagtatttttgaacagtggctccgaagacaccgccctcttcaagatgtttatccagaagccaatgcacctctggggcataatcgggaatcctacatggttccttttatacctctctacaaaaatggagatttctttatttcatctagagatctgggctatgaatacagctacctacaagattcagatccaggcttctttcaaaactacattgcaccctacttagaacaagctcatcagatctggccatggctggttggggcagccttggtaggggctgccttagctgttgcagtggtggcccttactaacctactgtgccatcacaagagaaagcagctccccgaggaaaaacagccactcctcatggaaaaggaggactaccacagcttattgtatcaaagccatttgtaa

SEQ ID NO: 103 - protein, 531 aa, Sus scrofa
  pig tyrosinase protein precursor Q4R1H3
  SIGNAL (1)...(18): signal sequence
MLLAALYCLLWTFQTSAGHFPRACASSKNLMEKECCPPWGGDGSPCGQLSGRGSCQDIILSKAPLGPQFPFTGVDERESWPSVFYNRTCQCFGNFMGFNCGSCKFGFQGPNCTERRLLVRRNIFDLSVPEKNKFLAYLTLAKHTTSPDFVIPTGTYGQMNNGSTPMFSDINIYDLFVWMHYYVSRDTLLGGSEIWRDIDFAHEAPGFLPWHRLFLLVWEQEIQKLTGDENFTIPYWDWRDAENCDICTDEYMGGRNPANPNLLSPASFFSSWQIICSRLEEYNSRQALCNGTPEGPLLRNPGNHDKSRTPRLPSSADVEFCLSLTQYESGSMDKSANFSFRNTLEGFASPLTGIADASQSSMHNALHIYMNGTMSQVQGSANDPIFLLHHAFVDSIFEQWLRKHHPLLEVYPEANAPIGHNRESYMVPFIPLYRNGDFFISSRDLGYDYSYLQDSEPDFFQDYIKPYLEQASRIWPWLLGAAVVGSVLTAVLGGITRRLCCRRKRKRLPEEKQPLLMEKEDYDSLLYQSHL

SEQ ID NO: 104 - DNA, 1596 bp, Sus scrofa
  pig tyrosinase DNA BAD99580
atgctcctggctgctttgtactgcctgctctggactttccagacttccgccggacacttccctcgagcctgtgcctcctccaagaacctgatggagaaggaatgctgcccaccctggggaggtgatgggagtccctgtggccagctctcaggcaggggttcctgtcaggacatcattctgtccaaggcacccctgggacctcagttccccttcaccggggtggatgaacgggagtcttggccctccgtcttttacaacaggacctgccagtgctttggcaacttcatgggatttaactgtggaagttgtaagtttggctttcagggacccaactgcacagagaggcgacttttggtcagaagaaacatctttgatttgagtgtgccagagaagaacaaatttcttgcctacctcactttagcgaaacatactaccagcccagacttcgtcatccccacaggcacctatggccaaatgaataatggatcaacacccatgtttagtgacatcaacatttatgacctctttgtctggatgcattattacgtgtctagggacacactacttgggggctctgaaatctggagagacattgattttgctcatgaagcaccaggtttcctgccttggcatcgactcttcttgctggtatgggaacaagaaatccagaagctgacaggggatgagaacttcactattccatactgggattggcgagatgcagaaaattgtgacatttgcacagatgagtacatgggaggacgcaaccctgcaaaccctaatctactcagcccagcatccttcttctcctcttggcagatcatctgcagccgactggaggagtacaacagccgtcaggctttatgcaatgggactcccgagggacctctactgcgcaatcctggaaaccacgacaaatccaggactccaaggctcccctcctcagccgatgtggaattttgcctgagtctgacccagtatgaatcaggttccatggataaatctgccaatttcagctttagaaatacactggaaggatttgctagcccactgactgggatagcagatgcctctcaaagcagtatgcacaatgccctgcacatctacatgaatggaaccatgtcccaggtacagggctctgccaacgatcccattttccttcttcatcatgcatttgttgacagtatttttgaacagtggcttcgaaagcaccaccctcttcttgaagtgtatccggaagccaatgcacccattggacacaaccgggaatcttacatggttccatttatacctctctacagaaatggtgacttctttatttcatccagagatctaggctatgactacagctacctacaagattcagaaccggacttttttcaagattacattaagccctacttagaacaagcaagtaggatctggccatggctccttggggcagccgtggtagggtctgtcctcactgcggtgttgggaggaatcacaaggcggttatgttgtcgtcgaaagagaaagcggcttcctgaagaaaagcagccactccttatggaaaaggaggattacgacagcttgttgtatcagagccatttgtaa

SEQ ID NO: 105 - protein, 530 aa, Felis catus
  cat tyrosinase protein precursor Q2VPV8
  SIGNAL (1)...(18): signal sequence
MLLAALCCLLWSFRTSAGHFPRACASSKSLMEKECCPAWTGDSSPCGQLSGRGACQDITLSKAPLGPQYPFTGMDDREAWPSVFYNRTCQCFGNFMGFNCGNCKFGFWGPNCTEKRLLVRRNIFDLSVPEKNKFLAYLTLAKHTISPDYVIPIGTYGQMNNGSTPMFNDINVYDLFVWMHYYVSRDTLLGGSEIWKDIDFAHEAPGFLPWHRLFLLLWEQEIQKLTGDENFTIPYWDWRDAKSCDICTDEYMGGHNPANPNLLSPASFFSSWQIICTRLEEYNSRQALCDGTPEGPLLRNPGNHDKARTPRLPSSADVEFCLSLTQYESDSMDKAANFSFRNTLEGFASPLTGIADASQSSMHNALHIYMNGTMSQVQGSANDPIFLLHHAFVDSIFEQWLRRHHPLQEVYPEANAPIGHNRESYMVPFIPLYRNGDFFISSRDLGYDYSNLQDSERDIFQDYIKPFLEQASRIWPWLIGAAVVGSVLTAVLGRLTSLLCRRKRKQLREERQPLLMEKEDYHSLLYQTHV

SEQ ID NO: 106 - DNA, 1593 bp, Felis catus
  cat tyrosinase DNA AAY32311
atgctcctggctgctctgtgctgcctgctgtggagtttccggacctccgctggccatttccctcgagcctgtgcctcctccaagagcctgatggagaaggaatgctgtccagcgtggacgggtgacagcagtccctgcggccagctctcaggcaggggtgcctgtcaggacatcacgctgtccaaagctccactcgggcctcaataccccttcackgggatggatgaccgggaggcctggccctccgtcttttataatcggacctgccagtgctttggcaacttcatgggattcaactgtggaaattgcaagtttggcttttggggaccaaactgcacagagaagcgacttttggtgagaagaaacatctttgatttgagcgtcccagagaagaacaaatttcttgcctacctcactttagcgaagcatactatcagcccagactatgtcatccccataggcacctatggccaaatgaataatggatctacacccatgtttaatgacatcaatgtttatgacctcttcgtctggatgcattactatgtgtcaagggacacactgcttggagggtctgaaatctggaaagacattgattttgctcatgaagcccctggtttcctgccttggcacagactcttcttgttgctgtgggaacaagaaatccagaagctgaccggggatgagaacttcactattccatattgggattggcgagatgctaaaagctgtgacatttgcacagatgagtacatgggagggcacaacccagcaaacccgaacttactcagcccagcatccttcttctcctcttggcagatcatctgtacccgattggaggagtacaatagccgtcaggctttatgtgatggaactccagagggaccattactgcgcaatcccggaaaccatgacaaagccaggaccccaaggctcccctcctctgctgatgtggaattttgcctaagtctgacacaatatgaatcggattccatggataaagctgccaatttcagctttaggaatacactggaaggatttgctagtccacttactgggatagcagatgcctctcaaagcagcatgcacaatgccttgcacatctatatgaatggaacgatgtctcaggtacagggatctgccaatgatcccatttttcttcttcaccatgcatttgttgacagtatttttgaacaatggctccgaaggcaccatcctcttcaagaagtgtatccagaagccaatgcacccattggacacaaccgggagtcctacatggttccttttatacctctatacagaaatggtgatttctttatttcatccagagatctgggctatgactatagcaacctacaagattcagaacgggacatttttcaagattacattaagcccttcttggaacaagcaagtcggatctggccatggctcattggggctgctgtggtaggctctgtcctcacggctgtgctgggaaggctcactagcctattgtgtcgtcgcaaaagaaagcagctccgtgaagaaagacagcccctcctcatggaaaaggaggattaccacagtttgttgtatcagactcatgtataa

SEQ ID NO: 107 - protein, 530 aa, Ovis aries
  sheep tyrosinase protein precursor A7LK11
  SIGNAL (1)...(18): signal sequence
MLLAALYCLLWSFRTSAGHFPRACASSKSLMEKECCPPWAGDGSPCGRLSGRGSCQDVILSTAPLGPQFPFTGVDDRESWPSIFYNRTCQCFGNFMGFNCGSCKFGFRGPRCTERRLLVRRNIFDLSVPEKNKFLAYLTLAKHTTSPDYVIPTGTYGQMNHGTTPLFNDVSVYDLFVWMHYYVSRDTLLGDSEVWRDIDFAHEAPGFLPWHRLFLLLWEQEIQKLTGDENFTIPYWDWRDAENCEVCTDEYMGGRNPANPNLLSPASFFSSWQIICSRLEEYNSRQALCNGTSEGPLLRNPGNHDKARTPRLPSSADVEFCLSLTQYESGSMDKAANFSFRNTLEGFASPLTGIADASQSSMHNALHIYMNGTMSQVPGSANDPIFLLHHAFVDSIFEQWLRKYHPLQDVYPEANAPIGHNRESYMVPFIPLYRNGDFFISSKDLGYDYSYLQDSEPDIFQDYIKPYLEQARRIWPWLTGAAVVGSVLTAVLGGLTSLLCRRKRNQLPEEKQPLLMEKEDYHNVLYQSHL

SEQ ID NO: 108 - DNA, 1593 bp, Ovis aries
  sheep tyrosinase DNA ABS57357.1
atgctcctggctgccctgtactgcctgctatggagtttccggacctctgcgggccacttccctcgagcctgtgcctcctccaagagcctgatggagaaggagtgctgcccgccctgggcgggcgacgggagcccctgtggccggctctcgggcaggggctcctgccaggacgtcattctgtccacggcaccactgggacctcagttccccttcacgggggtggacgaccgcgagtcttggccctccatcttttataacagaacctgccagtgctttggcaacttcatgggattcaattgcggaagttgtaagtttggatttcggggaccccgctgcacagaaaggcgactgctggtgagaagaaacatctttgatttgagtgtcccagagaagaacaaatttcttgcctatctcactttggcaaaacataccaccagcccagactacgtcatccccacgggcacctatggccaaatgaatcacggaacaacgcccctgtttaatgacgtcagtgtttatgacctctttgtctggatgcattattatgtgtcaagggacacgctgcttggggactctgaagtctggagagacattgattttgctcatgaagccccaggtttcttgccttggcatagactctttttgctgctgtgggaacaggaaatccagaagctcactggggatgagaacttcacgattccatactgggactggagagatgcagaaaactgtgaggtttgcacagatgagtacatgggaggtcgcaaccctgcaaaccctaatctgctcagcccagcatccttcttctcctcttggcagatcatctgcagcagactggaggagtacaacagtcgccaggctttatgcaacgggacgtctgagggaccattactgcgcaatcctggaaaccacgacaaagccaggaccccgaggctcccctcctcagctgatgtggagttttgcctgagtttgacccagtatgaatcaggttccatggataaagctgccaacttcagctttagaaataccctggaaggatttgctagtccgcttactgggatagcagatgcctctcaaagcagtatgcacaatgccttgcacatttacatgaacggaacgatgtcccaggtaccaggatctgccaatgatcccatcttccttcttcatcacgcgtttgttgacagtatttttgaacagtggcttcgaaagtatcatcctcttcaagatgtttatccagaagctaatgcacccattgggcacaaccgggaatcctacatggttcctttcatccctctctacagaaacggtgatttctttatttcatccaaagatctaggctatgactatagctacctacaagattcagaaccggacatttttcaagattacattaagccctacttagaacaagcacgtcgaatctggccgtggctcactggggcagctgtggttgggtctgtccttactgctgtgctgggaggacttactagcctgttatgtcgtcgaaagagaaaccagcttccagaagaaaagcagcccctgctcatggaaaaagaggattaccacaatgtgttgtatcagagccatttatga

SEQ ID NO: 109 - protein, 530 aa, Canis familiaris
  dog tyrosinase protein precursor P54834
  SIGNAL (1)...(18): signal sequence
MLLAALCCLLWSFRTSTGHFPRACASSKSLMEKECCPPWSGDGSPCGQLSGRGACQDIILSNAPFGPQFPFTGVDDRESWPSVFYNRTCQCFGNFMGFNCGNCKFGFWGQNCTEKRLLVRKNIFDLSVPEKNKFLAYLTLAKHTTSPDYVIPTGTYGQMNNGSTPMFNDINIYDLFVWMHYYVSRDTLLGGSEIWKDIDFAHEAPGFLPWHRLFLLLWEQEIQKLTGDENFTIPYWDWRDAKSCDICTDEYMGGRNPANPNLLSPASFFSSWQIVCTRLEEYNSRQALCDGTPEGPLLRNPGNHDKARTPRLPSSADVEFCLSLTQYESDSMDKAANFSFRNTLEGFASPLTGIADASQSSMHNALHIYMNGTMSQVPGSANDPIFLLHHAFVDSIFEQWLRRHHPLREVYPEANAPIGHNRESYMVPFIPLYRNGDLFISSRDLGYDYSNLQESERDIFQDYIKPYLEQASRIWPWLIGAAVVGCVVTAVLGGLTSLLCRRNRKQLHEEKQPLLMEKEDYHSLLYQTHL

SEQ ID NO: 110 - DNA, 1593 bp, Canis familiaris
  dog tyrosinase DNA AAQ17535.1
atgctcctggctgctttgtgctgtctgctgtggagtttccgaacctccactggccatttccctcgagcctgtgcctcctccaagagcctgatggagaaggaatgctgcccaccatggagtggtgacgggagtccctgtggccagctttcaggcaggggtgcctgtcaggacatcatactatccaatgccccattcgggcctcagttccccttcacgggggtggatgaccgggaatcttggccttctgtcttttacaatcggacctgccagtgctttggtaacttcatgggattcaactgtggaaattgcaagtttggcttttggggacaaaactgcacagagaagcgacttttggtgagaaaaaacatctttgatttgagtgtcccagagaagaacaaatttcttgcctaccttactttagcaaagcatactaccagcccagactatgtcatccccacaggtacctatggccaaatgaataatggatcaacacccatgtttaatgacatcaacatttatgatctctttgtctggatgcattattatgtgtcaagggacacactgcttggagggtctgaaatctggaaagacattgattttgctcatgaagccccaggtttcctgccttggcacagactcttcttgttgctgtgggaacaagaaatccagaagctgaccggggatgagaacttcactattccatattgggattggcgagatgctaaaagctgtgacatttgcacagatgagtacatgggagggcgcaacccagcaaacccaaacttactcagcccagcatccttcttctcctcttggcagatcgtctgcacccgactggaggagtacaacagccgacaggctttatgcgatggaactccagaaggaccgttactgcgcaatcctgggaaccatgacaaagccaggaccccaagactcccctcctctgctgatgtggaattctgcctgagtctgacccagtatgaatcggattccatggataaagctgccaatttcagctttagaaatacactggaaggatttgctagtccacttactgggatagcagatgcctctcaaagcagtatgcacaatgccttgcatatctatatgaatggaacaatgtctcaggtaccgggatctgccaatgatcccatttttcttcttcaccatgcattcgttgacagtatttttgagcagtggctccgaaggcaccatcctcttcgagaagtttatccagaagccaatgctcctattggacacaaccgggaatcctacatggttccttttatacctctgtacagaaatggtgatctctttatttcatccagagatctgggctatgactatagcaacctacaagaatcagaacgggacatttttcaagattacattaagccctacttagaacaagcaagtcggatctggccatggctcattggggctgctgtggtaggctgtgtcgtcactgctgtgctaggagggctcaccagcctattgtgtcggcgcaatagaaagcagctccatgaagaaaagcagccactcctcatggaaaaggaggattaccacagcttgttgtatcagacccatctataa

SEQ ID NO: 111 - protein, 530 aa, Capra hircus
  goat tyrosinase protein precursor G9JKW9
  SIGNAL (1)...(18): signal sequence
MLLAALYCLLWSFRTSAGHFPRACASSKSLMEKQCCPPWAGDGSPCGRLSGRGSCQDVILSTAPLGPQFPFTGVDDRESWPSIFYNRTCQCFGNFMGFNCGSCKFGFRGPRCTERRLLVRRNIFDLSVPEKNKFLAYLTLAKHTTSPDYVIPTGTYGQMNHGTTPLFNDVSVYDLFVWMHYYVSRDTLLGDSEVWRDIDFAHEAPGFLPWHRLFLLLWEQEIQKLTGDENFTIPYWDWRDAENCEVCTDEYMGGRNPANPNLLSPASFFSSWQIICSRLEEYNSRQALCNGTSEGPLLRNPGNHDKARTPRLPSSADVEFCLSLTQYESGSMDKAANFSFRNTLEGFASPLTGIADASQSSMHNALHIYMNGTMSQVPGSANDPIFLLHHAFVDSIFEQWLRKYHPLQDVYPEANAPIGHNRESYMVPFIPLYRNGDFFISSKDLGYDYSYLQDSEPDIFQDYIKPYLEQARRIWPWLTGAAVVGSVLTAVLGGLTSLLCRRKRNQLPEEKQPLLMEKEDYHNVLYQSHL

SEQ ID NO: 112 - DNA, 1593 bp, Capra hircus
  goat tyrosinase DNA AEV91332.1
atgctcctggccgccctgtactgcctgctatggagtttccggacctctgcgggccacttccctcgagcctgtgcctcctccaagagcctgatggagaagcagtgctgcccgccctgggcgggcgacgggagcccctgcggccggctctcgggcaggggctcctgccaggacgtcattctgtccacggcgccgctcgggcctcagttccccttcacgggggtggacgaccgcgagtcttggccctccatcttttataacagaacctgccagtgctttggcaacttcatgggattcaattgcggaagttgtaagtttggatttcggggaccccgctgcacagaaaggcgacttctggtgagaagaaacatctttgatttgagtgtcccagagaagaacaaatttcttgcctatctcactttggcaaaacataccaccagcccagactacgtcatccccacgggcacctatggccaaatgaatcacggaacaacgcccctgttcaatgacgtcagtgtttatgacctctttgtctggatgcattattatgtgtcaagggacacgctgcttggggactctgaagtctggagagacattgattttgctcatgaagccccgggtttcctgccttggcatagactcttcttgctgctgtgggaacaggaaatccagaagctgaccggggatgagaacttcacgattccatactgggactggagagatgcagaaaactgtgaggtttgcacagatgagtacatgggaggtcgcaatcctgcaaaccctaatctgctcagcccagcatccttcttctcctcttggcagatcatctgcagcagactggaggagtacaacagtcgccaggctttatgcaacgggacgtctgagggaccattactgcgcaatcctggaaaccacgacaaagccaggaccccgaggctcccctcctcggctgatgtggagttttgcctgagtttgacccagtatgaatcaggttccatggataaagctgctaacttcagctttagaaataccctggaaggatttgctagtccgcttactgggatagcagatgcctctcaaagcagtatgcacaatgccttgcacatctacatgaacggaacgatgtcccaggtaccaggatctgccaatgatcccatcttccttcttcatcacgcgtttgttgacagtatttttgaacagtggcttcgaaagtatcatcctcttcaagatgtttatccagaagctaatgcacccattgggcacaaccgggaatcctacatggttcctttcatccctctctacagaaacggtgatttctttatttcatccaaagatctaggctatgactatagctacctacaagattcagaaccggacatttttcaagattacattaagccctacttagaacaagcacgtcgaatctggccgtggctcactggggcagctgtggttggatctgtccttactgctgtgctgggaggacttactagcctgttatgtcgtcgaaagagaaaccagcttccagaagaaaagcagcccctgctcatggaaaaagaggattaccacaatgtgttgtatcagagccatttatga

SEQ ID NO: 113 - protein, 530 aa, Bos taurus
  cow tyrosinase protein precursor F1MBK3
  SIGNAL (1)...(18): signal sequence
MLLAALYCLLWSFRTSAGHFPRACASSKSLTEKECCPPWAGDGSPCGRLSGRGSCQDVILSTAPLGPQFPFTGVDDRESWPSIFYNRTCQCFSNFMGFNCGSCKFGFRGPRCTERRLLVRRNIFDLSVPEKNKFLAYLTLAKHTTSPDYVIPTGTYGQMNHGTTPLFNDVSVYDLFVWMHYYVSRDTLLGDSEVWRDIDFAHEAPGFLPWHRLFLLLWEQEIQKLTGDENFTIPYWDWRDAENCDVCTDEYMGGRNPANPNLLSPASFFSSWQIVCSRLEEYNSRQALCNGTSEGPLLRNPGNHDKARTPRLPSSADVEFCLSLTQYESGSMDKAANFSFRNTLEGFADPVTGIADASQSSMHNALHIYMNGTMSQVPGSANDPIFLLHHAFVDSIFEQWLRKYHPLQDVYPEANAPIGHNRESYMVPFIPLYRNGDFFISSKDLGYDYSYLQDSEPDIFQDYIKPYLEQAQRIWPWLIGAAVVGSVLTAVLGGLTSLLCRRKRNQLPEEKQPLLMEKEDYHNLMYQSHL

SEQ ID NO: 114 - DNA, 1593 bp, Bos taurus
  cow tyrosinase DNA AFJ39265.1
atgctcctggctgccctgtactgcctactgtggagtttccgaacctccgctggccacttccctcgagcctgtgcctcctccaagagcctgacggagaaggagtgctgcccgccctgggcgggcgatgggagcccctgtggccggctctcaggcaggggctcctgccaggacgtcattctgtccacggcaccactcggacctcagttccccttcacgggggtggacgaccgcgagtcttggccctccatcttttataacagaacctgccagtgctttagcaacttcatgggattcaattgcggaagttgtaagtttgggtttaggggaccccgctgcacagaaaggcgacttttggtgagaagaaacatctttgatttgagtgtcccagagaagaacaagtttcttgcctatctcactttggcaaaacataccaccagcccagactacgtcatccccacgggcacctatggccaaatgaatcatggaacaacacccctgtttaatgacgtcagtgtttacgacctctttgtctggatgcattattatgtgtcaagggacacgctgcttggggactctgaagtctggagagacattgattttgctcatgaagccccaggtttcctgccttggcatagactcttcctgctgctgtgggaacaggaaatccagaagctgaccggggatgagaacttcacgattccatactgggactggagagatgcagaaaactgtgacgtttgcacagatgagtacatgggagggcgcaaccctgcaaaccctaatctactcagcccagcatccttcttctcctcttggcagatcgtctgcagcagactggaggagtacaacagtcgccaggctttatgcaacgggacgtctgagggaccattactgcgcaatcctggaaaccacgacaaagccaggaccccgaggctcccctcctcggctgatgtggagttttgcctgagtttgacccagtatgaatcaggttccatggataaagctgccaatttcagctttagaaataccctggaaggatttgctgatccagttactgggatagcagatgcctctcaaagcagtatgcacaatgccttgcacatctacatgaacggaacgatgtctcaggtaccaggatctgccaatgatcccatcttccttcttcatcacgcgtttgttgacagtatttttgaacagtggcttcgaaagtatcatcctcttcaagatgtttatccagaagctaatgcacccattgggcacaaccgggaatcctacatggttcctttcatccctctctacagaaacggtgacttctttatttcatccaaagatctaggctacgactatagctacctacaagattcagaaccggacatttttcaagattacattaagccctacttagaacaagcgcaacgaatctggccgtggctcattggggcagctgtggttgggtccgtccttactgctgtgctgggaggacttactagcctgttatgtcgtcgaaagagaaaccagcttccagaagaaaagcagcccctgctcatggaaaaagaggattaccacaatttgatgtatcagagccatttatga

SEQ ID NO: 115 - protein, 530 aa, Rattus norvegicus
  rat tyrosinase protein precursor D4A9G4
  SIGNAL (1)...(18): signal sequence
MFLAVLYYLLWSFQTSAGHFPRDCASSKNLMAKECCPPWMGDGSPCGHLSGRGSCQDILLSNAPSGPQFPFKGVDDRESWPSVFYNRTCQCSGNFMGFNCGNCKFGFGGPNCTEKRLLIRRNIFDLSASEKNKFFSYLTLAKHTISSVYVIPTGTYGQMNNGSTPMFKDINIYDLFVWMHYYVSRDTLLGGSEIWRDIDFAHEAPGFLPWHRLFLLLWEQEMQELTGDENFTIPYWDWRDAENCDICTDEYLGGRHPENPNLLSPASFFSSWEIICSRSEEYNSHQVLCDGTPEGPLLRNPGNHDKAKTPRLPSSADVEFCLSLTQYESGSMDRTANFSFRNTLEGFASPLTGIADSSQSSMHNALHIYMNGTMSQVQGSANDPIFLLHHAFVDSIFEQWLRRHRPLLEVYPEANAPIGHNRESYMVPFIPLYRNGDFFISSKDLGYDYSYLQESDPGFYRNYIEPYLEQASRIWPWLLGAALVGAVVATALAGLSSRLCHQKKKQPQEERQPLLMDKDDYHSLLYQSHL

SEQ ID NO: 116 - DNA, 1593 bp, Rattus norvegicus
  rat tyrosinase DNA EDM18593.1
atgttcttggctgttttgtattaccttctgtggagttttcagacctctgctggccattttcctcgagactgtgcctcctctaagaacttgatggcaaaagaatgctgcccaccatggatgggtgatgggagtccctgcggccacctttcagggagaggttcctgccaggacatccttttgtccaatgcaccatctggacctcagttccccttcaaaggggtggatgaccgtgagtcctggccctctgtgttttataataggacctgccagtgctctggaaacttcatgggtttcaattgcggaaactgtaagtttggatttgggggcccaaattgtacagagaagcgactcttaattagacgaaacatttttgatttgagtgcctcagaaaagaataagttcttttcttacctcactttggcaaaacatactatcagctcagtctatgtcatccccacaggcacctatggccaaatgaacaatgggtcgacacccatgtttaaggacatcaacatctatgacctctttgtatggatgcattactatgtgtcaagggacacactgcttgggggctctgaaatctggagggacattgattttgctcatgaagcaccaggatttttgccttggcacagactgttcttgctattatgggaacaagaaatgcaggaactaactggggatgagaatttcaccattccatattgggactggagagatgcggaaaactgtgacatttgcacagatgagtacctgggaggtcgtcaccctgaaaatcctaacttactcagcccagcgtccttcttctcctcctgggagatcatttgcagcagatcagaagagtataatagccatcaggttttatgtgatggaacacctgagggaccactattacgtaatcctggaaaccatgacaaagccaaaacccccaggctcccatcttcagcagacgtggaattttgtttgagtttgacccagtatgaatctggatcaatggatagaactgccaatttcagctttagaaacacactggaaggatttgccagtccactcacagggatagcagattcttctcaaagtagcatgcacaacgctctgcatatctatatgaatggaacaatgtcgcaagtacagggatcggccaatgatcccatttttcttcttcatcatgcttttgtggacagtatttttgaacaatggctccgaagacaccgccctcttttggaagtttacccagaagccaatgcacctattggccataacagagaatcctacatggttcctttcattccactctatagaaatggtgatttcttcatttcatccaaggatctgggatatgactacagttacctacaagaatcagatccaggcttttaccgaaactatattgaaccctacttggaacaagctagtcgtatctggccatggcttcttggagcagcactggtgggagctgttgttgctacagctctagctgggctcagcagtaggctatgccatcagaagaaaaagcaaccccaggaggaaaggcagcccctcctcatggacaaagatgactaccacagcttgctgtaccagagccatctatga

SEQ ID NO: 117 - protein, 530 aa, Cavia porcellus
  guinea pig tyrosinase protein precursor H0VH99
  SIGNAL (1)...(18): signal sequence
MLLAVLLCVLWHFQISAGHFPRACASSQNLIEKECCPPWIGDGSPCGQLSGRGSCQDIFLSSAPFGPQFPFTGVDDRESWPSVFYNRTCQCSGNFMGFSCGNCKFGYWGPNCTQKRILVRRNIFDLSVPEKDKFLAYLTLAKHTISANYVIPTGTYGQMKNGSTPMFNDVSIYNLFVWMHYYVSRDTLLGGSEIWKDIDFAHEAPGFLPWHRLFLLLWEEEIRQLTGDENFTIPYWDWRDAENCEICTDEYMGGRHPTNPNLLSPASFFSSWQIVCSRIEEYNSRQVLCDGNPEGPLLRNPGNHDKARTSRIPSSSDVELCLSLTQYDSGSMDKSANFSFRNTLEGFANPVSGIANDSQSSMHNALHIYMNGTMSQVQGSANDPIFLLHHAFVDSIFEQWLRRHRPLQEVYPEANAPIGHNRDSYMVPFIPLYKNGDFFISSRDLGYDYSYLQDSDPDFFQTYFEPYLEQARQIWPWLLGAALVGAALAAALVGLTSLLCHHKRKQLPEEKQPLLTEKEDYSSLLHQSHL

SEQ ID NO: 118 - DNA, 1593 bp, Cavia porcellus
  guinea pig tyrosinase DNA
atgctcctggctgttctgctctgtgtgctgtggcatttccagatctctgctggccattttcctcgagcctgtgcatcttctcagaacctgatagagaaggaatgctgcccaccatggataggggacggaagtccctgtggccagctttcaggcagaggttcctgtcaggacatctttttgtccagtgcaccatttgggcctcagttccccttcacaggggtggatgatagggaatcttggccctctgtcttttataacagaacttgccagtgctctggcaacttcatgggattcagctgtggaaattgcaagtttggatactggggaccaaactgtacacagaaacgaatcttggtgagaagaaacatctttgatttgagtgtcccagagaaggataaattccttgcttacctgactttagcaaaacataccatcagtgcaaactatgtcattcccaccggcacatatggccaaatgaagaatggatcaactcccatgtttaatgatgtcagcatttataacctctttgtctggatgcattactatgtgtcaagagatacattgctcgggggatctgaaatctggaaagatattgatttcgctcacgaagcaccaggtttcctgccttggcacagactcttcttgctgctgtgggaagaagaaatccggcagcttaccggggatgagaacttcactattccatactgggactggagggacgcggaaaactgtgagatttgcacagatgagtacatgggaggtcgccaccctacaaaccctaacctgctcagccctgcatcattcttctcctcttggcagattgtctgtagccgaattgaggaatacaacagccggcaggttttatgtgatggaaatcctgagggacctttactgcgtaatcctggaaaccatgataaagccaggacatcaaggatcccctcctcatctgatgtggaattgtgcctgagtttgactcaatatgattctggatccatggataaatctgccaatttcagctttagaaatactttggaaggatttgctaacccagtttcaggaatagcaaatgactcacaaagcagcatgcacaatgctttgcacatctatatgaatggaaccatgtctcaagtacaaggatcagccaacgatcccatttttcttcttcaccatgcatttgttgacagtatttttgaacagtggctccgaagacaccgcccacttcaggaagtttatccggaagccaatgcacccattggacataaccgggactcctacatggttccttttatacctctctataaaaatggtgatttttttatttcatccagagatctgggctatgactacagctacctacaagattcagatccagacttctttcaaacctacttcgagccctacttggaacaagcacgtcagatctggccgtggctgctcggagcagctttggtaggggccgcgcttgctgcagcactggtggggttaaccagcctgctgtgccatcacaagagaaagcagctccctgaggaaaagcagccactcctcacagagaaggaggactacagcagcttattgcatcaaagccatttgtaa

SEQ ID NO: 119 - DNA, 1584 bp, Homo sapiens
  human tyrosinase-related protein 1 (Tyrp1) cDNA, CAA35785.1
atgagtgctcctaaactcctctctctgggctgtatcttcttccccttgctactttttcagcaggcccgggctcaattcccaagacagtgtgccactgttgaggctttgagaagtggtatgtgttgcccagacctgtcccctgtgtctgggcctgggacagaccgctgtggctcatcatcagggaggggcagatgtgaggcagtgactgcagactcccggccccacagccctcagtatccccatgatggcagagatgatcgggaggtctggcccttgcgcttcttcaataggacatgtcactgcaacggcaatttctcaggacacaactgtgggacgtgccgtcctggctggagaggagctgcctgtgaccagagggttctcatagtcaggagaaatcttctggacttaagtaaagaagaaaagaaccactttgtccgggccctggatatggcaaagcgcacaactcaccctttatttgtcattgccaccaggagatcagaagaaatactggggccagatggcaacacgccacaatttgagaacatttccatttataactactttgtttggacacactattactcagtcaaaaagactttccttggggtaggacaggaaagctttggtgaagtggatttctctcatgagggaccagcttttctcacatggcacaggtaccacctcctgcgtctggagaaagacatgcaggaaatgttgcaagagccttctttctcccttccttactggaattttgcaacggggaaaaatgtctgtgatatctgcacggatgacttgatgggatccagaagcaactttgattccactctaataagcccaaactctgtcttttctcaatggcgagtggtctgtgactccttggaagattatgataccctgggaacactttgtaacagcaccgaggatgggccaattaggagaaatccagctggaaatgtggccagaccaatggtgcaacgtcttcctgaaccacaggatgtcgctcagtgcttggaagttggtttatttgacacgcctcctttttattccaactctacaaacagtttccgaaacacagtggaaggttacagtgaccccacgggaaagtatgaccctgctgttcgaagtcttcacaatttggctcatctattcctgaatggaacagggggacaaacccatttgtctccaaatgatcctatttttgtcctcctgcacaccttcacagatgcagtctttgatgaatggctgaggagatacaatgctgatatatccacatttccattggaaaatgcccctattggacataatagacaatacaacatggtgccattctggcccccagtcaccaacacagaaatgtttgttactgctccagacaacctgggatacacttatgaaattcaatggccaagtcgggagtttagtgtacctgagataattgccatagcagtagttggcgctttgttactggttgcactcatttttgggactgcttcttatctgattcgtgccagacgcagtatggatgaagctaaccagcctctcctcactgatcagtatcaatgctatgctgaagaaagaatatga

SEQ ID NO: 120 - protein, 513 aa, Homo sapiens
  mature human tyrosinase-related protein 1 (Tyrp1) protein
QFPRQCATVEALRSGMCCPDLSPVSGPGTDRCGSSSGRGRCEAVTADSRPHSPQYPHDGRDDREVWPLRFFNRTCHCNGNFSGHNCGTCRPGWRGAACDQRVLIVRRNLLDLSKEEKNHFVRALDMAKRTTHPLFVIATRRSEEILGPDGNTPQFENISIYNYFVWTHYYSVKKTFLGVGQESFGEVDFSHEGPAFLTWHRYHLLRLEKDMQEMLQEPSFSLPYWNFATGKNVCDICTDDLMGSRSNFDSTLISPNSVFSQWRVVCDSLEDYDTLGTLCNSTEDGPIRRNPAGNVARPMVQRLPEPQDVAQCLEVGLFDTPPFYSNSTNSFRNTVEGYSDPTGKYDPAVRSLHNLAHLFLNGTGGQTHLSPNDPIFVLLHTFTDAVFDEWLRRYNADISTFPLENAPIGHNRQYNMVPFWPPVTNTEMFVTAPDNLGYTYEIQWPSREFSVPEIIAIAVVGALLLVALIFGTASYLIRARRSMDEANQPLLTDQYQCYAEEYEKLQNPNQSVV

SEQ ID NO: 121 - protein, 537 aa, Pan troglodytes
  chimpanzee tyrosinase-related protein 1 (Tyrp1) precursor protein H2QX04
  SIGNAL (1)...(24): signal sequence
MSAPKLLSLGCIFFPLLLFQQARAQFPRQCATVEALRSGMCCPDLSPVSGPGTDRCGSSSGRGRCEAVTADSRPHSPQYPHDGRDDREAWPLRFFNRTCHCNGNFSGHNCGTCRPGWRGAACDQRVLIVRRNLLDLSKEEKNHFVRALDMAKRTTHPLFVIATRRSEEILGPDGNTPQFENISIYNYFVWTHYYSVKKTFLGVGQESFGEVDFSHEGPAFLTWHRYHLLRLEKDMQEMLQEPSFSLPYWNFATGKNVCDICMDDLMGSRSNFDSTLISPNSVFSQWRVVCDSLEDYDTLGTLCNSTEDGPIRRNPAGNVARPMVQRLPEPQDVAQCLEVGLFDTPPFYSNSTNSFRNTVEGYSDPTGKYDPAVRSLHNLAHLFLNGTGGQTHLSPNDPIFVLLHTFTDAVFDEWLRRYNADISTFPLENAPIGHNRQYNMVPFWPPVTNTEMFVTAPDNLGYTYEIQWPSREFSVPEIIAIAVVGALLLVALIFGTASYLIRARRSMDEANQPLLTDQYQCYAEEYEKLRNPNQSVV

SEQ ID NO: 122 - DNA, 1614 bp, Pan troglodytes
  chimpanzee tyrosinase-related protein 1 (Tyrp1) DNA
atgagtgctcctaaactcctctctctgggctgtatcttcttccccttgctactttttcagcaggcccgggctcaattcccaagacagtgtgccactgttgaggctttgagaagtggtatgtgttgcccagacctgtcccctgtgtctgggcctgggacagaccgctgtggctcatcatcagggaggggcagatgtgaggcagtgactgcagactcccggccccacagccctcagtatccccatgatggcagagatgatcgggaggcctggcccttgcgcttcttcaataggacatgtcactgcaatggcaatttctcaggacacaactgtgggacatgccgtcctggctggagaggagctgcctgtgaccagagggttctcatagtcaggagaaatcttctggacttaagtaaagaagaaaagaaccactttgtccgggccctggatatggcaaagcgcacaactcaccctttatttgtcattgccaccaggagatcagaagaaatactggggccagatggcaacacgccacaatttgagaacatttccatttataactactttgtttggacacactattactcagtcaaaaagactttccttggggtagggcaggaaagctttggtgaagtggatttctctcatgagggaccagcttttctcacatggcacaggtaccacctcctgcgtctggagaaagacatgcaggaaatgttgcaagagccttctttctcccttccttactggaattttgcaacggggaaaaatgtctgtgatatctgcatggatgacttgatgggatccagaagcaactttgattccactctaataagcccaaactctgtcttttctcaatggcgagtggtctgtgactccttggaagattatgataccctgggaacactttgtaacagcaccgaggatgggccaattaggagaaatccagctggaaatgtggccagaccaatggtgcaacgtcttcctgaaccacaggatgtcgctcagtgcttggaagttggtttatttgacacgcctcctttttattccaactctacaaacagtttccgaaacacagtggaaggttacagtgaccccacgggaaagtatgaccctgctgttcgaagtcttcacaatttggctcatctattcctgaatggaacagggggacaaacccatttgtctccaaatgatcctatttttgtcctcctgcacaccttcacagatgcagtcttcgatgaatggctgaggagatacaatgctgatatatccacatttccattggaaaatgcccctattggacataatagacaatacaacatggtgccattctggcccccagtcaccaacacagaaatgtttgttactgctccagacaacctgggatacacttatgaaattcaatggccaagtcgggagtttagtgtacctgagataattgccatagcagtagttggcgctttgttactggttgcactcatttttgggactgcttcttatctgattcgtgccagacgcagtatggatgaagctaaccagcctctcctcactgatcagtatcaatgctatgctgaagaatatgaaaaactccggaatcctaatcagtctgtggtctaa

SEQ ID NO: 123 - protein, 537 aa, Gorilla gorilla
  gorilla tyrosinase-related protein 1 (Tyrp1) precursor protein G3RJH0
  SIGNAL (1)...(24): signal sequence
MSSPKLLSLGCIFFPLLLFQQARAQFPRQCATVEALRSGMCCPDLSPVSGPGTDRCGSSSGRGRCEAVTADSRPHSPQYPHDGRDDREVWPLRFFNRTCHCNGNFSGHNCGTCRPGWRGAACDQRVLIVRRNLLDLSKEEKNHFVQALDMAKRTTHPLFVIATRRSEEILGPDGNTPQFENISIYNYFVWTHYYSVKKTFLGVGQESFGEVDFSHEGPAFLTWHRYHLLRLEKDMQEMLQEPSFSLPYWNFATGKNVCDICTDDLMGSRSNFDSTLISPNSVFSQWRVVCDSLEDYDTLGTLCNSTENGPIRRNPAGNVARPMVQRLPEPQDVAQCLEVGLFDTPPFYSNSTNSFRNTVEGYSDPTGKYDPAVRSLHNLAHLFLNGTGGQTHLSPNDPIFVLLHTFTDAVFDEWLRRYNADISTFPLENAPIGHNRQYNMVPFWPPVTNTEMFVTAPDNLGYTYEIQWPSREFSVPEIIAIAVVGALLLVALIFGTASYLIRARRSMDEANQPLLTDQYQCYAEEYEKLRNPNQSVV

SEQ ID NO: 124 - protein, 537 aa, Nomascus leucogenys
  gibbon tyrosinase-related protein 1 (Tyrp1) precursor protein G1S7E5
  SIGNAL (1)...(24): signal sequence
MSAPKLLSLGCIFFPLLLFQQARAQFPRQCATVEALRSGMCCPDLSPVSGPGTDRCGSSSGRGRCEAVTADSRPHSPQYPHDGRDDREVWPLRFFNRTCHCNGNFSGHNCGTCRPGWRGAACDQRVLIVRRNLLDLSKEEKNHFVQALDMAKRTTHPLFVIATRRSEEILGPDGNTPQFENISIYNYFVWTHYYSVKKTFLGVGQESFGEVDFSHEGPAFLTWHRYHLLRLEKDMQEMLQEPSFSLPYWNFATGKNVCDICTDDLMGSRSNFDSTLISPNSVFSQWRVVCDSLEDYDTLGTLCNSTESGPIRRNPAGNVARPMVQRLPEPQDVAQCLEVGLFDTPPFYSNSTNSFRNTVEGYSDPTGKYDPAVRSLHNLAHLFLNGTGGQTHLSPNDPIFVLLHTFTDAVFDEWLRRYNADISTFPLENAPIGHNRQYNMVPFWPPVTNTEMFVTAPDNLGYTYEVQWPSREFSVPEIIAIAVVASLLLVALIFGTASYLIRARRSMDEANQPLLTDQYQCYAEEYEKLRNPNQSVV

SEQ ID NO: 125 - DNA, 1614 bp, Nomascus leucogenys
atgagtgctcctaaactcctctctctgggctgtatcttcttccccttgctgctttttcagcaggcccgggctcaattcccaagacagtgtgccactgttgaggctttgagaagtggtatgtgttgcccagacctgtcccccgtgtctgggcctgggacagaccgctgtggctcatcatcagggaggggcagatgcgaggcagtaactgcagactcccggccccacagccctcagtatccccatgatggcagagatgatcgggaggtctggcccttgcgcttcttcaataggacatgtcactgcaatggcaatttctcaggacacaactgtgggacatgccgtcctggctggagaggagctgcctgtgaccagagggttctcatagtcaggagaaatcttctggacttaagtaaagaagaaaagaaccactttgtccaggccctggatatggcaaagcgcacaactcaccctttatttgtcattgccaccaggagatcagaagaaatattggggccagatggcaacacaccacaatttgagaacatttccatttataactactttgtttggacacactattactcagtcaaaaagactttccttggggtagggcaggaaagctttggtgaagtggatttctctcatgagggaccagcttttctcacatggcacaggtaccaccttctgcgtctggagaaagacatgcaggaaatgttgcaagagccttctttctcccttccttactggaattttgcgacggggaaaaatgtctgtgatatctgcacggatgacttgatgggatccagaagcaactttgattccactctaataagcccaaactctgtcttttctcaatggcgagtggtctgtgactccttggaagattatgataccctggggacactttgtaacagcactgagagtgggccaattaggagaaatccagctggaaatgtggccagaccaatggtgcaacgtcttcctgaaccacaggatgtcgctcagtgcttggaagttggtttatttgacacgcctcctttttattccaactctacaaacagtttccgaaacacagtggaaggttacagtgatcccacaggaaagtatgaccctgctgttcgaagccttcacaatttggctcatctattcctgaatggaacagggggacaaacccatttgtctccaaatgatcctatttttgtcctcctgcacactttcacggatgcagtctttgatgaatggctgaggagatacaatgctgatatatccacatttccattggaaaatgcccctattggacataatagacaatacaacatggtgccattctggcccccagtcaccaacacagaaatgtttgttactgctccagacaacctgggatacacttatgaagttcaatggccaagtcgggagtttagtgtacctgagataattgccatagcagtagttgcctctttgttactggttgcactcatttttgggactgcctcttatctgattcgtgccagacgcagtatggatgaagctaaccagcctctcctcactgatcagtatcaatgctatgctgaagaatatgaaaaactccggaatcctaatcagtctgtggtctaa

SEQ ID NO: 126 - protein, 536 aa, Pongo abelii
  orangutan tyrosinase-related protein 1 (Tyrp1) protein precursor H2PS60
  SIGNAL (1)...(24): signal sequence
MSAPKLLSLGCIFFPLLLFQQARAQFPRECVSVEALRSGMCCPDLSPVSGPGTDRCGSSSGRGRCEAVTADSRPHSPQYPHDGRDDREVWPLRFFNRTCHCNGNFSGHNCGTCRPGWRGAACDQRVLIVRRNLLDLSKEEKNHFVQALDMAKRTTHPLFVIATRRSEEILGPDGNTPQFENISIYNYFVWTHYYSVKKTFLGVGQESFGEVDFSHEGPAFLTWHRYHLLRLEKDMQEMLQEPSFSLPYWNFATGKNVCDICTDDLMGSRSNFDSTLISSNSVFSQWRVVCDSLEDYDTLGTLCNSTENGPIRRNPAGNVARPMVQRLPEPQDVAQCLEVGLFDTPPFYSNSTNSFRNTVEGNDPTGKYDPAVRSLHNLAHLFLNGTGGQTHLSPNDPIFVLLHTFTDAVFDEWLRRYNADISTFPLENAPIGHNRQYNMVPFWPPVTNTEMFVTAPDNLGYTYEVQWPSREFSVPEIIAIAVVAALLLVALIFGTASYLIRARRSMDEANQPLLTDQYQCYAEEYEKLRNPNQSVV

SEQ ID NO: 127 - protein, 537 aa, Macaca fascicularis
  cynomolgus monkey tyrosinase-related protein 1 (Tyrp1) protein precursor G7PSC9
  SIGNAL (1)...(24): signal sequence
MSAPKLLSLGYIFFPLLLFQQAWAQFPRECATVEALRSGMCCPDLSPMSGPGTDRCGSSSGRGRCEAVTADSRPHSPRYPHDGRDDREVWPLRFFNRTCHCNGNFSGHNCGTCRPGWRGAACDQRVLVVRRNLLDLSKEEKNHFVRALDMAKRTTHPLFVIATRRSEEILGPDGNTPQFENISIYNYFVWTHYYSVKKTFLGAGQESFGEVDFSHEGPAFLTWHRYHLLRLEKDMQEMLQEPSFSLPYWNFATGKNVCDICTDDLMGSRSNFDSTLISPNSVFSQWRVVCDSLEDYDTLGTLCNSTESGPIRRNPAGNVARPMVQRLPEPQDVAQCLEVGLFDTPPFYSNSTNSFRNTVEGYSDPTGKYDPAVRSLHNLAHLFLNGTGGQTHLSPNDPIFVLLHTFTDAVFDEWLRRYNADISTFPLENAPIGHNRQYNMVPFWPPVTNTEMFVTAPDNLGYTYEVQWPSREFSVPEIIAIAVVAALLLVALIFGTASCLIRARRNMDEANQPLLTDQYQHYAEEYEKLRNPNQSVV

SEQ ID NO: 128 - DNA, 1614 bp, Macaca fascicularis
  cynomolgus monkey tyrosinase-related protein 1 (Tyrp1) DNA EHH57395
atgagtgctcctaaactcctctctctgggctatatcttcttccccctgctgctttttcagcaggcctgggctcagttcccaagagagtgtgccactgttgaggctttgaggagtggtatgtgttgcccagacctgtcccccatgtctgggcctgggacagaccgctgtggttcatcatcagggaggggcagatgcgaggcagtgactgcagattcccgaccccacagccctcggtatccccatgatggcagagatgatcgggaggtctggcccttgcgcttcttcaataggacatgtcactgcaatggcaatttctcaggacacaactgtgggacgtgccgtcctggctggagaggagctgcctgtgaccagagggttctcgtagtcaggagaaatcttctggacttaagtaaagaagaaaagaaccactttgtccgggccctggatatggcaaagcgcacaactcaccctttatttgtcattgccaccaggagatcagaagaaatattggggccagatggcaacacaccacaatttgagaacatttccatttataactactttgtttggacacactattactcagtcaagaagactttccttggggcagggcaggaaagctttggtgaagtggatttctctcatgaaggaccagcttttctcacatggcacaggtaccacctcctgcgtctggagaaagatatgcaggaaatgttgcaagagccttctttctcccttccttactggaattttgcgacggggaaaaatgtctgtgatatctgcacggatgacttgatgggatccagaagcaactttgattccactctaataagcccaaactctgtcttttctcaatggcgagtggtctgtgactccttggaagattatgataccctgggaacactttgtaacagcactgagagcgggccaattaggagaaatccagctggaaatgtggccagaccaatggtgcaacgtcttcctgaaccacaggatgtcgctcagtgcttggaagttggtttatttgacacacctcctttttattccaactctacaaacagtttcagaaacacagtggaaggttacagtgatcccacaggaaagtatgaccctgctgttcgaagccttcacaatttggctcatctattcctgaatggaacagggggacaaacccatttgtctccgaatgatcctatttttgtccttctgcacactttcacggatgcagtctttgatgaatggctgaggagatacaatgctgatatatctacatttccattggaaaatgcccctattggacataatagacaatacaacatggtgccattctggcccccagtcaccaacacagaaatgtttgttactgctccagacaacctgggatacacttatgaagttcaatggccaagtcgggagtttagtgtacctgagataattgccatagcagtagttgccgctttgttactggttgcgttgatttttgggactgcttcttgtctgattcgtgccagacgcaatatggatgaagctaaccagcctctcctcactgatcaatatcaacactatgctgaagaatatgaaaaactccgaaatcctaatcagtctgtggtctaa

SEQ ID NO: 129 - protein, 537 aa, Macaca mulatta
  Rhesus macaque tyrosinase-related protein 1 (Tyrp1) protein precursor F6Z4J0
  SIGNAL (1)...(24): signal sequence
MSAPKLLSLGYIFFPLLLFQQAWAQFPRECATVEALRSGMCCPDLSPMSGPGTDRCGSSSGRGRCEAVTADSRPHSPRYPHDGRDDREVWPLRFFNRTCHCNGNFSGHNCGTCRPGWRGAACDQRVLVVRRNLLDLSKEEKNHFVRALDMAKRTTHPLFVIATRRSEEILGPDGNTPQFENISIYNYFVWTHYYSVKKTFLGAGQESFGEVDFSHEGPAFLTWHRYHLLRLEKDMQEMLQEPSFSLPYWNFATGKNVCDICTDDLMGSRSNFDSTLISPNSVFSQWRVVCDSLEDYDTLGTLCNSSESGPIRRNPAGNVARPMVQRLPEPQDVAQCLEVGLFDTPPFYSNSTNSFRNTVEGYSDPTGKYDPAVRSLHNLAHLFLNGTGGQTHLSPNDPIFVLLHTFTDAVFDEWLRRYNADISTFPLENAPIGHNRQYNMVPFWPPVTNTEMFVTAPDNLGYTYEVQWPSREFSVPEIIAIAVVAALLLVALIFGTASCLIRARRNMDEANQPLLTDQYQHYAEEYEKLRNPNQSVV

SEQ ID NO: 130 - DNA, 1614 bp, Macaca mulatta
  Rhesus macaque tyrosinase-related protein 1 (Tyrp1) DNA
atgagtgctcctaaactcctctctctgggctatatcttcttccccctgctgctttttcagcaggcctgggctcagttcccaagagagtgtgccactgttgaggctttgaggagtggtatgtgttgcccagacctgtcccccatgtctgggcctgggacagaccgctgtggttcatcatcagggaggggcagatgcgaggcagtgactgcagattcccgaccccacagccctcggtatccccatgatggcagagatgatcgggaggtctggcccttgcgcttcttcaataggacatgtcactgcaatggcaatttctcaggacacaactgtgggacgtgccgtcctggctggagaggagctgcctgtgaccagagggttctcgtagtcaggagaaatcttctggacttaagtaaagaagaaaagaaccactttgtccgggccctggatatggcaaagcgcacaactcaccctttatttgtcattgccaccaggagatcagaagaaatattggggccagatggcaacacaccacaatttgagaacatttccatttataactactttgtttggacacactattactcagtcaagaagactttccttggggcagggcaggaaagctttggtgaagtggatttctctcatgaaggaccagcttttctcacatggcacaggtaccacctcctgcgtctggagaaagatatgcaggaaatgttgcaagagccttctttctcccttccttactggaattttgcgacggggaaaaatgtctgtgatatctgcacggatgacttgatgggatccagaagcaactttgattccactctaataagcccaaactctgtcttttctcaatggcgagtggtctgtgactccttggaagattatgataccctgggaacactttgtaacagcagtgagagcgggccaattaggagaaatccagctggaaatgtggccagaccaatggtgcaacgtcttcctgaaccacaggatgtcgctcagtgcttggaagttggtttatttgacacacctcctttttattccaactctacaaacagtttcagaaacacagtggaaggttacagtgatcccacaggaaagtatgaccctgctgttcgaagccttcacaatttggctcatctattcctgaatggaacagggggacaaacccatttgtctccgaatgatcctatttttgtcctcctgcacactttcacggatgcagtctttgatgaatggctgaggagatacaatgctgatatatctacatttccattggaaaatgcccctattggacataatagacaatacaacatggtgccattctggcccccagtcaccaacacagaaatgtttgttactgctccagacaacctgggatacacttatgaagttcaatggccaagtcgggagtttagtgtacctgagataattgccatagcagtagttgccgctttgttactggttgcgttgatttttgggactgcttcttgtctgattcgtgccagacgcaatatggatgaagctaaccagcctctcctcactgatcaatatcaacactatgctgaagaatatgaaaaactccgaaatcctaatcagtctgtggtctaa

SEQ ID NO: 131 - protein, 537 aa, Oryctolagus cuniculus
  rabbit tyrosinase-related protein 1 (Tyrp1) protein precursor G1SLB6
  SIGNAL (1)...(24): signal sequence
MKAQKLLSLHCIFSLVLLFQQSWAQFPRQCATVEALRSGVCCPDLSPLAGPGTDPCGSSSGRGRCEAVTADSRPHSPHYPHDGRDDREAWPTRFFNRTCHCNGNFSGHNCGTCRPGWRGAACDQRILTVRRNILDLSIEEKNHFVRALDMAKRTAHPQFVIATRRSEEILGPDGNTPQFENISIYNYFVWTHYYSVKKTFLGPGQESFGEVDFSHEGPAFLTWHRYHLLQLERDMQEMLQEPTFSLPYWNFATGKNICDICTDDMMGSRSNFDSSLISPNSVFSQWRVVCESLEDYDTLGTLCNSTENGPIRRNPAGNVARPMVQRLPEPQDVTQCLEVGVFDTPPFYSNSTNSFRNTVEGYSAPTGKYDPAVRSLHNLAHLFLNGTGGQTHLSPNDPIFVLLHTFTDAVFDEWLRRYNADISTFPLENAPIGHNRQYNMVPFWPPITNIEMFVTAPDNLGYTYEVQWPGQNFSVSEIITIAVVAALLLIAVIFVGASCLIRARNRMDEANQPLLTDQYQHYAGDYEKIQNPNQSMV

SEQ ID NO: 132 - DNA, 1614 bp, Oryctolagus cuniculus
  rabbit tyrosinase-related protein 1 (Tyrp1) DNA AFC40954.1
atgaaagctcagaaattgttgtctctgcactgtatcttttcccttgtgctgcttttccagcaatcctgggctcagttcccacgccaatgtgccaccgttgaggctttgagaagtggtgtgtgctgcccagacctgtcccctctagctgggccggggactgacccctgtggctcatcatcaggcagaggcaggtgtgaagcagtgactgcagactcccgaccccacagtccccattacccccatgatggcagagatgatcgggaggcctggcccacacggttcttcaatagaacatgccactgcaatggtaacttctcaggacacaactgtggcacttgccgtcctggctggaggggagctgcctgtgaccagaggattcttacagtcaggagaaatattctggatttaagtattgaggaaaagaaccacttcgtccgagccctggatatggccaagcgcacagctcaccctcagtttgtcattgccaccaggagatcagaggaaatattggggccagatggcaatacaccacaatttgagaatatttccatttataactactttgtttggacacactattactcagtcaaaaagacttttcttggtccggggcaggaaagctttggtgaagttgatttttctcatgaaggaccggctttcctcacatggcacaggtaccacctactgcagctggagagagacatgcaggaaatgttgcaagaacctactttctcccttccttactggaattttgcaactggcaaaaacatatgcgatatctgcactgatgacatgatgggatcgagaagcaacttcgattccagtcttataagtccaaactccgtcttctctcaatggcgagtggtctgcgaatctttggaagattatgataccctcggaacactttgtaacagcactgagaatgggccaatcaggaggaatccagctggaaatgtggctagaccgatggtgcagcgccttcctgaaccacaggatgtcacccagtgcttggaagttggtgtatttgacacacctcctttttattccaattccacaaatagtttccgaaacacagtggaaggttacagtgctcccacrggaaagtacgatcctgctgttcggagtcttcacaatttagcccatctattcctgaatggaacagggggacaaacccatttgtctccaaatgatcctatttttgtcctcctgcatactttcactgatgcagtctttgatgaatggctaaggagatacaatgctgatatatccacctttccattggaaaatgcccctattggacataatagacaatacaatatggtaccattctggcctccaattaccaatatagagatgtttgttactgctccagacaaccttggatatacttatgaagttcaatggccaggtcaaaattttagtgtatctgagattattaccatagcagtagttgctgctttattgctgattgcagtcatttttgtgggtgcttcttgcctgattcgtgccagaaacagaatggatgaagctaatcagcctctcctcactgatcagtatcaacactatgctggagactatgaaaaaatccagaatccaaatcagtccatggtctga

SEQ ID NO: 133 - protein, 537 aa, Sus scrofa
  pig tyrosinase-related protein 1 (Tyrp1) protein precursor D3JZR3
  SIGNAL (1)...(24): signal sequence
MKAQKLLSLGYTFLPLLFIQQAWAQFPRECTTIEALRSGVCCPDLSPLSGPGTDRCGFSSGRGRCEAVTADSRPHSHHYHHDGRDDREGWPTRFFNRTCHCNGNFSGHNCGTCRPGWRGPACDQKVLTVRRNLLDLSTEEKNHFVRALDMAKRTMHPQFVIATRRSEEILGPDGNTPQFENISIYNYFVWTHYYSVKKTFLGAGQESFGEVDFSHEGPAFLTWHRYHLLQLERDMQEMLQDPSFSLPYWNFATGKNTCDICTDDLMGSRSNFDSTLISPNSVFSQWRVVCESLEDYDTLGTLCNSTEGGPIRRNPAGNVARPMVQRLPEPQDVAQCLEVSLFDTPPFYSNSTNSFRNTVEGYSDPTGRYDPAVRSLHNLAHLFLNGTGGQTHLSPNDPIFVLLHTFTDAVFDEWLRRYNADISIFPLENAPIGHNRQYNMVPFWPPITNIEMFVTAPDNLGYTYEVQWPSRDFSVSEIVTIAVVAALLLVAVIFMGTSCLIRARSNMDEANQPLLTDQYQHYAEEYEKIQNPNQSMV

SEQ ID NO: 134 - DNA, 1614 bp, Sus scrofa
  pig tyrosinase-related protein 1 (Tyrp1) DNA ADB96142.1
atgaaagctcagaaactcctctctctggggtacactttcttgcctctgctgtttattcagcaggcctgggctcagttccccagagagtgtaccaccattgaggctttgagaagtggggtatgttgcccagatctgtccccactgtctgggcccgggactgaccgctgtggcttctcctcagggaggggcaggtgtgaggccgtgacagcagactcccgaccccacagccaccactaccaccatgatggcagagatgaccgagagggttggcccacacggttcttcaacaggacatgccactgcaacggcaatttttcaggacacaactgtgggacttgccgtcctggatggagaggacctgcctgtgaccagaaggttctcacagtcaggagaaacctactggacctaagtacagaagaaaagaaccattttgtacgggccctggatatggcaaagcgcacaatgcaccctcagttcgtcattgccaccaggagatcagaagaaatattggggccggatggcaacacaccacaatttgagaacatttccatttacaactactttgtctggacacactactactcagtcaaaaagactttccttggggcagggcaggaaagctttggtgaagtggatttctctcacgaaggacctgcctttctcacatggcacaggtaccacttactgcagctggagagagacatgcaggaaatgttgcaggatccttctttctccctcccttactggaattttgccactgggaagaacacctgtgacatttgcactgatgacttgatgggatcaagaagcaactttgattccactcttataagcccgaactctgtcttttctcaatggcgagtggtctgtgaatccttggaagattacgataccctgggaaccctttgtaacagcactgagggtgggccaattaggagaaatccagcaggaaatgtggccagaccaatggtgcaacgtcttcctgaaccacaggatgtcgctcagtgcttggaagtcagtttatttgacacacctcctttttattccaattctacaaacagtttccgaaacacagtagaaggttacagtgatcccacaggaaggtatgaccctgctgtccgaagccttcacaatctggctcatctattcctgaatggaacagggggacaaactcatttatctcccaatgatcctatttttgtccttctacatactttcactgatgcagtctttgatgaatggctaaggagatataatgctgatatatccatatttccactggaaaatgcccctattggacacaacagacaatacaatatggtaccattttggcctccaattaccaacatagaaatgtttgttactgctccagacaacctaggatatacttatgaagttcaatggccaagtcgggattttagtgtttctgagattgttaccatagcagtagttgctgctttattactggttgcagtcatttttatgggtacctcttgtctgattcgtgccagaagcaacatggatgaagcaaatcagcctctcctcactgatcagtatcaacactatgccgaagaatatgaaaaaatccagaatcctaatcagtctatggtctga

SEQ ID NO: 135 - protein, 537 aa, Loxodonta africana
  elephant tyrosinase-related protein 1 (Tyrp1) protein precursor G3SPG1
  SIGNAL (1)...(24): signal sequence
MKPCKPLSLGYVFFPLLLLQQVCAQFPRECVTADALRSGMCCPDLSPVSGPGTDRCGSSTGRGRCEVVTADSRPHSPQYPHDGTDDREGWPTRFFNRTCHCNGNFSGHNCGTCRPGWRGTACDRRVLIVRRNLLDLSVEEKNRFVRALDMAKRTTHPQFVIATRRSEEILGPDGNTPQFENISIYNYFVWTHYYSVKKTFLGKGQESFGEVDFSHEGPAFLTWHRYHLLQLEKDMQEMLQDPSFSLPYWNFATGKNVCDICTDDLMGSRSNFDSTLISPNSVFSQWRIVCESLEDYDTLGTLCNSTEGGPIRRNPAGNVARPMVQRLPEPQDVTQCLEVGLFDTPPFYSNSTNSFRNTVEGYSDPTGKYDPAVRSLHNLAHLFLNGTGGQTHLSPNDPIFVLLHTFTDAVFDEWLRRYNADISSFPLENAPIGHNRQYNMVPFWPPVTSTEMFVTAPDNLGYAYEVQWPSRDFSISEIVTIGVVASLVVVAVIFAGASCLIRARSHMDEANQPLLSDHYQHYTDDYEKIQNPNQSVV

SEQ ID NO: 136 - DNA, 1614 bp, Loxodonta africana
  elephant tyrosinase-related protein 1 (Tyrp1) DNA XM_003407348.1
atgaaaccttgtaaacctctctctctgggttatgtcttctttcccctgctgcttcttcagcaggtctgtgctcagttcccaagagagtgtgtcactgctgacgctttgagaagtggcatgtgttgcccagacctgtctcctgtgtctgggcctgggacagaccgctgtggctcgtcaaccggcaggggcaggtgtgaggtggtgactgcagactcccgaccccacagtccgcagtaccctcacgatggcacagatgaccgggagggctggcccacacggttcttcaatagaacatgccactgcaatggcaatttctcaggacacaactgtgggacatgccgtcctgggtggagaggcactgcttgtgaccgaagggttctcatagtcaggagaaatcttttggacttaagtgtagaagaaaagaaccgttttgtccgagccctggatatggcaaagcgcacaactcatccccagtttgtcattgccaccaggagatcagaagaaatactggggccagatggcaacacaccacaatttgagaacatttccatctacaactactttgtttggacacactattactccgtcaaaaagactttccttgggaaagggcaggagagctttggtgaagtagatttctctcatgaaggaccagcttttctcacatggcacaggtaccatctactgcagctggagaaggacatgcaggaaatgttgcaggatccttctttctcccttccttactggaattttgcaactggaaagaatgtctgtgatatctgcaccgatgacttgatgggatcgagaagcaactttgattccactcttataagtccgaactctgtcttttctcaatggagaatagtctgtgaatccctggaagattatgataccctgggaaccctttgtaacagcactgaaggtgggcccattaggagaaatccagccggaaacgtggctagaccaatggtgcaacgtcttcctgaaccacaggatgtcactcagtgcttggaagtcggtttatttgacacacctcctttttactccaattctacaaatagcttccgaaacacagtggaaggttatagtgatcccacaggaaagtatgatcctgccgttcgaagccttcacaatttggctcatctctttctgaatggaacagggggacaaacccatttatctccaaatgatcctatttttgtcctcctgcatactttcacggatgcagtctttgatgaatggctgaggagatacaatgctgatatatcctcatttccactggaaaatgcccctattggacataatagacaatataatatggtgccattctggccaccagtcaccagcacagagatgtttgttactgctccagacaacctgggatatgcttatgaagtacaatggcctagtcgggattttagtatttcggagattgttaccataggagtagttgcttctctagtagtggttgcggtcatttttgctggtgcgtcttgtctgattcgtgccagaagccacatggatgaagcaaatcagcctctcctctctgatcactatcaacactatactgatgattatgaaaaaattcagaatcctaatcaatctgtggtctga

SEQ ID NO: 137 - protein, 537 aa, Canis familiaris
  dog tyrosinase-related protein 1 (Tyrp1) protein precursor F1PVI4
  SIGNAL (1)...(24): signal sequence
MKAHKLLSLGSIFLFLLFFHQTWAQFPRECATVEALRNGVCCPDLSPVSGPGTDPCGFSSGRGRCEAVIADSRPHSHHYPHDGRDDREVWPTRFFNRTCHCNGNFSGHNCGTCRPGWRGAACDQKVLTVRRNLLALNTEEKNHFVQALDMAKRTIHPQFVIATRRSEEIFGPDGNTPQFENISIYNYFVWTHYYSVKKTFLGPGQESFGEVDFSHEGPAFLTWHRYHLLQLERDMQEMLQDPSFSLPYWNFATGKNVCDICTDDLMGSRSNFDSTLISLNSVFSQWRVVCESLEDYDTLGTLCNSTEGGPIRRNPAGNVARPMVQRLPEPQDVAQCLEVGLFDTPPFYSNSTNSFRNTVEGYSDPTGKYDPAIRSLHNLAHLFLNGTGGQTHLSPNDPIFVLLHTFTDAVFDEWLRRYKADVSTFPLENAPIGHNRQYNMVPFWPPVTNVEMFVTAPDNLGYTYEVQWPSRNLSIPEIVTIAVVAALVLVAVIFAGASCLIRARSNMDEANQPLLTDQYQHYADDYEKMQNPNQSMV

SEQ ID NO: 138 - DNA, 1614 bp, Canis familiaris
  dog tyrosinase-related protein 1 (Tyrp1) DNA
atgaaagctcataaactcctctctctgggaagcatcttcttgttcctgctttttttccatcagacctgggctcaattcccaagagagtgtgccactgttgaggccttgagaaatggtgtgtgttgcccagacctgtccccagtgtctgggcctgggactgacccctgtggcttctcatcagggcgggggaggtgtgaggcagtgatagcagactccagaccccacagccaccattacccccatgatggcagagatgatcgggaggtttggcccacacggttcttcaacaggacctgccactgcaatggcaatttctcaggacacaactgtgggacttgccgtccaggatggagaggagctgcctgtgatcagaaggttctcacagtcaggagaaacctcctggccttgaatacagaagagaagaaccactttgtccaggccttggatatggcaaagcgcacaattcaccctcagtttgtcattgcaaccaggagatcagaagaaatatttgggccagatggcaacacaccacagtttgagaacatttccatttataactactttgtttggacacactattactcagtcaaaaagactttccttgggccaggacaggaaagctttggtgaggtggatttctctcatgaaggaccagcttttctcacatggcacagataccacctactgcagttggagagagacatgcaggaaatgttgcaggatccttcattctccctcccctactggaattttgcaactgggaagaatgtctgtgacatttgcactgatgacctgatgggatcaagaagcaactttgattccactcttataagcctgaactctgtcttttctcaatggcgagtggtctgcgaatccttggaggattatgataccctgggaaccctttgcaatagtactgagggtgggccaattaggagaaatccagctggaaatgtggctagaccaatggtgcaacgtcttcctgaaccacaggatgtcgctcagtgcttggaagttggtttatttgacacacctcctttttactccaattctactaacagtttccgaaacacagtggaaggttacagtgatcccacaggaaagtatgaccctgctattcgaagccttcacaatttggctcatctatttctgaatggaacagggggacaaacccatttatccccaaatgatcctatttttgttctcctacatactttcactgatgcagtttttgatgaatggctgaggagatataaggctgatgtatccacatttccattggaaaatgcccctattgggcataatagacaatacaatatggtaccattctggcctccagttaccaatgtagaaatgtttgttactgctccagacaatctgggatatacttacgaagttcaatggccaagtcggaatcttagtattcctgagattgttaccatagcggtagttgctgctttagtactggttgcagtcatttttgcgggtgcttcttgcctgattcgtgccagaagcaacatggatgaagcgaatcaacctcttctcactgatcagtatcaacactatgctgacgactatgaaaaaatgcagaatcctaatcaatctatggtctaa

SEQ ID NO: 139 - protein, 537 aa, Capra hircus
  goat tyrosinase-related protein 1 (Tyrp1) protein precursor I1SV19
  SIGNAL (1)...(24): signal sequence
MKSPTLLSLGYMFLVLLFFQQAWAQFPRECATIEALRNGVCCPDLSPLSGPGSDRCGFSSGRGRCEVVIADSRPHSHHYPHDGRDDREAWPTRFFNRTCHCNGNFSGHNCGTCRPGWGGAACDQRVLTVRRNLLDLSTEEKNRFVQALDMAKHTTHPQFVIATRRSEEILGPDGNTPQFENISIYNYFVWTHYYSVKKTFLGAGQESFGEVDFSHEGPAFLTWHRYHLLQLERDMQEMLQDPSFSLPYWNFATGKNTCDICTDDLMGSRSNFDSTLISPNSVFSQWRVVCESLEDYDTLGTLCNSTEGGPIKRNPAGNVARPMVQRLPEPQDIAQCLEVGSFDTPPFYSNSTNSFRNTVEGYSDPTGRYDPAVRSLHNLAHLFLNGTGGQTHLSPNDPIFVLLHTFTDAVFDEWLRRYNADISTFPLENAPIGHNRQYNMVPFWPPITNIEMFVTAPDNLGYTYEVQWPGRSFSIPEIVTIAVVAALLLVAVIFAGASCLIRARSNMDEANQPLLTDQYQHYIEENEKIHNPNQSMV

SEQ ID NO: 140 - DNA, 1614 bp, Capra hircus
  goat tyrosinase-related protein 1 (Tyrp1) DNA AEF01557.1
atgaaatctcctacactcctctctctgggttacatgttcctggtcctgctttttttccagcaggcctgggctcagttcccgagagagtgtgctaccattgaggctttgaggaatggcgtgtgttgcccagacctgtccccactgtctgggcctgggtctgaccgctgcggtttctcatcagggaggggcagatgtgaggtggtgatagccgactcccggccccacagccaccactacccacatgatggcagagatgaccgagaggcctggcccacacgcttcttcaacaggacatgccactgcaatggcaatttctcaggacacaactgtggaacctgccgccctggctggggaggggctgcctgtgaccagagggttctcacagtcaggagaaaccttctggacttaagcacagaagaaaagaaccgctttgtccaggctctggatatggcaaagcacaccactcaccctcagtttgtcatcgccaccaggaggtcagaagaaatattggggccagatggcaacacaccacagtttgagaacatttccatttataactactttgtttggacacactactactcagtcaaaaagactttcctgggagcaggacaggaaagctttggtgaagtggatttctctcacgagggaccagcatttctcacatggcacaggtaccacctgctgcagctggagagagacatgcaggaaatgttgcaggatccttctttctccctcccttactggaattttgccactgggaagaacacctgcgacatttgcaccgatgacttgatgggatcaagaagcaactttgattccactcttataagcccgaactccgtcttttctcaatggcgagtagtctgcgaatccttggaagattatgataccctgggaaccctatgcaacagcactgagggtgggccaattaagagaaacccagctggaaatgtggccagaccaatggtgcaacgtcttcctgaaccacaggatatcgctcagtgcttggaagttggttcatttgacacacctcctttttattctaattctacaaacagcttccgaaacacagtggaaggttacagtgatcccacaggaaggtatgaccctgctgtgcgaagccttcacaatttggctcatctattcctgaatggaacagggggacaaactcatttatctcccaatgatcctatttttgtcctcctacatacattcactgacgcagtatttgatgaatggctgaggcgatacaatgctgatatatccacatttccactggaaaatgcccctattggacataatagacaatacaatatggtaccattttggcctccaattaccaacatagaaatgtttgttactgctccagacaacctgggctatacttacgaagttcaatggccaggtcggagttttagtattcctgagattgtcaccatagcagtagtggctgcattattactggtcgcggtcatttttgcaggtgcctcttgtctgattcgtgccagaagcaacatggatgaagccaatcagcctctccttactgatcagtatcaacactacattgaagaaaatgaaaaaatccataaccctaatcagtctatggtctaa

SEQ ID NO: 141 - protein, 537 aa, Bos taurus
  cow tyrosinase-related protein 1 (Tyrp1) protein precursor F1MBG9
  SIGNAL (1)...(24): signal sequence
MKSPTLLSLGYMFLVLLFFQQAWAQFPRECATIEALRNGVCCPDLSPLSGPGSDRCGLSSGRGRCEVVIADSRPHSHHYPHDGRDDREGWPTRFFNRTCHCNGNFSGHNCGTCRPGWGGAACDQRVLTVRRNLLDLSTEEKNRFVRALDMAKRTTHPQFVIATRRSEEILGPDGNTPQFENISIYNYFVWTHYYSVKKTFLGAGQESFGEVDFSHEGPAFLTWHRYHLLQLERDMQEMLQDPSFSLPYWNFATGKNTCDICTDDLMGSRSNFDSTLISPNSVFSQWRVVCESLEDYDTLGTLCNSTEGGPIKRNPAGNVARPMVQRLPKPQDVAQCLEVGSFDTPPFYSNSTNSFRNTVEGYSHPTGRYDPAVRSLHNLAHLFLNGTGGQTHLSPNDPIFVLLHTFTDAVFDEWLRRYNADISTYPLENAPIGHNRQYNMVPFWPPVTNIEMFVTAPDNLGYTYEVQWPSRSFSISEIVTIAVVAALSLVAVIFAGASCLIRARSNMDEANQPLLTDQYQHYIEEYEKIHNPNQSVV

SEQ ID NO: 142 - protein, 537 aa, Ovis aries
  sheep tyrosinase-related protein 1 (Tyrp1) protein precursor B3VKX4
  SIGNAL (1)...(24): signal sequence
MKSPTLLSLGYMFLVLLFFQQAWAQFPRECATIEALRNGVCCPDLSPLSGPGSDRCGFSSGRGRCEVVIADSRPHSHHYPHDGRDDREAWPTRFFNRTCHCNGNFSGHNCGTCRPGWGGAACDQRVLTVRRNLLDLSTEEKNRFVQALDMAKHTTHPQFVIATRRSEEILGPDGNTPQFENISIYNYFVWTHYYSVKKTFLGAGQESFGEVDFSHEGPAFLTWHRYHLLQLERDIQEMLQDPSFSLPYWNFATGKNTCDICTDDLMGSRSNFDSTLISPNSVFSQWRVVCESLEDYDTLGTLCNSTEGGPIKRNPAGNVARPMVQRLPEPQDIAQCLEVGSFDTPPFYSNSTNSFRNTVEGYSDPTGRYDPAVRSLHNLAHLFLNGTGGQTHLSPNDPIFVLLHTFTDAVFDEWLRRYNADISTFPLENAPIGHNRQYNMVPFWPPITNIEMFVTAPDNLGYTYEVQWPGRSFSIPEIVTIAVVAALLLVAVIFAGASCLIRARSNMDEANQPLLTDQYQHYIEENEKIHNPNQSMV

SEQ ID NO: 143 - DNA, 1614 bp, Ovis aries
  sheep tyrosinase-related protein 1 (Tyrp1) DNA ACF21680.1
atgaaatctcctacactcctctctctgggttacatgttcctggtcctgctttttttccagcaggcctgggctcagttcccgagagagtgtgctaccattgaggctttgaggaatggcgtgtgttgcccagacctgtccccactgtctgggcctgggtctgaccgctgcggtttctcatcagggaggggcagatgtgaggtggtgatagccgactcccggccccacagccaccactacccacatgatggcagagatgaccgagaggcctggcccacacgcttcttcaacaggacatgccactgcaatggcaatttctcaggacacaactgtggaacctgccgccctggctggggaggggctgcctgtgaccagagggttctcacagtcaggagaaaccttctggacttaagcacagaagaaaagaaccgctttgtccaggctctggatatggcaaagcacaccactcaccctcagtttgtcatcgccaccaggaggtcagaagaaatattggggccagatggcaacacaccacagtttgagaacatctccatttataactactttgtttggacacactactactcagtcaaaaagactttcctgggagcaggacaggaaagctttggtgaagtggatttctctcacgagggaccagcatttctcacatggcacaggtaccacctgctgcagctggagagagacatccaggaaatgttgcaggatccttctttctccctcccttactggaattttgccactgggaagaacacctgcgacatttgcaccgatgacttgatgggatcaagaagcaactttgattccactcttataagcccgaactctgtcttttctcaatggcgagtagtctgcgaatccttggaagattatgataccctgggaaccctatgcaacagcactgagggtgggccaattaagagaaacccagctggaaatgtggccagaccaatggtgcaacgtcttcctgaaccacaggatatcgctcagtgcttagaagttggttcatttgacacacctcctttttattctaattctacaaacagcttccgaaacacagtggaaggttacagtgatcccacaggaaggtacgaccctgctgtgcgaagccttcacaatttggctcatctattcctgaatggaacagggggacaaactcatttatctcccaatgatcctatttttgtcctcctacatacattcactgacgcggtatttgatgaatggctgaggcgatacaatgctgatatatccacatttccactggaaaatgcccctattggacataatagacaatacaatatggtaccattttggcctccaattaccaacatagaaatgtttgttactgctccagacaacctgggctatacttacgaagttcaatggccaggtcggagttttagtattcctgagattgtcaccatagcagtagtggctgcattattactggtcgcggtcatttttgcaggtgcctcttgtctgattcgtgccagaagcaacatggatgaagccaatcagcctctccttactgatcagtatcaacactacattgaagaaaatgaaaaaatccataaccctaatcagtctatggtctaa

SEQ ID NO: 144 - protein, 537 aa, Mus musculus
  mouse tyrosinase-related protein 1 (Tyrp1) protein precursor P07147
  SIGNAL (1)...(24): signal sequence
MKSYNVLPLAYISLFLMLFYQVWAQFPRECANIEALRRGVCCPDLLPSSGPGTDPCGSSSGRGRCVAVIADSRPHSRHYPHDGKDDREAWPLRFFNRTCQCNDNFSGHNCGTCRPGWRGAACNQKILTVRRNLLDLSPEEKSHFVRALDMAKRTTHPQFVIATRRLEDILGPDGNTPQFENISVYNYFVWTHYYSVKKTFLGTGQESFGDVDFSHEGPAFLTWHRYHLLQLERDMQEMLQEPSFSLPYWNFATGKNVCDVCTDDLMGSRSNFDSTLISPNSVFSQWRVVCESLEEYDTLGTLCNSTEGGPIRRNPAGNVGRPAVQRLPEPQDVTQCLEVRVFDTPPFYSNSTDSFRNTVEGYSAPTGKYDPAVRSLHNLAHLFLNGTGGQTHLSPNDPIFVLLHTFTDAVFDEWLRRYNADISTFPLENAPIGHNRQYNMVPFWPPVTNTEMFVTAPDNLGYAYEVQWPGQEFTVSEIITIAVVAALLLVAAIFGVASCLIRSRSTKNEANQPLLTDHYQRYAEDYEELPNPNHSMV

SEQ ID NO: 145 - DNA, 1614 bp, Mus musculus
  mouse tyrosinase-related protein 1 (Tyrp1) DNA CAA27323.1
atgaaatcttacaacgtcctccccctagcctatatctcccttttcctgatgctgttttatcaggtttgggctcagtttccacgagagtgtgccaatattgaggctctgagacgtggggtgtgttgcccagacctgctcccttcctctggaccggggactgacccttgtggctcatcatcaggaagaggcaggtgtgtggctgtgattgcagactcccgaccccacagccgccattatccccacgatggtaaagatgaccgagaagcctggcctctgaggttctttaatagaacatgtcagtgcaatgataatttctcaggacacaactgtgggacttgccgtcctgggtggagaggagctgcatgcaaccagaaaattctcacagtcaggagaaatcttctagacttaagtccagaagaaaagagccactttgtcagggccttggatatggcgaagcgcacaactcaccctcaatttgtcattgccacaaggaggttagaagacatactgggaccagatggcaacacaccacaatttgagaacatttccgtttataactactttgtttggacacactattattcagtcaaaaaaaccttcctcgggacaggacaggaaagctttggggatgtggatttctctcacgaaggacccgcttttctcacatggcacaggtaccatctgctgcagctggagagagacatgcaggagatgctgcaggagccttctttctcccttccttactggaattttgcaactgggaaaaacgtctgcgatgtctgcactgatgacttgatgggatccagaagcaacttcgattctactcttataagccccaactctgtcttttctcaatggagagtggtctgtgaatccttggaagagtacgataccctgggaacactttgtaacagcactgagggtggaccaatcaggagaaacccagctggaaatgtagggagaccagcagtgcagcgtcttcctgagccacaggatgtcactcagtgcttggaggtccgtgtatttgacacacctcctttttattccaattctacagacagttttcgaaatacagtggaaggttacagtgctcccacgggaaaatatgaccctgctgttcgaagccttcacaacctggcccacctcttcctgaatggaacgggaggacaaacccatttgtctcccaatgatcctatttttgtcctcctgcacactttcactgatgcggtctttgacgaatggctaaggaggtataacgccgatatttctaccttcccgttggaaaacgcacctattggacataacaggcaatacaacatggtgccattctggcctccagttaccaacacagaaatgtttgttactgctccagacaatctgggatatgcttatgaagttcaatggccaggtcaggagtttactgtatctgaaatcattaccattgctgtagtggctgcgttgttacttgtagctgccattttcggggttgcttcttgtctgatccgttctagaagcaccaagaatgaagccaaccagcctctcctcactgatcactatcaacgctatgctgaggactatgaggagctcccgaatcctaaccactccatggtctga

SEQ ID NO: 146 - protein, 496 aa, Homo sapiens
  human L-dopachrome tautomerase (DCT) protein mature P40126
QFPRVCMTVDSLVNKECCPRLGAESANVCGSQQGRGQCTEVRADTRPWSGPYILRNQDDRELWPRKFFHRTCKCTGNFAGYNCGDCKFGWTGPNCERKKPPVIRQNIHSLSPQEREQFLGALDLAKKRVHPDYVITTQHWLGLLGPNGTQPQFANCSVYDFFVWLHYYSVRDTLLGPGRPYRAIDFSHQGPAFVTWHRYHLLCLERDLQRLIGNESFALPYWNFATGRNECDVCTDQLFGAARPDDPTLISRNSRFSSWETVCDSLDDYNHLVTLCNGTYEGLLRRNQMGRNSMKLPTLKDIRDCLSLQKFDNPPFFQNSTFSFRNALEGFDKADGTLDSQVMSLHNLVHSFLNGTNALPHSAANDPIFVVLHSFTDAIFDEWMKRFNPPADAWPQELAPIGHNRMYNMVPFFPPVTNEELFLTSDQLGYSYAIDLPVSVEETPGWPTTLLVVMGTLVALVGLFVLLAFLQYRRLRKGYTPLMETHLSSKRYTEEA

SEQ ID NO: 147 - protein, 519 aa, Gorilla gorilla
  gorilla L-dopachrome tautomerase (DCT) protein precursor G3S218
  SIGNAL (1)...(23): signal sequence
MSPLWWGFLLSCLGCKILPGAQAQFPRVCMTVDSLVNKECCPRLGAESANVCGSQQGRGQCTEVRADRRPWSGPYILRNQDDRELWPRKFFHRTCKCTGNFAGYNCGDCKFGWTGPNCERKKPPVIRQNIHSLSPQEREQFLGALDLAKKSVHPDYVITTQHWLGLLGPNGTQPQFANCSVYDFFVWLHYYSVRDTLLGPGRPYRAIDFSHQGPAFVTWHRYHLLCLERDLQQLIGNESFALPYWNFATGRNECDVCTDQLFGAARPDDPTLISRNSRFSSWETVCDSLDDYNHWVTLCNGTYEGLLRRNQMGRNSMKLPTLKDIRDCLSLQKFDNPPFFQNSTFSFRNALEGFDKADGTLDSQVMSLHNLVHSFLNGTNALPHSAANDPIFVVLHSFTDAIFDEWMKRFNPPADAWPQELAPIGHNRMYNMVPFFPPVTNEELFLTSDQLGYSYAIDLPVSVEETPGWPTTLLVVMGTLVALVGLFVLLAFLQYRRLRKGYTPLMETHLSSKRYTEEA

SEQ ID NO: 148 - protein, 519 aa, Pongo abelii
  orangutan L-dopachrome tautomerase (DCT) protein precursor H2NK50
  SIGNAL (1)...(23): signal sequence
MSPLWWGLLLSCLGCKILPGAQAQFPRVCMTVDSLVNKECCPRLGAESANVCGSQQGRGQCTEVRADTRPWSGPYTLRNQDDREQWPRKFFHRTCKCTGNFAGYNCGDCKFGWTGPNCERKKPPVIRQNIHSLSPQEREQFLGALDLAKKSVHPDYVITTQHWLGLLGPNGTQPQFANCSVYDFFVWLHYYSVRDTLLGPGRPYKAIDFSHQGPAFVTWHRYHLLCLERDLQRLIGNESFALPYWNFATGRNECDVCTDQLFGAARPDDPTLISRNSRFSSWETVCDSLDDYNHRVTLCNGTYEGLLRRNQMGRHSTKLPTLKDIRDCLSLQKFDNPPFFQNSTFSFRNALEGFDKADGTLDSQVMSLHNLVHSFLNGTNALPHSAANDPIFVVLHSFTDAIFDEWMKRFNPPADAWPQELAPIGHNRMYNMVPFFPPVTNEELFLTADQLGYSYAIDLSVSVEETPGWPTTLSLVMGTLVALVGLFVLLAFLQYRRLRKGYTPLMETHLSSKRYTEEA

SEQ ID NO: 149 - DNA, 1560 bp, Pongo abelii
  orangutan L-dopachrome tautomerase (DCT) DNA
atgagccccctttggtgggggcttctgctcagttgcttgggctgcaaaatcctgccaggagcccaggctcagttcccccgagtctgcatgacggtggacagcctagtgaacaaggagtgctgcccacgcctgggtgcagagtcggccaatgtctgtggctctcagcaaggccgggggcagtgcacagaggtgcgagccgacacaaggccctggagtggtccctacaccctacgaaaccaggatgaccgtgagcagtggccaagaaaattcttccaccggacctgcaagtgcacaggaaactttgccggctataattgtggagactgcaagtttggctggaccggtcccaactgcgagcggaagaaaccaccagtgattcggcagaacatccattccttgagtcctcaggagagagagcagttcttgggtgccttagatctcgcgaagaagagtgtacaccccgactacgtgatcaccacacaacactggctgggcctgcttgggcccaatggaacccagccgcagtttgccaactgcagtgtttatgatttttttgtgtggctccattattattctgttagagatacattattaggaccaggacgcccctacaaggccatagatttctcacatcaaggacctgcgtttgttacctggcaccggtaccatttgttgtgtctggaaagagatctccagcgactcattggcaatgagtcttttgctttgccctactggaactttgccactgggaggaacgagtgtgatgtgtgtacagaccagctgtttggggcagcaagaccagacgatccaactctgattagtcggaactcaagattctccagctgggaaactgtctgtgatagcttggatgactacaaccaccgggtcaccttatgcaatggaacctatgaaggtttgctgagaagaaatcaaatgggaagacacagcacgaaattgccaaccttaaaagacatacgagattgcctgtctctccagaagtttgacaatcctcccttcttccagaactctaccttcagtttcaggaatgccttggaagggtttgataaagcagatgggactctggattctcaagtgatgagccttcataatttggttcattccttcctgaacgggacaaacgctttgccacattcagccgccaatgatcccatttttgtggttcttcattcctttactgacgccatctttgatgagtggatgaaaagatttaatcctcctgcagatgcctggcctcaggagctggcccctattggtcacaatcggatgtacaacatggttcctttcttccctccagtgactaatgaagaactctttttaactgcagaccaacttggctacagctatgccatcgatctgtcagtttcagttgaagaaactccaggttggcccacaaccctctcgctagtcatgggaacgctggtggctttagttggtctttttgtgctgctggcttttcttcaatatagaagacttcgaaaaggatatacacccctaatggagacacatttaagcagcaagagatacacggaagaagcctag

SEQ ID NO: 150 - protein, 519 aa, Macaca fascicularis
  cynomolgus monkey L-dopachrome tautomerase (DCT) protein precursor G7PSC9
  SIGNAL (1)...(23): signal sequence
MSPLWWGLLLSCLDCKILPGAQAQFPRVCMTVDSLVNKECCPRLGAELADVCGSQQGRGQCTEVQADTRPWSGPYILRNQDDREQWPRKFFHRTCKCTGNFAGYNCGDCKFGWTGPNCDRKKPPVIRQNIHSLSPQEREQFLGALDLAKKSVHPDYVITTQHWLGLLGPDGTQPQFANCSVYDFFVWLHYYSVRDTLLGPGRPYKAIDFSHQGPAFVTWHRYHLLCLERDLQRLIGNESFALPYWNFATGRNECDVCTDQLFGAARPDDPTLISQNSRFSSWETVCDSLDDYNHRVTLCNGTYEGLLRRNQMGRNSVKLPTFKNIRDCLSLRKFDNPPFFQNSTFSFRNALEGFDKADGTLDSQVMSLHNLVHSFLNGTNALPHSAANDPIFVVLHSFTDAIFDEWMKRFNPPADAWPQELAPIGHNRMYNMVPFFPPVTNEELFLTADQLGYSYAIDLPVSVEETPGWPTTLSVVMGTLVALVGLFVLLAFLQYRRLRKGYTPLMETHLSSKRYTEEA

SEQ ID NO: 151 - DNA, 1560 bp, Macaca fascicularis
  cynomolgus monkey L-dopachrome tautomerase (DCT) DNA EHH58660.1
atgagccccctttggtgggggcttctgctcagttgcttggactgtaaaatcctgccaggagcccaggctcagttcccccgagtctgcatgacagtggacagcctggtgaacaaggagtgctgcccacgcctgggtgcagagttggccgatgtctgtggctctcagcaaggccggggacagtgcacagaggtgcaagccgacacaaggccctggagtggtccctacatcctacgaaaccaggatgaccgtgagcagtggccaagaaaattcttccaccggacctgcaagtgcacaggaaactttgccggctataattgtggagactgcaagttcggctggaccggccccaactgcgatcggaagaaaccgccagtgattcggcagaacatccattccttgagtcctcaggagagagagcagttcttgggcgccttagatctcgcgaagaagagcgtacaccccgactacgtgatcaccacgcaacactggctgggcctgcttgggcccgatgggacccagccgcagtttgccaactgcagtgtttatgatttttttgtgtggctgcattattattctgttagagatacattattaggaccaggacgcccctacaaggccatagatttctcacatcaaggacctgcttttgttacctggcacaggtaccatttgttgtgtctggaaagagatctccagcgactcattggcaatgagtcttttgctttgccctactggaactttgccactgggaggaacgagtgcgatgtgtgtacagaccagctgtttggagcagcgagaccagacgatccgactctgattagtcagaactcaagattctccagctgggaaactgtctgtgatagcttggatgactacaaccaccgggtcaccttgtgcaatggaacctatgaaggtttgctgagaagaaatcaaatgggaagaaatagtgtgaaattgccaaccttcaaaaacatacgagattgcctgtctctccggaagtttgacaatcctcccttcttccagaactctaccttcagtttcaggaatgccttggaagggtttgataaagccgatgggactctggattctcaagtgatgagccttcataatttggttcattccttcttgaacgggacaaatgctttgccacattcagctgccaatgatcccatttttgtggttcttcattcctttactgacgccatctttgatgagtggatgaaaagatttaatcctcctgcagatgcctggcctcaggagctggcccctattggtcacaatcggatgtacaacatggttcctttcttccctccagtgacgaatgaagaactctttttaaccgcagaccaacttggctacagctatgccattgatctgccagtttcagttgaagaaactccaggttggcccacaaccctctcagtggtcatgggaacgctggtggctttggttggtctttttgtgctgctggcctttcttcaatatagaagacttcgaaaaggatatacacccctaatggagacacatttaagcagcaagagatacacagaagaagcctag

SEQ ID NO: 152 - protein, 519 aa, Macaca mulatta
  Rhesus macaque L-dopachrome tautomerase (DCT) protein precursor G7NJH7
  SIGNAL (1)...(23): signal sequence
MSPLWWGLLLSCLDCKILPGAQAQFPRVCMTVDSLVNKECCPRLGAELADVCGSQQGRGQCTEVQADTRPWSGPYILRNQDDREQWPRKFFHRTCKCTGNFAGYNCGDCKFGWTGPNCDRKKRPVIRQNIHSLSPQEREQFLGALDLAKKSVHPDYVITTQHWLGLLGPDGTQPQFANCSVYDFFVWLHYYSVRDTLLGPGRPYKAIDFSHQGPAFVTWHRYHLLCLERDLQRLIGNESFALPYWNFATGRNECDVCTDQLFGAARPDDPTLISQNSRFSSWETVCDSLDDYNHRVTLCNGTYEGLLRRNQMGRNSVKLPTFKNIRDCLSLRKFDNPPFFQNSTFSFRNALEGFDKADGTLDSQVMSLHNLVHSFLNGTNALPHSAANDPIFVVLHSFTDAIFDEWMKRFNPPADAWPQELAPIGHNRMYNMVPFFPPVTNEELFLTADQLGYSYAIDLPVSVEETPGWPTTLSVVMGTLVALVGLFVLLAFLQYRRLRKGYTPLMETHLSSKRYTEEA

SEQ ID NO: 153 - DNA, 1560 bp, Macaca mulatta
  Rhesus macaque L-dopachrome tautomerase (DCT) DNA EHH29077.1
atgagccccctttggtgggggcttctgctcagttgcttggactgtaaaatcctgccaggagcccaggctcagttcccccgagtctgcatgacagtggacagcctggtgaacaaggagtgctgcccacgcctgggtgcagagttggccgatgtctgtggctctcagcaaggccggggacagtgcacagaggtgcaagccgacacaaggccctggagtggtccctacatcctacgaaaccaggatgaccgtgagcagtggccaagaaaattcttccaccggacctgcaagtgcacaggaaactttgccggctataattgtggagactgcaagttcggctggaccggccccaactgcgatcggaagaaacggccagtgattcggcagaacatccattccttgagtcctcaggagagagagcagttcttgggcgccttagatctcgcgaagaagagcgtacaccccgactacgtgatcaccacgcaacactggctgggcctgcttgggcccgatgggacccagccgcagtttgccaactgcagtgtttatgatttttttgtgtggctgcattattattctgttagagatacattattaggaccaggacgcccctacaaggccatagatttctcacatcaaggacctgcttttgttacctggcacaggtaccatttgttgtgtctggaaagagatctccagcgactcattggcaatgagtcttttgctttgccctactggaactttgccactgggaggaacgagtgcgatgtgtgtacagaccagctgtttggagcagcgagaccagacgatccgactctgattagtcagaactcaagattctccagctgggaaactgtctgtgatagcttggatgactacaaccaccgggtcaccttgtgcaatggaacctatgaaggtttgctgagaagaaatcaaatgggaagaaatagtgtgaaattgccaaccttcaaaaacatacgagattgcctgtctctccggaagtttgacaatcctcccttcttccagaactctaccttcagtttcaggaatgccttggaagggtttgataaagccgatgggactctggattctcaagtgatgagccttcataatttggttcattccttcttgaacgggacaaacgctttgccacattcagctgccaatgatcccatttttgtggttcttcattcctttactgacgccatctttgatgagtggatgaaaagatttaatcctcctgcagatgcctggcctcaggagctggcccctattggtcacaatcggatgtacaacatggttcctttcttccctccagtgacgaatgaagaactctttttaaccgcagaccaacttggctacagctatgccattgatctgccagtttcagttgaagaaactccaggttggcccacaaccctctcagtggtcatgggaacgctggtggctttggttggtctttttgtgctgctggcctttcttcaatatagaagacttcgaaaaggatatacacccctaatggagacacatttaagcagcaagagatacacagaagaagcctag

SEQ ID NO: 154 - protein, 519 aa, Callithrix jacchus
  White-tufted-ear marmoset L-dopachrome tautomerase (DCT) protein precursor F7IGR3
  SIGNAL (1)...(23): signal sequence
MSPLWWGLLLSCLGCENLPGAWAQFPRVCMTVDSLVNKECCPPLGAESANVCGSQQGRGQCAEVQADTRPWSGPYILRNRDDREQWPRKFFHRTCKCTGNFAGYNCGDCKFGWTGPSCDQKKPAVIRQDIHSLTPQEREQFLGALDLAKKSIHPDYVITTQHWLGLLGPNGTQPQFANCSVYDFFVWLHYYSVRDTLLGPGRPYKAIDFSHQGPAFVTWHRYHLLCLERDLQRLIGNESFALPYWNFATGRNECDVCTDQLFGAARPDDPTLISQNSRFSSWETVCDSLDDYNHRVTLCNGTYEGLLRRNQMRRNGEKLPTLKDIQDCLSLQKFDNPPFFQNSTFSFRNALEGFDKADGTLDSQVMSLHNLVHSFLNGTSALPHSAANDPIFVVLHSFTDAIFDEWMKRFNPPTDAWPQELAPIGHNRMYNMVPFFPPVTNEELFLTAEQLGYSYAIELPVSVEETPGWPTTLSVVMGTLVALVGLFVLLAFLQYRRLRKGYTPLMETHLSSKRYTEEA

SEQ ID NO: 155 - DNA, 1560 bp, Callithrix jacchus
  White-tufted-ear marmoset L-dopachrome tautomerase (DCT) DNA
atgagccctctttggtgggggcttctgctcagttgcttgggctgcgaaaacctgccaggagcctgggctcagttcccccgagtctgcatgacagtggacagcctggtgaacaaggaatgctgcccacccctgggtgcagagtcggctaatgtctgtggctctcagcaaggccgggggcagtgcgcagaggtgcaagctgacacacggccctggagtggtccctacattctacgaaaccgggatgaccgggagcagtggccaagaaaattcttccaccggacctgcaagtgcacaggaaactttgccggctataattgtggagactgcaagtttggctggacaggccccagctgcgatcagaagaaaccagcagtgattcggcaggacatccattccctgactcctcaggagagagagcagttcttgggcgccctagatctcgcaaagaagagcatacaccccgactatgtgatcaccacacagcactggctgggcctgctcgggcccaatgggacgcagccgcagtttgccaactgcagtgtttatgactttttcgtgtggctccattattattctgttagagatacattattaggaccaggacgcccctacaaggccatagatttctcacatcaaggacctgcttttgttacctggcaccggtaccatttgttgtgtctggaaagagatctccagcgactcattggcaatgagtcttttgctttgccctactggaacttcgccaccgggaggaacgagtgtgatgtgtgtacagaccagctgtttggggcagcaagaccagatgatccgactctgattagtcagaactcaagattctccagctgggaaacggtctgtgatagcttggatgactacaaccaccgagtcaccttgtgcaatggaacctatgaaggtttgctgagaagaaatcaaatgagaagaaatggtgagaaattgccaaccttaaaagacatacaagattgcctgtctctccagaagtttgacaatcctcccttcttccagaactctaccttcagcttcaggaatgccttggaagggtttgataaagcagatgggactctggattctcaagtgatgagccttcataatttggttcattccttcctgaacgggacaagcgctttgccacattcagccgccaatgatcccatctttgtggttcttcattcctttactgatgccatctttgatgagtggatgaaaagattcaatcctcctacagatgcctggcctcaggagctggcacctattggtcacaatcggatgtacaacatggttcctttcttccctccagtgactaatgaggaactctttctaaccgcagagcaacttggctacagctatgccattgagctgccagtttcagttgaagaaactccaggttggcccacaaccctctcagtggtcatgggaacgctggtggctttggttggtctttttgtgctgctggcttttcttcaatatagaagacttcgaaaaggatatacacccctaatggagacacacttaagcagcaagagatacacagaagaagcctag

SEQ ID NO: 156 - protein, 518 aa, Equus caballus
  horse L-dopachrome tautomerase (DCT) protein precursor F7CBS6
  SIGNAL (1)...(23): signal sequence
MSSLRWGLLLSCLGCGLLPGAWAQFPRVCMTVDSLLSKECCPPLGMEPANVCGSQEGRGQCTEVETDTRPWSGPYILRNQDDRERWPRKFFDWTCKCTGNFAGYNCGDCKFGWTGPNCDRKKAPVVRQNIHSLTPQEREQFLGALDLAKNTTHPDYVITTQHWLGLLGPNGTQPQIANCSIYDFFVWLHYYSVRDTLLGPGRPYKAIDFSHQGPAFVTWHRYHLLWLERDLQRLTGNESFALPYWNFATGRNECDVCTDQLLGAARQDDPMLISQNSRFSSWEIVCDSLDDYNRRVTLCNGTYEGLLRRNQVGRNSEKLPTLHDIQDCLSLKKFDNPPFFQNSTFSFRNALEGFDKADGTLDSQVLSLHNLVHSFLNGTSALPHSAANDPIFVVLHSFTDAIFDEWMRRFNPPAEAWPQELAPIGHNRMYNMVPFFPPVTNEELFLTADQLGYSYAIDLPVSVEQTPGWTTTLSVVMGMLVALVGLFALLVFLQYRRLRKGYTPLMETHLSKRYTEEA

SEQ ID NO: 157 - DNA, 1557 bp, Equus caballus
  horse L-dopachrome tautomerase (DCT) DNA XM_001491619.2
atgagctcccttcggtgggggcttctgctcagctgcctgggctgtggactcctgcctggagcctgggcgcagttcccccgggtctgcatgacagtggacagcctgctgtccaaggagtgctgcccgccactgggcatggagccggccaatgtctgtggctctcaggagggccggggccagtgcacagaggtggaaactgacaccaggccctggagcggtccttacatcttgcgaaaccaggatgaccgagaacggtggccaaggaagttcttcgactggacctgcaagtgcacaggaaactttgctggctataactgtggagactgcaagtttggctggaccggccccaactgtgatcggaagaaagcaccagttgttcggcagaatatccattccttgactcctcaggagagggagcagtttttgggtgccttagatctcgcgaagaacaccacacaccccgactatgtgatcaccacgcaacactggcttgggctgcttgggccaaatgggacccagccacagattgccaactgcagcatttatgatttctttgtgtggctccattattattctgttagagatacactattaggaccagggcgcccatataaggccatcgacttctcacaccaaggacctgcctttgttacatggcaccggtaccatttgttgtggctggaaagagatctccagcgactcactggcaatgagtcctttgctttgccctactggaactttgccactgggaggaatgagtgtgatgtgtgtaccgaccagcttcttggggcagcaagacaagacgatccgatgctgatcagccagaattcaagattctccagctgggaaattgtctgtgatagcttagatgactacaaccgccgggtcaccctgtgtaatggaacctacgaaggtttgttgagaagaaatcaagtgggaagaaacagtgagaaattaccaaccttacacgacatacaagattgtctgtctctcaagaagtttgacaatcctcctttttttcagaactctaccttcagcttcaggaatgccctggaagggtttgataaagcggatgggaccctggactctcaagtgctcagccttcataatttggttcattctttcctgaacgggacaagtgctttgccacattctgcggccaatgatcccatttttgtggtccttcattcctttactgatgccattttcgatgagtggatgagaagattcaatcctcccgctgaagcctggcctcaggagctggcgcccattggtcacaatcggatgtataacatggttcctttcttccctccagtcactaatgaggaactctttttaaccgcagaccaacttggctacagctacgccattgacctgccagtttcagttgaacaaactccaggttggaccacaaccctgtcagtggttatgggaatgctggtggctttggttggtcttttcgctctactggttttccttcagtatagaagacttcgaaaaggatatacacccctaatggagacacatttaagcaagagatacacagaagaagcctag

SEQ ID NO: 158 - protein, 519 aa, Sus scrofa
  pig L-dopachrome tautomerase (DCT) protein precursor Q4R1H1
  SIGNAL (1)...(23): signal sequence
MVPFRWGLLLGCLGSALGPGAQAQFPRVCMTVGSLQAKECCPPLGAEPSNVCGSLEGRGRCAEVQADTRPWSGPYVLRNQDDRERWPRKFFDRTCRCTGNFAGYNCGDCKFGWTGPNCDQKKPLVVRQNIHSLTAQEREQFLGALDLAKNTPHPDYVITTQHWLGLLGPNGTQPQIANCSIYDLFVWLHYYSVRDTLLGPGRPYKAIDFSHQGPAFVTWHRYHLLWLERALQRLTGNESFAVPYWNFATGRNECDVCTDQLLGAARPDDPTLISQNSRFSSWEIVCDSLDDYNRRVTLCNGTYEGLLRRNQVGRNSEKLPSLKDIEDCLSLKQFDNPPFFQNSTFSFRNALEGFDKADGTLDSQVMSLHNLVHSFLNGTSALPHSAANDPVFVVLHSFTDAIFDEWMKRFSPPVDAWPQELAPIGHNRMYNMVPFFPPVTNEELFLTADQLGYSYAIDLPVSVEGTPDWTTTLSVVMGMLVVLVGLSALLLFLQYRRLRKGYTPLMETQLSHKRYTEEA

SEQ ID NO: 159 - DNA, 1560 bp, Sus scrofa
  pig L-dopachrome tautomerase (DCT) DNA BAD99582.1
atggtcccttttcggtgggggcttctgctcggctgcctgggcagtgcactcgggccgggggcacaggcgcagttcccccgggtctgcatgacggtgggcagcctgcaggccaaggagtgctgcccgccgctgggcgccgagccctccaacgtctgcggctctctggagggccggggccggtgcgcagaggtgcaggctgacacgaggccctggagcggcccttatgtcctgaggaaccaggatgaccgcgagcggtggccacggaagttctttgaccggacctgcaggtgcacaggaaactttgccggctataactgtggagactgcaagtttggctggaccggccccaactgtgatcagaagaaaccactggttgtccggcagaatatccattctttgaccgctcaggagagggagcagttcttgggcgccttggaccttgcgaagaacaccccacaccctgactacgtgatcaccacgcaacactggctgggcctgctcgggcccaacggcacccagccacagatcgccaactgcagcatttatgatttatttgtgtggctccattattattcagttagagatacattattaggaccagggcgcccctataaggccatagatttctcacaccaaggacctgccttcgttacctggcaccgctaccacttgctgtggctggaaagagctctccagcggcttactggcaatgagtcctttgctgtgccctactggaactttgccaccgggaggaacgagtgtgatgtgtgtacagaccagctgcttggggcagcaagaccagacgacccgaccctgatcagtcagaactccaggttctccagctgggaaattgtctgtgacagcttggatgactacaaccgccgggtcaccctgtgtaacggaacctacgaaggtttgttgcgaaggaatcaggtgggaagaaacagcgagaaactgccaagtttgaaagacatagaagattgtctgtctctcaagcagtttgacaatcctcctttcttccagaactctaccttcagcttcaggaatgccttggaagggtttgataaagcagacgggaccctggactctcaagtgatgagccttcataatttggttcattccttcctaaacgggacaagtgctttgccgcattctgctgccaatgatcctgttttcgtggtccttcattcctttaccgatgccattttcgacgagtggatgaaaagattcagtccccctgtggatgcctggcctcaggagctggcacccatcggtcacaatcgaatgtataacatggttcctttcttccctccggtgacgaacgaggaactctttctaaccgcagaccaacttggctacagctatgccattgacctgccggtttcagttgaaggaactcccgattggaccacaaccctttcagtggttatggggatgctggtggttttggttggtctttctgcgctgctgctttttcttcaatatagaagacttcgaaaaggatacacacccttaatggagacacaattaagccacaagagatacaccgaagaagcctag

SEQ ID NO: 160 - protein, 517 aa, Ailuropoda melanoleuca
  panda L-dopachrome tautomerase (DCT) protein precursor D2H9Z1
  SIGNAL (1)...(23): signal sequence
MSPLGWGLVLGCLGCGILPGARAQFPRVCMTVDSLMTKECCPSLGLEPDNVCGSHEGRGQCTEVQADTRPWSGPYVLRNQDDREGWPRKFFHRTCRCTGHFAGYNCGGCKFGWTGHDCNQRRAPVIRKNIHSLTAQEREQFLDALDLAKNTTHPDYVITTQHWLGLLGPNGTQPQIANCSIYDFFVWLHYYSVRDTLLGPGRPYKAIDFSHQGPAFVTWHRYHLLWLERDLQQLIGNESFALPYWNFATGRNDCDVCTDQLLGAARQDDPTLISQNSRFSSWEIVCDSLDDYNRRVTLCNGTYEGLLRRNQVGLNSEKLPTLKDIQDCLSLKKFDSPPFFQNSTFSFRNALEGFDKANGILDSQVMSLHNLVHSFLNGTSALPHSAANDPIFVVLHSFTDAIFDEWMKRSHPSVDAWPQELAPIGHNRMYNMVPFFPPVTNEEFFLTADQLGYRYAIDLPAEETPGWSTTVLVVMGMLVALVGVFVVLFFLQYRRLRKGYTPLMETHLSNKMYTEEA

SEQ ID NO: 161 - DNA, 1551 bp, Ailuropoda melanoleuca
  panda L-dopachrome tautomerase (DCT) DNA EFB22982.1
atgagccctctcgggtgggggcttgtgctcggctgcctgggctgtggaatcctgcccggagcccgtgcgcagttcccccgggtctgcatgacggtggacagcctgatgaccaaggagtgctgcccgtcgctgggtctggagcccgacaacgtatgtggctcccacgagggccggggccagtgcacggaggtgcaagctgacaccaggccctggagcggtccttatgtcctacggaaccaggatgaccgagaaggttggccaaggaagttcttccaccggacctgccgatgcacaggacatttcgcgggctacaactgtggaggctgcaagtttggctggaccggccacgactgcaatcagaggagagccccggttatccggaaaaatatccattcgttgactgctcaggagagggagcagttcctggacgccttagacctggccaagaacacgacacaccccgactacgtgatcaccacccagcactggctcggcctgctggggcccaacgggacccagccccagatcgccaactgcagcatttatgatttctttgtgtggcttcattattactccgttagagatacattattaggaccagggcgcccatacaaggccatcgacttctcacaccaaggacctgccttcgtgacctggcatcggtaccatttgctgtggctggaaagggatctccagcaactcataggcaatgagtcctttgctttgccctactggaactttgccactgggaggaacgactgtgacgtgtgtacggaccagctgcttggggcagcaagacaagatgatccaactctaattagtcagaactcaagattctccagctgggaaatcgtctgtgatagcctagatgactacaaccgccgggtcaccctctgtaatgggacctacgaaggtctattaagaagaaatcaagtgggactaaacagtgagaaattgccaactttaaaagacatacaagattgtctgtctctcaagaagtttgacagcccccctttcttccagaactcgaccttcagcttcaggaatgccctggaaggctttgataaagcaaacggcatcctggactctcaagtgatgagcctacataacttggttcattccttcctgaacgggaccagcgctttgccacattctgccgccaatgatcctatttttgtggtacttcattcctttaccgatgccatttttgatgagtggatgaaaagatcccatccttctgtggatgcctggcctcaggagctggcgcccatcggtcacaataggatgtataacatggttcctttcttccctccggtgacgaacgaggaattctttttaactgcagaccaacttggctaccgctatgccatcgatctgccagctgaagaaactccaggttggagcacaaccgtcttggtggtcatgggaatgctggtggctttggttggtgtgttcgtggtgctgtttttccttcagtacagaagactccggaaaggctacacacccctaatggaaacacatttaagcaacaagatgtatacagaggaagcc

SEQ ID NO: 162 - protein, 517 aa, Oryctolagus cuniculus
  rabbit L-dopachrome tautomerase (DCT) protein precursor H9AYE5
  SIGNAL (1)...(23): signal sequence
MSLLQLGLLFLCLDCGILPGAWAQFPRVCMTFDSLVNKECCPPLGAEPSNICGSQDGRGQCAEVQTDTRPWSGPYVLRNQDDREQWPRKFFNRTCKCTGNFAGYRCGDCKFGWTGPNCDQRKPAVVRRNIHSLSAQEREQFLGALDLAKKSPHPDYVIATQHWLGLLGPNRTQPQIANCSIYDFFVWLHYYSVRDTLLGPGRPYKAIDFSHQGPAFVTWHRYHLMWLERDLQRLTGNESFALPYWNFATGRNECDVCTDQLLGAARQEDPTLISQNSRFSNWEIVCNSWDDYNRRVTLCNGTYEGLLRRNQVGRNSEKLPTLRNIQDCLSLQKFDNPPFFQNSTFSFRNALEGFDKADGTLDSQVRSLHNLVHSFLNGTSALPHSAANDPVFVVLHSFTDAIFDEWMKRYDPPIDAWPQELAPIGHNRRYNMVPFFPPVTNEELFVTTEQLGYTYAIDLPVEETPGWTTTFSVVLGTLVAFVGVLALLVFLQYRRIRRGYTPLIETHLSNKRYTEEA

SEQ ID NO: 163 - DNA, 1554 bp, Oryctolagus cuniculus
  rabbit L-dopachrome tautomerase (DCT) DNA AFC40955.1
atgagcctgcttcagctgggactcctgttcctgtgcctggactgtggaatcctgcctggggcttgggctcagttccctcgggtgtgcatgaccttcgatagcctggtgaacaaggaatgctgcccgcccctgggtgcagagccctccaacatctgtggttctcaggatggccgggggcagtgtgcagaggtacaaactgacaccaggccctggagtggcccttatgtcctgcgaaaccaggatgaccgtgagcagtggccaaggaagttcttcaaccggacctgcaagtgcacaggaaactttgctggttaccgctgtggagactgcaagtttggctggactggccccaactgtgatcagaggaaaccggcagttgttcggcggaacatccattccctgtctgctcaggagagggagcagttcttgggtgccttagacctggcaaagaagagcccacaccccgactacgtgattgccacgcagcactggctgggccttcttgggcccaataggacccagcctcagatcgccaattgcagcatatatgacttttttgtgtggctccattattattctgttagagatacattattaggaccagggcgcccctataaggccatagatttttcacaccaagggcctgcctttgttacctggcaccggtaccacttgatgtggctggaaagagatctccagcgacttacaggcaatgagtcctttgctttgccgtactggaactttgccaccgggaggaatgaatgtgatgtgtgcacagaccagctgcttggggcagcaagacaagaggatccaactctgatcagtcagaactcacggttctccaactgggagattgtctgtaacagttgggatgactacaaccgccgggtcacgctgtgtaatggcacctatgaaggtttgctgagaagaaatcaagtgggaagaaatagtgagaagctgccaaccttaagaaacatacaagactgtctgtctctgcagaagtttgacaatcctcctttcttccagaactctaccttcagcttcaggaatgccctggaagggtttgataaagcggatgggaccctggactctcaagtgaggagtcttcataacttggtacactctttcctgaatggaacaagcgctttgccacattctgctgccaatgaccctgtttttgtggtccttcattcctttactgatgccatctttgatgagtggatgaaaagatatgaccctcccatagatgcctggcctcaggagctggcacccattggtcacaatcgcaggtataacatggtgccgttcttccctccggtgacaaatgaggaactgtttgtaaccacagagcaacttggctatacctatgccattgatctgccagttgaagaaactccaggttggaccacaaccttctcagtggttttgggaacactggtggctttcgttggtgttttggcactgcttgttttccttcaatatagaaggattcggagaggatacacacccctgatagagacacatttaagcaacaaaagatacacagaagaagcctag

SEQ ID NO: 164 - protein, 517 aa, Ovis aries
  sheep L-dopachrome tautomerase (DCT) protein precursor B3VKX7
  SIGNAL (1)...(23): signal sequence
MSPLGWGLLLGCLGCALPSGARAQFPRVCMTVGSLRAKECCPPLGADPANVCGSREGRGQCADVQTDTRPWSGPYVLRNQDDRERWPRKFFDRTCRCTGNFAGYNCGDCRFGWTGPKCDQKKPLVVRQDVHSLTPQEREQFLGALDLAKYTPHPDYVITTQHWLGLLGPNGTQPQIANCSIYDFFVWLHYYSVRDTLLGPGHPYKAIDFSHQGPAFVTWHRYHLLWLERDLQRLTGNESFALPYWNFATGSNECDVCTDQLLGAARQDDPTLISQNSRFSSWEIVCDSLNDYNRRVTLCNGTYEGLLKRNQMGRNSEKLPTLKDIQNCLSLNKFDSPPFFQNSTLSFRNALEGFGKADGTLDSQVMSLHNLVHSFLNGTSTLPHSAANDPVFVVLHSFTDAIFDEWMKRFNPPVDAWPQELAPIGHNRMYNMVPFFPPVTNEELFLTADQLGYSYAIDLPVEETPDWTTVLSVVTGMLMVLVVLFALLLFLQYRRLRKGYTPLTETQLSNKRYTEEA

SEQ ID NO: 165 - DNA, 1554 bp, Ovis aries
  sheep L-dopachrome tautomerase (DCT) DNA ACF21683.1
atgagccctcttgggtgggggcttctgctcggctgtctgggctgtgcgctcccgtctggggcccgggcgcagtttccccgggtctgcatgactgtgggcagcctgcgggccaaggaatgctgcccgccgctgggcgccgaccccgccaacgtctgcggctcccgggagggccggggccagtgcgcggatgtgcagaccgacaccaggccctggagcggtccttacgtcctgcgcaaccaggacgaccgcgagcgatggccccggaagttcttcgaccggacctgcaggtgcacaggaaacttcgccggctataactgtggagactgcaggtttggctggaccggccccaaatgcgatcagaagaaaccattggttgtccggcaagatgtccattccttgacccctcaagagagggagcaattcttgggcgccttagacctcgcaaagtacactccacaccccgactacgtgatcaccacgcaacactggctgggcctcctggggcccaatgggacccaaccacagatcgccaactgcagcatttacgatttctttgtgtggctccattattattccgtcagagatacattattaggaccagggcacccatacaaggctatagatttctcacaccaaggacctgcctttgttacctggcaccggtaccacttgttatggctggaaagggatctccagcgccttactggcaacgagtccttcgctttgccctactggaactttgccaccggcagtaacgagtgtgacgtgtgcacagaccagctgcttggggcagcaaggcaagacgatccgactctgattagtcagaactcccgattctccagctgggagattgtctgtgatagcttgaatgactacaaccgccgagtcaccttgtgtaatggaacctatgaaggtttgttgaaaagaaatcaaatgggaagaaacagtgagaaattgccaactttaaaagacatacaaaattgcctgtctctcaataagtttgacagtcctccgttcttccagaactctaccctcagcttcaggaatgccctggaagggtttggcaaagcagatgggaccctggattctcaagtgatgagtcttcataacctggttcattctttcctgaatgggacaagcactttgccgcattctgctgccaatgatcctgtttttgtggtccttcattccttcaccgatgccatttttgatgagtggatgaaaagattcaatccccctgtggatgcctggcctcaggagctggcacccattggtcacaatcggatgtataacatggttcctttcttccctccagtgactaatgaggaactctttttaactgcagaccaacttggctacagttatgctattgatctgccagttgaagaaactccagattggaccacagtgctctcagtggttacggggatgctcatggttttggttgtcctttttgcattgctgcttttccttcaatatagacgacttcgaaaagggtatacacccttaacggagacacagctaagcaacaaaagatacactgaagaagcctag

SEQ ID NO: 166 - protein, 517 aa, Mus musculus
  mouse L-dopachrome tautomerase (DCT) protein precursor P29812
  SIGNAL (1)...(23): signal sequence
MGLVGWGLLLGCLGCGILLRARAQFPRVCMTLDGVLNKECCPPLGPEATNICGFLEGRGQCAEVQTDTRPWSGPYILRNQDDREQWPRKFFNRTCKCTGNFAGYNCGGCKFGWTGPDCNRKKPAILRRNIHSLTAQEREQFLGALDLAKKSIHPDYVITTQHWLGLLGPNGTQPQIANCSVYDFFVWLHYYSVRDTLLGPGRPYKAIDFSHQGPAFVTWHRYHLLWLERELQRLTGNESFALPYWNFATGKNECDVCTDELLGAARQDDPTLISRNSRFSTWEIVCDSLDDYNRRVTLCNGTYEGLLRRNKVGRNNEKLPTLKNVQDCLSLQKFDSPPFFQNSTFSFRNALEGFDKADGTLDSQVMNLHNLAHSFLNGTNALPHSAANDPVFVVLHSFTDAIFDEWLKRNNPSTDAWPQELAPIGHNRMYNMVPFFPPVTNEELFLTAEQLGYNYAVDLSEEEAPVWSTTLSVVIGILGAFVLLLGLLAFLQYRRLRKGYAPLMETGLSSKRYTEEA

SEQ ID NO: 167 - DNA, 1554 bp, Mus musculus
  mouse L-dopachrome tautomerase (DCT) DNA CAA44951.1
atgggccttgtgggatgggggcttctgctgggttgtctgggctgcggaattctgctcagagctcgggctcagtttccccgagtctgcatgaccttggatggcgtgctgaacaaggaatgctgcccgcctctgggtcccgaggcaaccaacatctgtggatttctagagggcagggggcagtgcgcagaggtgcaaacagacaccagaccctggagtggcccttatatccttcgaaaccaggatgaccgtgagcaatggccgagaaaattcttcaaccggacatgcaaatgcacaggaaactttgctggttataattgtggaggctgcaagttcggctggaccggccccgactgtaatcggaagaagccggccatcctaagacggaatatccattccctgactgcccaggagagggagcagttcttgggcgccttagacctggccaagaagagtatccatccagactacgtgatcaccacgcaacactggctggggctgctcggacccaacgggacccagccccagatcgccaactgcagcgtgtatgacttttttgtgtggctccattattattctgttcgagacacattattaggtccaggacgcccctataaggccattgatttctctcaccaagggcctgcctttgtcacgtggcacaggtaccatctgttgtggctggaaagagaactccagagactcactggcaatgagtcctttgcgttgccctactggaactttgcaaccgggaagaacgagtgtgacgtgtgcacagacgactggcttggagcagcaagacaagatgacccaacgctgattagtcggaactcgagattctctacctgggagattgtgtgcgacagcttggatgactacaaccgccgggtcacactgtgtaatggaacctatgaaggtttgctgagaagaaacaaagtaggcagaaataatgagaaactgccaaccttaaaaaatgtgcaagattgcctgtctctccagaagtttgacagccctcccttcttccagaactctaccttcagcttcaggaatgcactggaagggtttgataaagcagacggaacactggactctcaagtcatgaaccttcataacttggctcactccttcctgaatgggaccaatgccttgccacactcagcagccaacgaccctgtgtttgtggtcctccactcttttacagacgccatctttgatgagtggctgaagagaaacaacccttccacagatgcctggcctcaggaactggcacccattggtcacaaccgaatgtataacatggtccccttcttcccaccggtgactaatgaggagctcttcctaaccgcagagcaacttggctacaattacgccgttgatctgtcagaggaagaagctccagtttggtccacaactctctcagtggtcattggaatcctgggagctttcgtcttgctcttggggttgctggcttttcttcaatacagaaggcttcgcaaaggctatgcgcccttaatggagacaggtctcagcagcaagagatacacggaggaagcctag

SEQ ID NO: 168 - DNA, 35 bp, Artificial Sequence
  Vaccinia Synthetic early- (SE) promoter
aaaaattgaaaaactagcgtctttttttgctcgaa

SEQ ID NO: 169 - DNA, 70 bp, Artificial Sequence
  Vaccinia stronger synthetic early late (SEL) promoter
ggtttggaattagtgaaagcttaaaaattgaaattttattttttttttttggaatataaataagctcgaa

SEQ ID NO: 170 - DNA, 589 bp, Artificial Sequence
  CMV immediate early promoter
tagttattaatagtaatcaattacggggtcattagttcatagcccatatatggagttccgcgttacataacttacggtaaatggcccgcctggctgaccgcccaacgacccccgcccattgacgtcaataatgacgtatgttcccatagtaacgccaatagggactttccattgacgtcaatgggtggagtatttacggtaaactgcccacttggcagtacatcaagtgtatcatatgccaagtacgccccctattgacgtcaatgacggtaaatggcccgcctggcattatgcccagtacatgaccttatgggactttcctacttggcagtacatctacgtattagtcatcgctattaccatggtgatgcggttttggcagtacatcaatgggcgtggatagcggtttgactcacggggatttccaagtctccaccccattgacgtcaatgggagtttgttttggcaccaaaatcaacgggactttccaaaatgtcgtaacaactccgccccattgacgcaaatgggcggtaggcgtgtacggtgggaggtctatataagcagagctggtttagtgaaccgtcagatc

SEQ ID NO: 171 - DNA, 1366 bp, Homo sapiens
  human Telomerase promoter region (TERT) WT AB018788
atttacaagacgaggctaacctccagcgagcgtgacagcccagggagggtgcgtggcctgttcaaatgctagctccataaataaagcaatttcctccggcagtttctgaaagtaggaaaggttacatttaaggttgcgtttgttagcatttcagtgtttgccgacctcagctacagcatccctgcatggcctcgggagacccagaagtttctcgccccttagatccaaacttgagcaacccggagtctggattcctgggaagtcctcagctgtcctgcggttgtgccggggccccaggtctggaggggaccatgtgccgtgtggcttctactgctgggctggaagtcgggcctcctagctctgcagtccgaggcttggaggcaggtgcctggaccccgaggctgccctccaccctgtgcgggcgggatgtgaccagatgttggcctcatctgccaaacagagtgccggggcccagggtcaaggccgttgtggctggtgtgaggcgcccggtgcgcggccagcaggagcgcctggctccatttcccaccctttctcgacgggaccgccccggtgggtgattaacagatttggggtggtttgctcatggtggggacccctcgccgcctgagaacctgtaaagagaaatgacgggcctgtgtcagggagcccaagtcgcggggaagtgttgcagggaggcactccgggaggtcccgcgtgcccgtccaggggagcaatgcgtcctcggttcgtccccagccgcgtctacgcgcctccgtcctccccttcacgtccggcattcgtggtgcccggagcccgacgccccgcgtccggacctggaggcagccctgggtctccggatcaggccagcggccaaagggtcgccgcacgcacctgtttcccagggcctccacatcatggcccctccctcgggttaccccacagcctaggccgattcgacctctctccgctggggccctcgctggcgtccctgcaccctgggagcgtgagcggtgcgcgggcggggaaacgcggcccagaaccccgggtccgcccggagcagctgcgctgtcgggccaggccgggctcccagtggattcgcgggcacagacgcccaggaccgcgcttccacgtggcggaggactgggacccgggcaccgtcctgcccccttcaccttccagttccgcttcttccgcgcggaccccgccccgtcccgacccttcccgggtccccggcccagccccttccgggccctcccagcccttccccttcctttccgcggccccgccctctcctcgcggcgcgagtttcaggcagcgctgcgtcctgctgcgcacgtgggaagccctggccccggccacccccgcg

SEQ ID NO: 172 - DNA, 267 bp, Artificial Sequence
  Synthesized E2F1 promoter WT S79170
gcctgcgcgcgccccgccccgccattggccgtaccgccccgcgccgccgccccatctcgcccctcgccgccgggtccggcgcgttaaagccaataggaaccgccgccgttgttcccgtcacggccggggcagccaattgtggcggcgctcggcggctcgtggctctttcgcggcaaaaaggatttggcgcgtaaaagtggccgggactttgcaggcagcggcggccgggggcggagcgggatcgagccctcgccgaggcctgccgcc

SEQ ID NO: 173 - protein, 264 aa, Artificial Sequence
  human tissue factor-alphavbeta3-integrin RGD fusion protein
  SIGNAL (1)...(34): signal sequence
METPAWPRVPRPETAVARTLLLGWVFAQVAGASGTTNTVAAYNLTWKSTNFKTILEWEPKPVNQVYTVQISTKSGDWKSKCFYTTDTECDLTDEIVKDVKQTYLARVFSYPAGNVESTGSAGEPLYENSPEFTPYLETNLGQPTIQSFEQVGTKVNVTVEDERTLVRRNNTFLSLRDVFGKDLIYTLYYWKSSSSGKKTAKTNTNEFLIDVDKGENYCFSVQAVIPSRTVNRKSTDSPVECMGQEKGEFRGRGDSPDYKDDDDK

SEQ ID NO: 174 - protein, 207 aa, Homo sapiens
  interleukin-24 isoform 3 precursor protein NP_001172085.1
  SIGNAL (1)...(52): signal sequence
MNFQQRLQSLWTLASRPFCPPLLATASQMQMVVLPCLGFTLLLWSQVSGAQGQEFHFGPCQVKGVVPQKLWEAFWAVKDTMQAQDNITSARLLQQEVLQNVSDAESCYLVHTLLEFYLKTVFKNYHNRTVEVRTLKSFSTLANNFVLIVSQLQPSQENEMFSIRDSAHRRFLLFRRAFKQLDVEAALTKALGEVDILLTWMQKFYKL

SEQ ID NO: 175 - DNA, 356 bp, Artificial Sequence
  Antigen 33 (A33) 5' untranslated region (promoter)
attaatctacccctttgtgagcagtctaggactttgtacacctgttaagtagggagaaggcaggggaggtggctggtttaaggggaacttgagggaagtagggaagactcctcttgggacctttggagtaggtgacacatgagcccagccccagctcacctgccaatccagctgaggagctcacctgccaatccagctgaggctgggcagaggtgggtgagaagagggaaaattgcagggacctccagttgggccaggccagaagctgctgtagctttaaccagacagctcagacctgtctggaggctgccagtgacaggttaggtttagggcagagaagaagcaagaccgctagc

SEQ ID NO: 176 - DNA, 1568 bp, Artificial Sequence
  Cyclooxygenase-2 (Cox2) promoter
ttgaggtacctggtgtagttttatttcaggttttatgctgtcattttcctgtaatgctaaggacttaggacataactgaattttctattttccacttcttttctggtgtgtgtgtatatatatatgtatatatacacacacacatgtacatatatatattttttagtatctcaccctcacatgctcctccctgagcactacccatgatagatgttaaacaaaagcaaagatgaaattccaactgtcaaaatctcccttccatctaattaattcctcatccaactatgttccaaaacgagaatagaaaattagccccaataagcccaggcaactgaaaagtaaatgctatgttgtactttgatccatggtcacaactcataatcttggaaaagtggacagaaaagacaaaagagtgaactttaaaactcgaatttattttaccagtatctcctatgaagggctagtaaccaaaataatccacgcatcagggagagaaatgccttaaggcatacgttttggacatttagcgtccctgcaaattctggccatcgccgcttcctttgtccatcagaaggcaggaaactttatattggtgacccgtggagctcacattaactatttacagggtaactgcttaggaccagtattatgaggagaatttacctttcccccctctctttccaagaaacaaggagggggtgaaggtacggagaacagtatttcttctgttgaaagcaacttagctacaaagataaattacagctatgtacactgaaggtagctatttcattccacaaaataagagttttttaaaaagctatgtatgtatgtgctgcatatagagcagatatacagcctattaagcgtcgtcactaaaacataaaacatgtcagcctttcttaaccttactcgccccagtctgtcccgacgtgacttcctcgaccctctaaagacgtacagaccagacacggcggcggcggcgggagaggggattccctgcgcccccggacctcagggccgctcagattcctggagaggaagccaagtgtccttctgccctcccccggtatcccatccaaggcgatcagtccagaactggctctcggaagcgctcgggcaaagactgcgaagaagaaaagacatctggcggaaacctgtgcgcctggggcggtggaactcggggaggagagggagggatcagacaggagagtggggactaccccctctgctcccaaattggggcagcttcctgggtttccgattttctcatttccgtgggtaaaaaaccctgcccccaccgggcttacgcaatttttttaaggggagaggagggaaaaatttgtggggggtacgaaaaggcggaaagaaacagtcatttcgtcacatgggcttggttttcagtcttataaaaaggaaggttctctcggttagcgaccaattgtcatacgacttgcagtgagcgtcaggagcacgtccaggaactcctcagcagcgcctccttcagctccacagccagacgccctcagacagcaaagcctacccccgcgccgcgccctgcccgccgctgt

SEQ ID NO: 177 - DNA, 428 bp, Artificial Sequence
  Carcinoembryonic antigen (CEA) promoter
gccctggagagcatggggagacccgggaccctgctgggtttctctgtcacaaaggaaaataatccccctggtgtgacagacccaaggacagaacacagcagaggtcagcactggggaagacaggttgtcctcccaggggatgggggtccatccaccttgccgaaaagatttgtctgaggaactgaaaatagaagggaaaaaagaggagggacaaaagaggcagaaatgagaggggaggggacagaggacacctgaataaagaccacacccatgacccacgtgatgctgagaagtactcctgccctaggaagagactcagggcagagggaggaaggacagcagaccagacagtcacagcagccttgacaaaacgttcctggaactcaagctcttctccacagaggaggacagagcagacagcagagacc

SEQ ID NO: 178 - DNA, 179 bp, Homo sapiens
  Cyclin A (CycA) promoter Cyclin A (CycA) promoter X68303.1
ggtgcgagtggtcggctgggcagagtgcacgctgcttggcgccgcaggctgatcccgccgtccactcccgggagcagtgatgttgggcaactctgcgccggggcctgcgacccgcgaggcgggctcggcgctgctagcattgcagcagacggcgctccaagaggaccaggagaatatca

SEQ ID NO: 179 - DNA, 852 bp, Homo sapiens
  Cell division cycle 2 (Cdc2) promoter D32223.1
cagctgcgctggaggctgaggccgattgcttgagcccaggatttggaggccagcatgcgcaacataatgagacccagtctctaaatgcatgcctctctatatattaaaattctgatgtgaaaatattttaaaatttaatacatttcaaatgtttttaattgtataataaacaaaatgtaaataataaaataatttaatattaaattcaaaaatgaggtagaaacaaagcacagcgatataaataataaattttcctttacatttttgaggcggtcttttgagttttggatttccttcttaggtcactgaaatgtgctccttggagccagcccgcaaatcacgcatttagaaaaacataactatacactcctaaccctaagtattagaagtgaaagtaatggaatctcgatgtaaacacaatatcacttttttgtagagctattttgagtataataaatttgaactgtgccaatgctgggagaaaaaatttaaaagaagaacggagcgaacagtagcttcctcgtccgctgactagaaacagtaggacgacactctcccgactggaggagagcgcttgcgctcgcactcagttggcgcccgccctcctgctttttctctagccgccctttcctctttctttcgcgctctagccacccgggaaggcactgcggtagctgggctctgattggctgctttgaaagtctacgggctacccgattggtgaatccggggccctttagcgcggtgagtttgaaactgctcgcacttggcttcaaagctggctcttggaaattgagcggagagcgacgcggttgttgtagctcgctgcggccgccgcggaataataagccg

SEQ ID NO: 180 - DNA, 2000 bp, Homo sapiens
  Cell division cycle 25 (Cdc25) promoter Z29077.1
ttgcatgcctgcaggtatacaatttcccacaaagtgtgattatactgtagtcgtcaaagcagataacaactcatcccacactcccttaatccccagcctgatttcaaactcacctggcatagcaaggttctgtgctaactcctacactcactgtctgtatcctagaggacaaagaatcttcacacatctcctttctggggaagcaggttctgcagatgaaaagggtattaggataaaaaccagctggctacactgtgcctctcagccactaccaccaccaagatcctgacaacagacacaagttgcattttgacttttgtttctcaaagcatgatctgcaagccgtctgcatgggtagcacctgggggccttgataatgaccccactttagacctatcgaattatcgtttttggagcctacatcttaaagagcttccaaggttattttgaacatttttattatggaaattttcaaatatacattgaagtaagaagtatggggtaataccttaccacgcaaagtatggtcgtaggacagctacctcaccatcagctgggggcttgttagaagggcagaatcttgggccgcaaccgcaacccagacatcccgaatcagaatctgcatttagcaggtcctcaggtggttagtgtgcaaattaaaccttgagaagcacagatatatggaccctcctgcccccatcactcaacagtcagggtcaatcttgtatcatcaataccttcccccagcacaggattatttaaaagcaaatccctaacattaggaatgtctttttgtttgtttcactctaatgcccaggctggagtgcagtggcgcaacctctgtctcccgagttcaagcagttctcatgcctcagcctcccaagtagctgggattacaggtgtgtgccaccacaaccggctaaattttgtatttttagtagagacggggtttcatcatgttggccaggctggttttgaacccctgacctcatgtaacctgcccgcctcggcctcccaaagtgctgggattacaggtgtgggccaacgcgtccggccaataatttataaatatcacctcgtcaatgttcaaatttccattaataaccaatctttgaggtcctctggattgcgataaggattataccaagatgatttaattcctccactttccctgcaacggaatttctttttacccacgtgagctagagtctctgagatgctgcacactaaaagaaacaccaaacaaagctcttggaaggggctaatgcctctcagcataaacacacacacccgtctcgccccaacacttgccacgccggcacgaaacgctccatctcccgtggaaggccagcaaaacttagaagaaaacgtccgcgaaaacggcacgagaaagaagcgaagaaaatgaaacgcttacaacaccctccacccaaaataatctctcctagtattaccctagtgaatggacatcactagtaaggcgcggtttaaatctcccggggttcgtggggctgagggaacgaggaaaacagaaagggtgtggagattggtgagagggagagccaatgatgcgccaggctccccgtgaggcggagcttaccccgcagcctgcctaacgctggtgggccaaacactatcctgctctggctatggggcggggcaagtcttaccatttccagagcaagcacacgcccccaggtgatctgcgagcccaacgataggccatgaggccctgggcgcgcgcgcggagattggctgacgcagcttagaggcgagcggggataggttactgggctggcggaaggtttgaatggtcaacgcctgcggctgttgatattcttgctcagaggccgtaactttggccttctgctcagggaagactctgagtccgacgttggcctacccagtcggaaggcagagctgcaatctagttaactacctcctttcccctagatttcctttcattctgctcaagtcttcgcctgtgtccgatccctact

SEQ ID NO: 181 - DNA, 256 bp, Homo sapiens
  B-myb promoter X82032.1
ggccgccgcccctgtcctgcagccggccctggagcgtctgggcaggtgccgccccgcaggccccgccccgccccgcccccctggctccgcccctcactcaggcccctcccccggcgcccgcgcgccaggactgggcggcgccgacgcgcttggcgggagatagaaaagtgcttcaacccgcgccggcggcgactgcagttcctgcgagcgaggagcgcgggacctgctgacacgctgacgccttcgagcgcggccc

SEQ ID NO: 182 - DNA, 528 bp, Homo sapiens
  p107 promoter S78664.1
ccgcgggcttcatctcccaagagatggactacacctcccagcaggctctgcgcgcgggctgaggatccctccgctctttttctgtcccgccggctgggccccccgcgaccagccaagggccaaggacaggtctttcagaatctgaggtacatcttcttatcacatttccggggagggactgctaggagctccggaggaaaaacggactttttttgaggagaaaagcggaggcagacggtggatgacaacacgtcccgcagctgcagattttcgcgcgctttggcgcaggtggttgtgggtagcgcgcctgggagggagaaagaagtcgggggccgtggcgcgcagcccgcggggcctgaagggatgttcgaggacaagccccacgctgagggggcggcggtggtcgccgcagccggggaggcgctacaggccctgtgccaggagctgaacctggacgaggggagcgcggccgaagccctggacgactttactgccatccgaggcaactacagcctagaggtgagcggc

SEQ ID NO: 183 - DNA, 613 bp, Homo sapiens
  Thymidine Kinase (TK) promoter M13643.1
ccccagctaactccgccccagccccttagtccctccctgcaatccacctacctctgcagcacatcttcttccaaggaaccttgcttgggcaaacccacaccagacacatccatcatggcgtctacagccgcatgggcgtgcgtccctctgtttatatggccagagcccgcctcgctcgcccctttaaacttggtgggcggaccgaggcggggcctcagatccaggccccaccccgatcagccacgtccatcgccctgatttccaggccctcccagtccctgggcgcacgtcccggattcctcccacgagggggcgggctgcggcaaatctcccgccagtcagcggccgggcgctgattggccccatggcggcggggcggctcgtgattggccagcacgccgtggtttaaagcggtcggcgcggtgaaccaggggcttactgcgggacggccttggagagtactcgggttcgtgaacttcccggaggcgcaatgagctgcattaacctgcccactgtgctgcccggctcccccagcaagacccgggggcagatccaggtgcgggggccagcctgcgcgtggctgggatgaggtgtcgtgtatacctttcagatc

SEQ ID NO: 184 - DNA, 1207 bp, Homo sapiens
  DNA polymerase alpha promoter X66868.1
aagcttgataataaaactataaaacttccatcagtttttaaaagggaagtgtaggaataaatctgtcgtagtactttaaataggaagttatgtctaagtgtaaattactacatgttatgtatcacaacatatggatcacataacatgatattaaatgattatgaagctgaaagacattttctaaacaatccagaaattaagaaacaagtattgatcaaccatgctagaagacagattgaattatctttatatcctctttggagaaaatattacaaaattgttgtcacatgaagaagggatcaataagcatgtgggcaataatgtaggaaaaaatacaaatgtgtggcaggcattatttaataaaaatgttatacctttttggaaagagataacatgagatgtacacattacagccattgtatcatacacaaaaattgaataccctttttgtttttcataacattgaaattttggagttcacgtcaggtgttttgtagattgtcctacattttgaatacatctgattgtttcttcatggttagattcaggttagacattttttgcaagaagaccatataggcgaagtttttcctttttcatacgcattacatcaggaggcatatgagatcagatggccatttattggtaatgctacttctggttatttggttaagacggagcatatatctttaagttgttaatcacacagccactgtatccagactgctgagaagcaaactatcaggcaaaattcagggcgcgcagcaggaggcagtcgctttcccggctctggggaaaacgatccaaccacgcccactctcctgcccgcccgcgcctcctttccgggaaaatgggctctgagaaccagagcgccctttctcccacgcgcccaaatcttttcccatcagcatgcgtgcggttgcgcagtctccaggcggctcctttccagcgcccgaccgcttctttctcctgctctcctccggcttcccctcagctctagcttttccctaaggggtcatcacaggcgccaaacgcgcgtccgcgggaaggccgggggcggagcgcggcgcggcgcggcacgtcagtggccttccggccggaagtccgcagcctcccgagccgctgattggctttacgtggcgcctgtctcggcccccgcgccagttttgggctggttggcgcggaatcgggagattcgggaccatgg

SEQ ID NO: 185 - DNA, 866 bp, Homo sapiens
  Histone 2A (H2A) promoter X00089.1
ctagagtgatctatacaccataaaatagagtatttctctacacagccctactaaaggaatgagaaagctgtactccactacatactctggtgtactctggctcagttcttggactcctcttttcttggcgaactcaactggtatgaattcctcacagcctacctccagtcagtataaatacttctctgccttgcgttctaatgtagtttcattacattttcttgtggcgattttcccttcttatcagaagtagttatgtctggtcgcggcaaacaaggcggtaaagctcgcgccaaggcaaagactcggtcttctcgtgcaggtttgcagtttcctgtgggccgagtgcaccgcctgctccgcaaggcacactactccgagcgcgtcggggctggcgccccggtgtatctcgcggcggtgcttgagtacctgaccgccgagatcctagagctggcgggcaatgcggcccgcgacaacaagaagacccgcatcatcccgcgccacctgcaattggccatccgcaatgacgaggagcttaataaacttttggggcgtgtgaccatcgcgcagggtggcgttttgcctaatattcaggcggtgctgctgcctaagaaaactgagagccatcataaggccaagggaaagtgaagagttaacgcttcatgcactgctgtttttctgtcagcagacaaaatcagcctaacagcaaggctcttttcagagccacctacgacttccattaaatgagctgttgtgctttggattatgccgcccataaagatgtttttgaggtgtttttaatggctttgagtgtggcacttttagtaatttgtcctgcagaaattagatccatagaaacctcagga

SEQ ID NO: 186 - DNA, 286 bp, Homo sapiens
  C-myc promoter
gaaaagaaaaaagatcctctctcgctaatctccgcccaccggccctttataatgcgagggtctggacggctgaggacccccgagctgtgctgctcgcggccgccaccgccgggccccggccgtccctggctcccctcctgcctcgagaagggcagggcttctcagaggcttggcgggaaaaagaacggagggagggatcgcgctgagtataaaagccggttttcggggctttatctaactcgctgtagtaattccagcgagaggcagagggagcgagcgggcggcc

SEQ ID NO: 187 - DNA, 117 bp, Artificial Sequence
  Sythetic cell cycle-dependent promoter
gactttgtcccgcccctctcacagatactccaatgatcacttggcggtgttaggaatttggcgcgtaaaagtggccgggactttgtagtcagttccattcagggggcggagtagacc

SEQ ID NO: 188 - DNA, 190167 bp, Vaccinia virus
  LIVP parental genome
ttatgagaccatcaaagagagaaagagaataaaaatatttttgtaaaactttttttatgagaccatcaaagagagaaagagaataaaaatatttttgtaaaacttttttatgagaccatcaaagagagaaagagaataaaaatatttttgtaaaacttttttatgagaccatcaaagagagaaagagaataaaaatatttttgtaaaactttttttatgagaccatcaaagagagaaagagaataaaaatatttttgtaaaactttttttatgagaccatcaaagagagaaagagaataaaaatatttttgtaaaactttttttatgagaccatcaaagagagaaagagaataaaaatatttttgtaaaactttttttatgagaccatcaaagagagaaagagaataaaaatatttttgtaaaactttttttatgagaccatcaaagagagaaagagaataaaaatatttttgtaaaactttttttatgagaccatcaaagagagaaagagaataaaaatatttttgtaaaactttttttatgagaccatcaaagagagaaagagaataaaaatatttttgtaaaactttttttatgagaccatcaaagagagaaagagaataaaaatatttttgtaaaactttttttatgagaccatcaaagagagaaagagaataaaaatatttttgtaaaactttttttatgagaccatcaaagagagaaagagaataaaaatatttttgtaaaactttttttatgagaccatcaaagagagaaagagaataaaaatatttttgtaaaactttttttatgagaccatcagaaagaggtttaatatttttgtgatactctgaaaggaaataggaataggaataggaatagtgtcataatcgtatcacactattgagacagaaaaagaagaagtcgcgagaggtaactttttgtgaatgtagttaagaacatttttgttttgcaaaccggaatatagtgtccggtacacttttttaattcgtggtgtgcctgaatcgttcgattaaccctactcatccaatttcagatgaatagagttatcgattcagacacacgctttgagttttgttgaatcgatgagtgaagtatcatcggttgcaccttcagatgccgatccgtcgacatacttgaatccatccttgacctcaagttcagatgattccttgcacatgtctccgatacgaacgctaaactctagattcttgacgcattttgtatcgacgatcgttgaaccgatgatatcttcgtaactcactttcttatgagagatgttagacccgagtactggatgggtcttgatgtcgctgtctttctcttcttcgctacatctgatgtcgatagacacttcacagtctttgatcatagcaagagcttcttcatgagtgatcgcgggagagtccttaccttgtcctggggacacgctggacaatctagcattcactgtgtttccatcagcggattctgagatggatttaatctgaggacatttggtgaatccaaagttcattctcagacctccaccgatgatggagtaataagtggtaggaggatctacatcctcgactgatgtggaatcatcttctgattccacctcgggatctggatctgactcggactctgtaatttccgttacggattggcaaatcttatcattggtcggtgtttggtcttgctttgtgactttgataataacatcgattcccatatgatgtttgttttcttcttccgtacacgaggaggaggatgaggatgattgctgaagactggcaggcatagcagctgccgccaggcacatgcatgccaggacgatatattgtttcataattgctattgattgagtactgttctttatgattctacttccttaccgtgcaataaattagaatatattttctacttttacgagaaattaattattgtatttattatttatgggtgaaaaacttactataaaaagtgggtgggtttggaattagtgatcagtttatgtatatcgcaactaccgggcatatggctatcgacatcgagaacattacccacatgataagagattgtatcagtttcgtagtcttgagtattggtattactatatagtatatagatgtcgcccactagagttactgtctccgaatgcggcatgatagtatcattctttgctttcgttaactgtttggaggaagaatctttgttattgcatttaatctcgaaattcagagtgcacacctttctcctgtaaagaaacctgaagtcgctaccttattaagaacggagaagtatccatcacgaaatacgggattacagtctttatgattcatagtaatagttagttccgacgttgagatggattcgctgagaccggtagtggtcgtccgagtacacgacgtgtcgttaactggatacaggttaatttccacatcgatatagttaaacgtatttctgggtacgggttcgcatttatctgcggaagagacggtgtgagaatatgttccgagaccacacggagaacagatgacgtctccggatactccgtatcctattccacattttgtttgggaaacacatgccttgcatccggatgatcctttgagaagacaataatatccgggagagcattcacagattctattgtgagtcgtgttacacgatcgcgtcttccgttacaacttagacaagcgggtaaatgattattgcgagatgtgaaggtacccgaaccacacggcgtacatcgtgtgttagtcttgctatcgcataatctggaagcgtatgttcccggacacaaattatggcgtttgtattcgttgtctttacactttccatcggatggtgcatgcggtgctatatctcttccgtttattattatacatgagagaaacaatatatacgagtataatacggacttcatgatttaataatgtagtaatcgttgtcttgttcctgtttcctacttctccaatcatatagatattttctttctatcatggataatatttgtaatggttctttccgtacaacatactgtttagatgatattgcgcataatttccggaggcaaatacgatagtctagattgaccgatggtagactctaatttattgagtgctttgtcgacgagtttacttttacgctccatcgatagatggcactgttctatgagatcgtcgtacatgggaaatgaaatgtgactgtctgaatgtatggctttaagatagctgtgataccgtatacaggtcggtgtcggagattcgaatctctttgaggcgacttatgtcacgatgatggaatctatcttatcgaatgatatatttttcataaatacacttttatagtcctcgtttaaacagaatttactatgtagttccgcgaatgactcgtcccttaataggcagtaggctagtatcttttttacgtagtaatcgtcgtagggagagacatcttgtagaacaacgatttcgttttgttttctcttctgtaactgcttttctggatggccgtattgattatcgagcgtgatactcgctccatattccaataaccgctttgcaaattgtatattattgacatcgaccgcgtaatatagtagagttatcgatcatatctatatcatccatgtacttgcttagtatatcaaatacatctatcagtatggtttcataacagtgatacccgcaattattaaatctcgataatatcagaccgtacatacatagacggccattgttcgatacgtgatttacagccgcgtgtccatattttccacgataaaccttacgacgtttacatcgacgagattattattaacaaagtagtcgtgtagaggatagttgttgtccgttatctaacatgcatcgaacgaccatatcgccgtaatgtaagtagtttatcagtatggcttgtacgatggattcatcctgttgtctaaatctctttagaatgttatcgatgatgtagtggttatattctctggaatcgtacgaagtaatactacgcattacgtcgacaagagtatgacgtctctcaataagaagattaacgatttccatgtctacattatatggggttactctaaatcgcttgtttagataatacgcctctaatatagggctgacgtcgtatactctacacgtgtccacatcctttattaataataatttaacaatctctatatctatggttgagaaagaccagtagtattggatgggtaaagatcctccttcgtctctgccatggatggaaacattgttatcgatcaaacatttaattacatccttggatagagattgagattctctatgagacgatatatagtaatgaagagagttcttacacatatcactgtcgtacatacaggtacgaaatacgtaaccggtgctgtaacattctgatttaagaagccatagcaatacttctggtctcggattaggcgtcgttacgtatatatccaccaatccgagaccattgattgcataattcgtattcttggacggacgtatccgtttatccacaattaggtattttagcagacgtaagtcgatattatccgaatacagatcgaaatcatttatattcgacttgagttcgttagaggaatttgaatagctggatatcagtagatgcacaatctgagattttacgtatctatgcttactgtatactcctagcggagttaatccttcgttgtttctacaaagtctctcgactccgcgagagaacaatcttaatgtctgtatcgcatttattggagacgtaacaatgtagcgcattgtttcctcgtctatctatatgttttgataagttgtgacacgtttcaatttctagttttatttttttgtacgtcacatcttcatccagtagacgacatagaatagtgcactctctaccacaataatccatagctattctggtgctaattattcctatttcacgaaggcaatcattcctcataagatgataaaaagtgtagtggagatttagtatttagcagtgcggatatgatccaagagggtgagatagtcgttctcgttcagaatctttcgcagcataagtagtatgtcgatatacttatcgttgaagactctttataaaagtctatttgtttatatttattgcggatagcagtatttccctataaaaagtatacgtcctgtggtgtctttaatcatgtacatgaatggatggtttatgtagaccttcgtacgatataccatcgaaaagttaatcgtaaatactcctgtaacggccgatgcttctgtatactcctcattaacatctataaacgtcgtatgtagaaatttttctacagtgatagtttcattacacatcttgctaaaatctgcataatatccgaatatattagtaagtcctaaattttctaaaatcggtaccagattatacggttctgtcatttccactttaaactttggcatatacaagtctatacttttagtagataacataccacaccattttttaaatttttcatctgttatatttttttctatgttatatataccttctatgtcgtccggtagtataattaccatactagagtttccctcgtatggaatatcgataatagagaatcctccgaataattcattaatatgtacatattgcaagttattctcggtacccaccatcatatcaacgctggtaactatattcttagaaatataaaacttgtctgtatatgtaagatgtttagaaaatggatatttccacattgctttaaaatggacggcgctaacaactgtcatacgagtattaatggatagcggactagtcaataaggaattaattttaccatttgtcattgtcttaacccattcgttgattagttcctttgtttggttagcattattaaagtttacagtttgaaaatcgtcttttattttttgtaggaaggaggcgtggaactcgatactatcgctaccgtatattttatttgcggtagctagtgtcgcacaatacggaatatctacctccatgtcatcattattgtcatcgggtgtattctcattcatattctctatatattttgatagttgttcagctgtagaaccagctgctccatgatttagaatagataaagtagataaaatggaaactggagaaatcaaaacattttcatcagggtgttttaagattagttctttaaagatatccatggtatagacctaacgataacgatatatatcataaataaataatgttaaatttcaatttatgtttgtaccccgtattcatacttaacaaattggtattgcgtacacaatcaatcatattacataccattaataatgcaagcataaaaaattgttagtagatgtttctaaatataggttccgtaagcaaagaatataagaatgaagcggtaatgataaaatcaatcgttatctaaaatgatcatactcatttattttattctattatattaacacatacatttttaacagcaacacattcaatattgtattgttatttttatattatttacacaattaacaatatattattagtttatattactgaattaataatataaaattcccaatcttgtcataaacacacactgagaaacagcataaacacagaatccatcaaaaatgttgataaattatctgatgttgttgttcgctgctatgataatcagatcattcgccgatagtggtaacgctatcgaaacgacattgccagaaattacaaacgctacaacagatattccagctatcagattatgcggtccagagggagatggatattgtttacacggtgactgtatccacgctagagatattgacggtatgtattgtagatgctctcatggttatacaggcattagatgtcagcatgtagtattagtagactatcaacgttcagaaaacccaaacactacaacgtcatatatcccatctcccggtattatgcttgtattagtaggcattattatgtgttgtctattatctgtttataggttcactcgacgaactaaactacctatacaagatatggttgtgccataatttttataaatttttttatgagtatttttacaaaaatgtataaagtgtatgtcttatgtatatttataaaaatgctaagtatgcgatgtatctatgttatttgtatttatctaaacaatacctctacctctagatattatacaaaaattttttatttcggcatattaaagtaaaatctagttaccttgaaaatgaatacagtgggtggttccgtatcaccagtaagaacataatagtcaaatacagtatccgattgagattttgcatacaatactagtctagaaagaaatttgtaatcatcttctgtgacgggagtccatatatctgtatcatcgtctagtttatcagtgtcccatgctatattcctgttatcatcattagttaatgaaaataactctcgtgcttcagaaaagtcaaatattgtatccatacatacatctccaaaactatcgcttatacgtttatctttaacgatacctatacctagatggttatttactaacagacattttccagatctattgactataactcctatagtttccacatcaaccaagtaatgatcatctattgttatataacaataacataactcttttccatttttatcagtatgtatatctatatcaacgtcgtcgttgtagtgaatagtagtcattgatctattatatgaaacggatatgtctagaacggcaattgttttacgtccagttaacactttcgttgatttaaagtctagagtctttgcaaacataatatccttatccgactttatatttcctgtagggtggtataattttattttgcctccacatatcggtgtttccaaatatattactagacaatattccatatagttattagttaagggtacccaattagaacacgtacgcttattatcatcatttggatcgtatttcataaaagttattgtgttatcgatgtcaacacattctacattttttaatcgtctatatagtatttttctgatattttctataatatcagaattgtcttccatcggaagttgtatactatcggaatcagttacatgtttaaataattctctgatgtcattccttatacaatcaaattcattattaaacagtttaatagtctgtagacctttatcgtcgtaaatatccattgtcttattagttacgcttatttttatgtgtttttacgttgctttattatattttataagaatgattgtttgacgaatcacgagaactattaagacacattattaggtatatattataaaaaagtttttgattacgatgttataagaggaaagaggacacattaacatcatacatcaattaactacattcttataacatcgtaatcaaaagaattgcaattttgatgtataacaactgtcaatgggttatggaattgtatattacatattatacggtatgttggtaacgacaaataccggtcggtaattgtctgccggtgtaatagaattatatatatctatctattacaccggccttgtatacataataataagttgtggtagtatgatctccatatttataatttaggactttgtattcagtatttttggaatcataaaaaataaaaaaaagttttactaatttaaaatttaaaaagtatttacatttttttcactgtttagtcgcggatatggaattcgatcctgccaaaatcaatacatcatctatagatcatgtaacaatattacaatacatagatgaaccaaatgatataagactaacagtatgcattatccgaaatattatatcaatatcacaaaaataaatacacatttggctaatcaatttcgggcttggaaaaaacgtatcgccggaagggactatatgactaacttatctagagatacaggaatacaacaatcaaaacttactgaaactatacgtaactgtcaaaaaaatagaaacatatatggtctatatatacactacaatttagttattaattggataaccgatgtgattatcaatcaatattaagagggttggtaaattggtacatagctaataatacctatactccaaatacacccaataatacaacaaccatttctgagttggatatcatcaaaatactaaataaatacgaggacgtgtatagagtaagtaaagaaaaagaatgtggaatttgctatgaagttgtttactcaaaacgatagatactttggtttattggattcgtgtactcatatattttgcataacatgcatcaatatatggcatagaacacgaagagaaaccggtgcgtcggataattgtcctatatgccgtacccgttttagaaacataacaatgagcaagttctataagctagttaactaataaataaaaagtttaatttgttgacgacgtatgtcgttattttttctcgtataaaagattaatttgattctaatataatctttagtattggataaatatcaattcaaattaattccattagattatatcataaataaaaatagtagcacacaactacttcagcaaacattctttttataaatgccatctagcgtagcgaggacacaagtgaacctataattatcaaatttattagtatcagtcacatgaaggactttacgtagagtgacgattccactatctgtggtacgaacggtttcatcttctttgatgccatcacccagatgttctataaacttggtatcctcgtccgatttcatatcctttgccaaccaatacatatagctaaactcaggcatatgttccacacatcctgaacaatgaaattctccagaagatgttacaatgtctagatttggacatttggtttcaaccgcgttaacatatgagtgaacacacccatacatgaaagcgatgagaaataggattctcatcttgccaaaatatcactagaaaaaatttatttatcagttttaaaggtataaaaaatacttattgttgctcgaatattttgtatttgatggtatacggaagattagaaatgtaggtattatcatcaactgattctatggttttatgtattctatcatgtttcactattgcgttggaaataatatcatatgcttccacatatattttattttgttttaactcataatactcacgtaattctggattattggcatatctatgaataattttagctccatgatcagtaaatattaatgagaacatagtattaccacctaccattatttttttcatctcattcaattcttaattgcaaagatctatataatcattatagcgttgacttatggactctggaatcttagacgatgtacagtcatctataatcatggcatatttaatacattgttttatagcatagtcgttatctacgatgttagatatttctctcaatgaatcaatcacacaatctaatgtaggtttatgacataatagcattttcagcagttcaatgtttttagattcgttgatggcaatggctatacatgtatatccgttatttgatctaatgttgacatctgaaccggattctagcagtaaagatactagagattgtttattatatctaacagccttgtgaagaagtgtttctcctcgtttgtcaatcatgttaatgtctttaagataaggtaggcaaatgtttatagtactaagaattgggcaagcataagacatgtcacaaagacccttttttgtatgtataagtgtaaaaattataacatccatagttggatttacataggtgtccaatcgggatctctccatcatcgagataattgatggcatctcccttccttttttagtagatatttcatcgtgtaagaatcaatattaatatttctaaagtatccgtgtatagcctctttatttaccacagctccatattccactagagggatatcgccgaatgtcatatactcaattagtatatgttggaggacatccgagttcattgttttcaatatcaaagagatggtttccttatcatttctccatagtggtacaatactacacattattccgtgcggctttccattttccaaaaacaatttgaccaaatctaaatctacatctttattgtatctataatcactatttagataatcagccataattcctcgagtgcaacatgttagatcgtctatatatgaataagcagtgttatctattcctttcattaacaatttaacgatgtctatatctatatgagatgacttaatataatattgaagagctgtacaatagtttttatctataaaagacggcttgattccgtgattaattagacatttaacaacttccggacgcacatatgctctcgtatccgactctgaatacagatgagagatgatatacagatgcaatacggtaccgcaatttcgtagttgataatcatcatacgcgtatcagtactcgtcctcataaagaacactgcagccattttctatgaacaaatcaataattttagaaacaggatcattgtcattacataattttctataactgaacgatggttttcacatttaacactcaagtcaaatccatgttctaccaacacctttatcaagtcaacgtctacatttttggatttcatatagctgaatatattaaagttatttatgttgctaaatccagtggcttctagtagagccatcgctatatccttattaactttaacatgtctactatttgtgtattcttctaatggggtaagctgtctccaatttttgcgtaatggattagtgccactgtctagtagtagtttgacgacctcgacattattacaatgctcattaaaaaggtatgcgtgtaaagcattattcttgaattggttcctggtatcattaggatctctgtctttcaacatctgtttaagttcatcaagagccacctcctcattttccaaatagtcaaacattttgactgaatgagctactgtgaactctatacacccacacaactaatgtcattaaatatcatgtcaaaaacttgtacaattattaataaaaataatttagtgtttaaattttaccagttccagattttacacctccgttaatacctccattaaccccactggacgatcctcctccccacattccaccgccaccagatgtataagttttagatcctttattactaccatcatgtccatggataaagacactccacatgccgccactaccccctttagaagacatattaataagacttaaggacaagtttaacaataaaattaatcacgagtaccctactaccaacctacactattatatgattatagtttctatttttacagtaccttgactaaagtttctagtcacaagagcaatactaccaacctacactattatatgattatagtttctatttttataggaacgcgtacgagaaaatcaaatgtctaatttctaacggtagtgttgataaacgattgttatccgcggatacctcctctatcatgtcgtctattttcttactttgttctattaacttattagcattatatattatttgattataaaacttatattgcttattagcccaatctgtaaatatcggattattaacatatcgtttctttgtaggtttatttaacatgtacatcactgtaagcatgtccttaccatttattttaatttgacgcatatccgcaatttctttttcgcagtcggttataaattctatatatgatggatacatgctacatgtgtacttataatcgactaatatgaagtacttgatacatattttcagtaacgatttattattaccacctatgaataagtacctgtgatcgtctaggtaatcaactgttttcttaatacattcgatggttggtaatttactcagaataatttccaatatcttaatatataattctgctatttctgggatatatttatctgccagtataacacaaatagtaatacatgtaaacccatattttgttattatattaatgtctgcgccattatctattaaccattctactaggctgacactatgcgactcaatacaatgataaagtatactacatccatgtttatctattttgtttatatcatcaatatacggcttacaaagttttagtatcgataacacatccaactcacgcatagagaaggtagggaataatggcataatatttattaggttatcatcattgtcattatctacaactaagtttccattttttaaaatatactcgacaactttaggatctctattgccaaatttttgaaaatatttatttatatgcttaaatctatataatgtagctccttcatcaatcatacatttaataacattgatgtatactgtatgataagatacatattctaacaatagatcttgtatagaatctgtatatcttttaagaattgtggatattaggatattattacataaactattacacaattctaaaatataaaacgtatcacggtcgaataatagttgatcaactatataattatcgattttgtgatttttcttcctaaactgtttacgtaaatagttagatagaatattcattagttcatgaccactatagttactatcgaataacgcgtcaaatatttcccgtttaatatcgcatttgtcaagataataatagagtgtggtatgttcacgataagtataataacgcatctctttttcgtgtgaaattaaatagtttattacgtccaaagatgtagcataaccatcttgtgacctagtaataatataataatagagaactgttttacccattctatcatcataatcagtggtgtagtcgtaatcgtaatcgtctaattcatcatcccaattataatattcaccagcacgtctaatctgttctattttgatcttgtatccatactgtatgttgctacatgtaggtattcctttatccaataatagtttaaacacatctacattgggatttgatgttgtagcgtatttttctacaatattaataccatttttgatactatttatttctatacctttcgaaattagtaatttcaataagtctatattgatgttatcagaacatagatattcgaatatatcaaaatcattgatatttttatagtcgactgacgacaataacaaaatcacaacatcgtttttgatattattatttttcttggtaacgtatgcctttaatggagtttcaccatcatactcatataatggatttgcaccactttctatcaatgattgtgcactgctggcatcgatgttaaatgttttacaactatcatagagtatcttatcgttaaccatgattggttgttgatgctatcgcattttttggtttctttcatttcagttatgtatggatttagcacgtttgggaagcatgagctcatatgatttcagtactgtagtgtcagtactattagtttcaataagatcaatctctagatctatagaatcaaaacacgataggtcagaagataatgaatatctgtaggcttcttgttgtactgtaacttctggttttgttagatggttgcatcgtgctttaacgtcaatggtacaaattttatcctcgctttgtgtatcatattcgtccctactataaaattgtatattcagattatcatgcgatgtgtatacgctaacggtatcaataaacggagcacaccatttagtcataaccgtaatccaaaaatttttaaagtatatcttaacgaaagaagttgtgtcattgtctacggtgtatggtactagatcctcataagtgtatatatctagagtaatgtttaatttattaaatggttgataatatggatcctcgtgacaatttccgaagatggaaataagacataaacacgcaataaatctaattgcggacatggttactccttaaaaaaatacgaataatcaccttggctatttagtaagtgtcatttaacactatactcatattaatccatggactcataatctctatacgggattaacggatgttctatatacggggatgagtagttctcttctttaactttatactttttactaatcatatttagactgatgtatgggtaatagtgtttgaagagctcgttctcatcatcagaataaatcaatatctctgtttttttgttatacagatgtattacagcctcatatattacgtaatagaacgtgtcatctaccttattaactttcaccgcatagttgtttgcaaatacggttaatcctttgacctcgtcgatttccgaccaatctgggcgtataatgaatctaaactttaattgcttgtaatcattcgaaataatttttagtttgcatccgtagttatcccctttatgtaactgtaaatttctcaacgcgatatctccattaataatgatgtcgaattcgtgctgtatacccatactgaatggatgaacgaataccgacggcgttaatagtaatttactttttcatctttacatattgggtactagttttactatcataagtttataaattccacaagctactatggaataagccaaccatcttagtataccacacatgtcttaaagtttattaattaattacatgttgttttatatatatcgctacgaatttaaagagaaattagtttaggaagaaaaattatctatctacatcatcacgtctctgtattctacgatagagtgctactttaagatgcgacagatccgtgtcatcaaatatatactccattaaaatgattattccggcagcgaacttgatattggatatatcacaacctttgttaatatctacgacaatagacagcagtcccatggttccataaacagtgagtttatctttctttgaagagatattttgtagagatcttataaaactgtcgaatgacatcgcatttatatctttagctaaatcgtatatgttaccatcgtaatatctaaccgcgtctatcttaaacgtttccatcgctttaaagacgtttccgatagatggtctcatttcatcagtcatactgagccaacaaatataatcgtgtataacatctttgatagaatcagactctaaagaaaacgaatcggctttattatacgcattcatgataaacttaatgaaaaatgtttttcgttgtttaagttggatgaatagtatgtcttaataattgttattatttcattaattaatatttagtaacgagtacactctataaaaacgagaatgacataactaatcataactagttatcaaagtgtctaggacgcgtaattttcatatggtatagatcctgtaagcattgtctgtattctggagctattttctctatcgcattagtgagttcagaatatgttataaatttaaatcgaataacgaacataactttagtaaagtcgtctatattaactcttttattttctagccatcgtaataccatgtttaagatagtatattctctagttactacgatctcatcgttgtctagaatatcacatactgaatctacatccaattttagaaattggtctgtgttacatatctcttctatattattgttgatgtattgtcgtagaaaactattacgtagaccattttctttataaaacgaatatatagtactccaattatctttaccgatatatttgcacacataatccattctctcaatcactacatctttaagattttcgttgttaagatatttggctaaactatataattctattagatcatcaacagaatcagtatatatttttctagatccaaagacgaactctttggcgtcctctataatattcccagaaaagatattttcgtgttttagtttatcgagatctgatctgttcatatacgccatgattgtacggtacgttatgataaccgcataaaataaaaatccattttcatttttaaccaatactattcataattgagattgatgtaatactttgttactttgaacgtaaagacagtacacggatccgtatctccaacaagcacgtagtaatcaaatttggtgttgttaaacttcgcaatattcatcaatttagatagaaacttatactcatcatctgttttaggaatccatgtattattaccactttccaacttatcattatcccaggctatgtttcgtccatcatcgttgcgcagagtgaataattcttttgtattcggtagttcaaatatatgatccatgcatagatcggcaaagctattgtagatgtgatttttcctaaatctaatataaaactcgtttactagcaaacactttcctgatttatcgaccaagacacatatggtttctaaatctatcaagtggtggggatccatagttatgacgcagtaacatatattattacattcttgactgtcgctaatatctaaatatttattgttatcgtattggattctgcatatagatggcttgtatgtcaaagatatagaacacataaccaatttatagtcgcgctttacattctcgaatctaaagttaagagatttagaaaacattatatcctcggatgatgttatcactgtttctggagtaggatatattaaagtctttacagatttcgtccgattcaaataaatcactaaataatatcccacattatcatctgttagagtagtatcattaaatctattatattttatgaaagatatatcactgctcacctctatatttcgtacatttttaaactgtttgtataatatctctctgatacaatcagatatatctattgtgtcggtagacgataccgttacatttgaattaatggtgttccattttacaacttttaacaagttgaccaattcatttctaatagtatcaaactctccatgattaaatattttaatagtatccattttatatcactacggacacaaagtagctgacataaaccattgtataatttttatgttttatgtttattagcgtacacattttggaagttccggcttccatgtatttcctggagagcaagtagatgatgaggaaccagatagtttatatccgtacttgcacttaaagtctacattgtcgttgtatgagtatgatcttttaaacccgctagacaagtatccgtttgatattgtaggatgtggacatttaacaatctgacacgtgggtggatcggaccattctcctcctgaacacaggacactagagttaccaatcaacgaatatccactattgcaactataagttacaacgctcccatcggtataaaaatcctcgtatccgttatgtcttccgttggatatagatggaggggattggcatttaacagattcacaaataggtgcctcgggattccataccatagatccagtagatcctaattcacaatacgatttagattcaccgatcaactgatatccgctattacaagagtacgttatactagagccaaagtctactccaccaatatcaagttggccattatcgatatctcgaggcgatgggcatctccgtttaatacattgattaaagagtgtccatccagtacctgtacatttagcatatataggtcccattttttgctttctgtatccaggtagacatagatattctatagtgtctcctatgttgtaattagcattagcatcagtctccacactattcttaaatttcatattaatgggtcgtgacggaatagtacagcatgatagaacgcatcctattcccaacaatgtcaggaacgtcacgctctccaccttcatatttatttatccgtaaaaatgttatcctggacatcgtacaaataataaaaagcccatatatgttcgctattgtagaaattgtttttcacagttgctcaaaaacgatggcagtgacttatgagttacgttacactttggagtctcatctttagtaaacatatcataatattcgatattacgagttgacatatcgaacaaattccaagtatttgattttggataatattcgtattttgcatctgctataattaagatataatcaccgcaagaacacacgaacatctttcctacatggttaaagtacatgtacaattctatccatttgtcttccttaactatatatttgtatagataattacgagtctcgtgagtaattccagtaattacatagatgtcgccgtcgtactctacagcataaactatactatgatgtctaggcatgggagacttttttatccaacgatttttagtgaaacattccacatcgtttaatactacatatttctcatacgtggtataaactccacccattacatatatatcatcgtttacgaataccgacgcgcctgaatatctaggagtaattaagtttggaagtcttatccatttcgaagtgccgtgtttcaaatattctgccacacccgttgaaatagaaaattctaatcctcctattacatataactttccatcgttaacacaagtactaacttctgattttaacgacgacatattagtaaccgttttccattttttcgttttaagatctacccgcgatacggaataaacatgtctattgttaatcatgccgccaataatgtatagacaattatgtaaaacatttgcattatagaattgtctatctgtattaccgactatcgtccaatattctgttctaggagagtaatgggttattgtggatatataatcagagtttttaatgactactatattatgttttataccatttcgtgtcactggctttgtagatttggatatagttaatcccaacaatgatatagcattgcgcatagtattagtcataaacttgggatgtaaaatgttgatgatatctacatcgtttggatttttatgtatccactttaataatatcatagctgtaacatcctcatgatttacgttaacgtcttcgtgggataagatagttgtcagttcatcctttgataattttccaaattctggatcggatgtcaccgcagtaatattgttgattatttctgacatcgacgcattatatagttttttaattccatatcttttagaaaagttaaacatccttatacaatttgtgaaattaatattatgaatcatagtttttacacatagatctactacaggcggaacatcaattattatggcagcaactagtatcatttctacattgtttatggtgatgtttatcttcttccagcgcatatagtctaatagcgattcaaacgcgtgatagtttataccattcaatataatcgcttcatcctttagatggtgatcctgaatgcgtttaaaaaaattatacggagacgccgtaataatttccttattcacttgtataatttccccattgatagaaaatattacgctttccattcttaaagtactataagtaattatagtataatgtaaacgtttatatattcaatatttttataaaaatcattttgacattaattcctttttaaatttccgtctatcatctatagaaacgtattctatgaatttataaaatgcttttacgtgtcctatcgtaggcgatagaaccgctaaaaagcctatcgaatttctacaaaagaatctgttatatggtatagggagagtataaaacattaaatgtccgtacttattaaagtattcagtagccaatcctaactctttcgaatacttattaatggctcttgttctgtacgaatctatttttttgaacaacggacctagtggtatatcttgttctatgtatctaaaataatgtctgactagatccgttagtttaatatccgcagtcatcttgtctagaatggcaaatctaactgcgggtttaggctttagtttagtttctatatctacatctatgtctttatctaacaccaaaaatataatagctaatattttattacaatcatccggatattcttctacgatctcactaactaatgtttctttggttatactagtatagtcactatcggacaaataaagaaaatcagatgatcgatgaataatacatttaaattcatcatctgtaagatttttgagatgtctcattagaatattattagggttagtactcattatcattcggcagctattacttattttattatttttcaccatatagatcaatcattagatcatcaaaatatgtttcaatcatcctaaagagtatggtgaatgactcttcccatctaatttctgaacgttcaccaatgtctctagccactttggcactaatagcgatcattcgcttagcgtcttctatattattaactggttgatttaatctatctagcaatggaccgtcggacagcgtcattctcatgttcttaatcaatgtacatacatcgccgtcatctaccaattcatccaacaacataagctttttaaaatcatcattataataggtttgatcgttgtcatttctccaaagaatatatctaataagtagagtcctcatgcttagttaacaactattttttatgttaaatcaattagtacaccgctatgtttaatacttattcatattttagtttttaggattgagaatcaatacaaaaattaatgcatcattaattttagaaatacttagtttccacgtagtcaatgaaacatttgaactcatcgtacaggacgttctcgtacaggacgtaactataaaccggtttatatttgttcaagatagatacaaatccgataactttttttacgaattctacgggatccactttaaaagtgtcataccgggttctttttatttttttaaacagatcaatggtgtgatgttgattaggtcttttacgaatttgatatagaatagcgtttacatattctccataatggtcaatcgccatttgttcgtatgtcataaattctttaattatatgacactgtgtattatttagttcatccttgttcattgttaggaatctatccaaaatggcaattatactagaactataggtgcgttgtatacacatattgatgtgtctgtttatacaatccatgatatttggatccatgctactaccttcgggtaaaattgtagcatcatataccatttctagtactttaggttcattattatccattgcagaggacgtcatgatcgaatcataaaaaaatatattatttttatgttattttgttaaaaataatcatcgaatacttcgtaagatactccttcatgaacataatcagttacaaaacgtttatatgaagtaaagtatctacgatttttacaaaagtccggatgcataagtacaaagtacgcgataaacggaataataatagatttatctagtctatctttttctatagctttcatagttagatacatggtctcagaagtaggattatgtaacatcagcttcgataaaatgactgggttatttagtcttacacattcgctcatacatgtatgaccgttaactacagagtctacactaaaatgattgaacaatagatagtctaccattgtttcgtattcagatagtacagcgtagtacatggcatcttcacaaattatatcattgtctaatagatatttgacgcatcttatggatcccacttcaacagccatcttaaaatcatattgctttcctttatcattaataatttctagaacatcatctctatcataaaagatacaaatattaactgtttgatccgtaataacattgctagtcaatagcaatttgttaataagatgcgctgggctcaatgtcttaataagaagtgtaagaggactatctccgaatttgttttgtttattaacatccgttgatggaagtaaaagatctataatgtctacattcttgactgttttagagcatacaatatggagaggtgtatttccatcatgatctggttttgagggactaattcctagtttcatcatccatgagattgtagaagcttttggattgtctgacataagatgtctatgaatatgatttttgccaaatttatccactatcctggcttcgaatccgatggacattatttttttaaacactctttctgaaggatctgtacacgccaacaacggaccacatccttcttcatcaaccgagttgttaatcttggctccatactgtaccaataaatttattctctctatgacttcatcatctgttcccgagagataatatagaggtgttttatgctgtttatcacacgcgtttggatctgcgccgtgcgtcagcagcatcgcgactattctattattattaattttagaagctatatgcaatggataatttccatcatcatccgtctcatttggagagtatcctctatgaagaagttcttcgacaaatcgttcatctagtcctttaattccacaatacgcatgtagaatgtgataattatttccagaaggttcgatagcttgtagcatattcctaaatacatctaaatttttactattatatttggcataaagagatagataatactcggccgacataatgttgtccattgtagtataaaaattaatatttctatttctatttctgtatatttgcaacaatttactctctataacaaatatcataacttagtttttttatgtcaagaaggcactggtttagttcatctataaatgtcacgccataactaccacgcatgccatactcagaattatgataaagatatttatccttggggtgtaggtaatggggattaatctttgttggatcagtctctaagttaacacatgtcacacatgatccatttatagttatatcacacgatgatgatttatgaattgattccggaagatcgctatcgtattttgtggttccacaattcatttccatacatgttattgtcacactaatattatgatgaactttatctagccgctgagtggtaaacaacagaacagatagtttattatctttaccaacaccctcagccgctgccacaaatctctgatccgtatccatgatggtcatgtttatttctagtccgtatccagtcaacactatgttagcatttctgtcgatatagctttcactcatatgacactcaccaataatagtagaattaatgtcgtaatttacaccaatagtgagttcggcggcaaagtaccaataccggtaatcttgtcgaggaggacatatagtattcttgtattctaccgaatacccgagagatgcgatacaaaagagcaagactaatttgtaaaccatcttactcaaaatatgtaacaatagtacgatgcaatgagtaagacaataggaaatctatcttatatacacataattattctatcaattttaccaattagttagtgtaatgttaacaaaaatgtgggagaatctaattagtttttctttacacaattgacgtacatgagtctgagttccttgtttttgctaattatttcatccaatttattattcttgacgatatcgagatcttttgtataggagtcaaacttgtattcaacatgcttttctataatcattttagctatttcggcatcatccaatagtacattttccagattagcagaatagatattaatgtcgtatttgaacagagcctgtaacatctcaatgtctttattatctatagccaatttaatgtccggaatgaagagaagggaattattggtgtttgtcgacgtcatatagtcgagcaagagaatcatcatatccacgtgtccattttttatagtgatgtgaatacaactaaggagaatagccagatcaaaagtagatggtatctctgaaagaaagtaggaaacaatacttacatcattaagcatgacggcatgataaaatgaagttttccatccagttttcccatagaacatcagtctccaatttttcttaacaaacagttttaccgtttgcatgttaccactatcaaccgcataatacaatgcggtgtttcccttgtcatcaaattgtgaatcatccagtccactgaatagcaaaatctttactattttggtatcttccaatgtggctgcctgatgtaatggaaattcattctctagaagatttttcaatgctccagcgttcaacaacgtacatactagacgcacgttattatcagctattgcataatacaaggcactatgtccatggacatccgccttaaatgtatctttactagagagaaagcttttcagctgcttagacttccaagtattaattcgtgacagatccatgtctgaaacgagacgctaattagtgtatattttttcattttttataattttgtcatattgcaccagaattaataatatctttaatagatctgattagtagatacatggctatcgcaaaacaacatatacacatttaataaaaataatatttattaagaaaattcagatttcacgtacccatcaatataaataaaataatgattccttacaccgtacccatattaaggagattccaccttacccataaacaatataaatccagtaatatcatgtctgatgatgaacacaaatggtgtattaaattccagtttttcaggagatgatctcgccgtagctaccataatagtagatgcctctgctacagttccttgttcgtcgacatctatctttgcattctgaaacattttataaatatataatgggtccctagtcatatgtttaaacgacgcattatctggattaaacatactaggagccatcatttcggctatcgacttaatatccctcttattttcgatagaaaatttagggagtttaagattgtacactttattccctaattgagacgaccaatagtctaattttgcagccgtgatagaatctgtgaaatgggtcatattatcacctattgccaggtacatactaatattagcatccttatacggaaggcgtaccatgtcatattctttgtcatcgattgtgattgtatttccttgcaatttagtaactacgttcatcatgggaaccgttttcgtaccgtacttattagtaaaactagcattgcgtgttttagtgatatcaaacggatattgccatatacctttaaaatatatagtattaatgattgcccatagagtattattgtcgagcatattagaatctactacattagacataccggatctacgttctactatagaattaattttattaaccgcatctcgtctaaagtttaatctatataggccgaatctatgatattgttgataatacgacggtttaatgcacacagtattatctacgaaactttgataagttagatcagtgtacgtatatttagatgttttcagcttagctaatcctgatattaattctgtaaatgctggacccagatctctttttctcaaatccatagtcttcaataattctattctagtattacctgatgcaggcaatagcgacataaacatagaaaacgaataaccaaacggtgagaagacaatattatcatcttgaatatttttatacgctactataccggcattggtaaatccttgtagacgataggcggacgctgaacacgctaacgatagtatcaataacgcaatcatgattttatggtattaataattaaccttatttttatgttcggtataaaaaaattattgatgtctacacatccttttgtaattgacatctatatatccttttgtataatcaactctaatcactttaacttttacagttttccctaccagtttatccctatattcaacatatctatccatatgcatcttaacactctctgccaagatagcttcagagtgaggatagtcaaaaagataaatatatagagcataatcattctcgtatactctgccctttattacatcacccgcattgggcaacgaataacaaaatgcaagcatcttgttaacgggctcgtaaattgggataaaaattatgtttttattgtcttatatctattttattcaagagaatattcaggaatttctttttccggttgtatctcgtcgcagtatatatcatttgtacattgtttcatattttttaatagtttacaccttttagtaggactagtatcgtacaattcatagctgtattttgaattccaatcacgcataaaaatatcttccaattgttgacgaagacctaatccatcatccggtgtaatattaatagatgctccacatgtatccgtaaagtaatttcctgtccaatttgaggtacctatataggccgttttatcggttaccatatatttggcatggtttaccctagaatacggaatgggaggatcagcatctggtacaataaatagctttacttctatatttatgtttttagattttagcatagcgatagatcttaaaaagtttctcatgataaacgaagatcgttgccagcaactaatcaatagcttaacggatacttgtctgtctatagcggatcttcttaattcatcttctatataaggccaaaacaaaattttacccgccttcgaataaataatagggataaagttcataacagatacataaacgaatttactcgcatttctaatacatgacaataaagcggttaaatcattggttctttccatagtacatagttgttgcggtgcagaagcaataaatacagagtgtggaacgccgcttacgttaatactaagaggatgatctgtattataatacgacggataaaagtttttccaattatatggtagattgttaactccaagataccagtatacctcaaaaatttgagtgagatccgctgccaagttcctattattgaagatcgcaatacccaattccttgacctgagttagtgatctccaatccatgttagcgcttcctaaataaatatgtgtattatcagatatccaaaattttgtatgaagaactcctcctaggatatttgtaatatctatgtatcgtacttcaactccggccatttgtagtctttcaacatcctttaatggtttgttagatttattaacggctactctaactcgtactcctcttttgggtaattgtacaatctcgtttaatattatcgtgccgaaattcgtacccacttcatccgataaactccaataaaaagatgatatatctagtgtttttgtggtattggatagaatttccctccacatgttaaatgtagacaaatatactttatcaaattgcatacctataggaatagtttctgtaatcactgcgattgtattatccggattcattttatttgttaaaagaataatcctatatcacttcactctattaaaaatccaagtttctatttctttcatgactgattttttaacttcatccgtttccttatgaagatgatgtttggcaccttcataaatttttatttctctattacaatttgcatgttgcatgaaataatatgcacctaaaacatcgctaatcttattgtttgttccctggagtatgagagtcggggggtgttaatcttggaaattatttttctaaccttgttggtagccttcaagacctgactagcaaatccagccttaattttttcatgattgactaatgggtcgtattggtatttataaactttatccatatctctagatactgattctggacatagctttccgactggcgcatttggtgtgatggttcccataagtttggcagctagcagattcagtcttgaaacagcatctgcattaactagaggagacattagaatcattgctgtaaacaagtttggattatcgtaagaggctagctcccatggaatgacccaataagtagatttaatagttaccacgtgctgtaccaaagtcatcaatcatcattttttcaccattacttcttccatgtccaatatgatcatgtgagaatactaaaattcctaacgatgatatgttttcagctagttcgtcataacgtccagaatgtttaccagctccatgacttatgaatactaatgccttaggatatgtaataggtttccaatatttacaatatatgtaatcattgtccagattgaacatacagtttgcactcatgattcacgttatataactatcaatattaacagttcgtttgatgatcatattatttttatgttttattgataattgtaaaaacatacaattaaatcaatatagaggaaggagacggctactgtcttttgtaagatagtcatggcgactaaattagattatgaggatgctgttttttactttgtggatgatgataaaatatgtagtcgcgactccatcatcgatctaatagatgaatatattacgtggagaaatcatgttatagtgtttaacaaagatattaccagttgtggaagactgtacaaggaattgatgaagttcgatgatgtcgctatacggtactatggtattgataaaattaatgagattgtcgaagctatgagcgaaggagaccactacatcaattttacaaaagtccatgatcaggaaagtttattcgctaccataggaatatgtgctaaaatcactgaacattggggatacaaaaagatttcagaatctagattccaatcattgggaaacattacagatttgatgaccgacgataatataaacatcttgatactttttctagaaaaaaaattgaattgatgatataggggtcttcataacgcataattattacgttagcattctatatccgtgttaaaaaaaattatcctatcatgtatttgagagttttatatgtagcaaacatgatagctgtgatgccaataagctttagatattcacgcgtgctagtgttagggatggtattatctggtggtgaaatgtccgttatataatctacaaaacaatcatcgcatatagtatgcgatagtagagtaaacatttttatagtttttactggattcatacatcgtctacccaattcggttataaatgaaattgtcgccaatcttacacccaaccccttgttatccattagcatagtattaacttcgttatttatgtcataaactgtaaatgattttgtagatgccatatcatacatgatattcatgtccctattataatcattactaactttatcacaatatatgttgataatatctatatatgatctagtctttgtgggcaactgtctatacaagtcgtctaaacgttgtttactcatatagtatcgaacagccatcattacatggtcccgttccgttgatagataatcgagtatgttagtggacttgtcaaatctatataccatattttctggaagtggatatacatagtcgtgatcaacattattgctagcctcatcttctatatcctgtactataccattatctatatcatctacataatctatgatattattacacataaacatcgacaacatactattgtttattatctaagtcctgttgatccaaacccttgatctcctctatttgtactatctagagattgtacttcttccagttctggataatatatacgttgatagattagctgagctattctatctccagtatttacattaaacgtacattttccattattaataagaatgactcctatgtttcccctataatcttcgtctattacaccacctcctatatcaatgccttttagtgacagaccagacctaggagctattctaccatagcagaacttaggcatggacatactaatatctgtcttaattaactgtctttctcctggagggatagtataatcgtaagcgctatacaaatcatatccggcagcacccggcgattgcctagtaggagatttagctctgttagtttccttaacaaatctaactggtgagttaatattcatgttgaacataaaactaatattttatttcaaaattatttaccatcccatatattccatgaataagtgtgatgattgtacacttctatagtatctatatacgatccacgataaaatcctcctatcaatagcagtttattatccactatgatcaattctggattatccctcggataaataggatcatctatcagagtccatgtattgctggattcacaataaaattccgcatttctaccaaccaagaataaccttctaccgaacactaacgcgcatgatttataatgaggataataagtggatggtccaaactgccactgatcatgattgggtagcaaatattctgtagttgtatcagtttcagaatgtcctcccattacgtatataacattgtttatggatgccactgctggattacatctaggtttcagaagactcggcatattaacccaagcagcatccccgtggaaccaacgctcaacagatgtgggatttggtagacctcctactacgtataatttattgttagcgggtatcccgctagcatacagtctggggctattcatcggaggaattggaatccaattgtttgatatataatttacagctatagcattgttatgtatttcattgttcatccatccaccgatgagatatactacttctccaacatgagtacttgtacacatatggaatatatctataatttgatccatgttcataggatactctatgaatggatacttgtatgatttgcgtggttgtttatcacaatgaaatattttggtacagtctagtatccattttacattatttatacctctgggagaaagataatttgacctgattacatttttgataaggagtagcagatttcctaatttatttcttcgcctcatataccacttaatgacaaaatcaactacataatcctcatctggaacatttagttcatcgctttctagaataagtttcatagatagataatcaaaattgtctatgatgtcatcttccagttccaaaaagtgtttggcaataaagtttttagtatgacataagagattggatagtccgtattctatacccatcatgtaacactcgacacaatattcctttctaaaatctcgtaagataaagtttatacaagtgtagatgataaattctacagaggttaatatagaagcacgtaataaattgacgacgttatgactatctatatatacctttccagtatatgagtaaataactatagaagttaaactgtgaatgtcaaggtctagacaaacccttgtaactggatctttatttttcgtgtatttttgacgtaaatgtgtgcgaaagtaaggagataactttttcaatatcgtagaattgactattatattgcctcctatggcatcaataattgttttgaatttcttagtcatagacaatgctaatatattcttacagtacacagtattgacaaatatcggcatttatgtttctttaaaagtcaacatctagagaaaaatgattatctttttgagacataactcccattttttggtattcacccacacgtttttcgaaaaaattagtttttccttccaatgatatattttccatgaaatcaaacggattggtaacattataaatttttttaaatcccaattcagaaatcaatctatccgcgacgaattctatatatgttttcatcatttcacaattcattcctataagtttaactggaagagccgcagtaagaaattcttgttcaatggatactgcatctgttataatagatctaacggtttcttcactcggtggatgcaataaatgtttaaacatcaaacatgcgaaatcgcagtgcagaccctcgtctctactaattagttcgttggaaaacgtgagtccgggcattaggccacgctttttaagccaaaatatggaagcgaatgatccagaaaagaaaattccttctactgcagcaaaggcaataagtctctctccataaccggcgctgtcatgtatccacttttgagcccaatcggccttcttttttacacaaggcatcgtttctatggcattaaagagatagtttttttcattactatctttaacataagtatcgatcaaaagactatacatttccgaatgaatgttttcaatggccatctgaaatccgtagaaacatctagcctcggtaatctgtacttctgtacaaaatcgttccgccaaattttcattcactattccgtcactggctgcaaaaaacgccaatacatgttttataaaatatttttcgtctggtgttagtttattccaatcattgatatctttagatatatctacttcttccactgtccaaaatgatgcctctgcctttttatacatgttccagatgtcatgatattggattgggaaaataacaaatctatttggatttggtgcaaggatgggttccataactaaattaacaataacaataaattttttttcagttatctatatgcctgtacttggattttttgtacatcgatatcgccgcaatcactacaataattacaagtattattgatagcattgttattagtactatcataattaaattatctacattcatgggtgctgaataatcgttattatcatcattatcattttgtaattgtgacatcatactagataaatcgtttgcgagattgttgtgggaagcgggcatggaggatgcattatcattattatttaacgccttccatttggattcacaaatgttacgcacattcaacattttatggaaactataattttgtgaaaacaaataacaagaaaactcgtcatcgttcaaatttttaacgatagtaaaccgattaaacgtcgagctaatttctaacgctagcgactctgttggatatgggtttccagatatatatcttttcagttcccctacgtatctataatcatctgtaggaaatggaagatatttccatttatctactgttcctaatatcatatgtggtggtgtagtagaaccattaagcgcgaaagatgttatttcgcatcgtattttaacttcgcaataatttctggttagataacgcactctaccagtcaagtcaatgatattagcctttacagatatattcatagtagtcgtaacgatgactccatcttttagatgcgatactcctttgtatgtaccagaatcttcgtacctcaaactcgatatatttaaacaagttaatgagatattaacgcgttttatgaatgatgatatataaccagaagttttatcctcggtggctagcgctataaccttatcattataataccaactagtgtgattaatatgtgacacgtcagtgtgggtacaaatatgtacattatcgtctacgtcgtattcgatacatccgcatacagccaacaaatataaaatgacaaatactctaacgccgttcgtacccatcttgatgcggtttaataaatgttttgatttcaatttattgtaaaaaaagattcggttttatactgttcgatattctcattgcttatattttcatctatcatctccacacagtcaaatccgtggttagcatgcacctcatcaaccggtaaaagactatcggactcttctatcattataactctagaatatttaatttggtcattattaatcaagtcaattatcttatttttaacaaacgtgagtattttactcattttttataaaaacttttagaaatatacagactctatcgtgtgtctatatcttctttttatatccaatgtatttatgtctgatttttcttcatttatcatatataatggtccaaattctacacgtgcttcggattcatccagatcattaaggttcttataattgtaacatccttctcttccctcttctacatcttccttcttattcttattcttagcgtcacagaatctaccacagcaggatcccatgacgagcgtcatattaaactaatccattttcaattataatatatgattagtaatgaccattaaaataaaaaatattcttcataaccggcaagaaagtgaaaagttcacattgaaactatgtcagtagtatacatcatgaaatgatgatatatatatactctattttggtggaggattatatgatataattcgtggataatcatttttaagacacatttctttattcgtaaatcttttcacgttaaatgagtgtccatattttgcaatttcttcatatgatggcggtgtacgtggacgaggctgctcctgttcttgttgtggtcgccgactgtcgtgtctgcgtttagatccctccattatcgcgattgcgtagatggagtactattttataccttgtaattaaatttttttattaattaaacgtataaaaacgttccgtatctgtatttaagagccagatttcgtctaatagaacaaatagctacagtaaaaataactagaataattgctacacccactagaaaccacggatcgtaatacggcaatcggttttcgataataggtggaacgtatattttatttaaggacttaacaattgtctgtaaaccacaatttgcttccgcggatcctgtattaactatctgtaaaagcatatgttgaccgggcggagccgaacattctccgatatctaatttctgtatatctataatattattaacctccgcatacgcattacagttcttttctagcttggataccgcactaggtacatcgtctagatctattcctatttcctcagcgatagctcttctatccttttccggaagcaatgaaatcacttcaataaatgattcaaccatgagtgtgaaactaagtcgagaattactcatgcatttgttagttattcggagcgcgcaatttttaaactgtcctataacctctcctatatgaatagcacaagtgacattagtagggatagaatgttgagctaatttttgtaaataactatctataaaaagattatacaaagttttaaactctttagtttccgccatttatccagtctgagaaaatgtctctcataataaatttttccaagaaactaattgggtgaagaatggaaacctttaatctatatttatcacagtctgttttggtacacatgatgaattcttccaatgccgtactaaattcgatatctttttcgatttctggatatgtttttaataaagtatgaacaaagaaatggaaatcgtaataccagttatgtttaactttgaaattgttttttattttcttgttaatgattccagccacttgggaaaagtcaaagtcgtttaatgccgatttaatacgttcattaaaaacaaactttttatcctttagatgaattattattggttcattggaatcaaaaagtaagatattatcgggtttaagatctgcgtgtaaaaagttgtcgcaacagggtagttcgtagattttaatgtataacagagccatctgtaaaaagataaactttatgtattgtaccaaagatttaaatcctaatttgatagctaactcggtatctactttatctgccgaatacagtgctaggggaaaaattataatgtttcctctttcatattcgtagttagttctcttttcatgttcgaaaaagtgaaacatgcggttaaaatagtttataacattaatattactgttaataactgccggataaaagtgggatagtaatttcacgaatttgatactgtcctttctctcgttaaacgcctttaaaaaaactttagaagaatatctcaatgagagttcctgaccatccatagtttgtatcaataatagcaacatatgaagaacacgtttatacagagtatgtaaaaatgttaatttatagtttaatcccatggcccacgcacacacgattaattttttttcatctccctttagattgttgtatagaaatttgggtactgtgaactccgccgtagtttccatgggactatataattttgtggcctcgaatacaaattttactacatagttatctatcttaaagactataccatatcctcctgtagatatgtgataaaaatcgtcgtttataggataaaatcgtttatccttttgttggaaaaaggatgaattaatgtaatcattctcttctatctttagtagtgtttccttattaaaattcttaaaataatttaacaatctaactgacggagcccaattttggtgtaaatctaattgggacattatattgttaaaatacaaacagtctcctaatataacagtatctgataatctatggggagacatccattgatattcaggggatgaatcattggcaacacccatttattgtacaaaaagccccaatttacaaacgaaagtccaggtttgatagagacaaacaattaactattttgtctctgtttttaacacctccacagtttttaatttctttagtaatgaaattattcacaatatcagtatcttctttatctaccagagattttactaacttgataaccttggctgtctcattcaatagggtagtaatatttgtatgtgtgatattgatatctttttgaattgtttcttttagaagtgattctttgatggtgccagcatacgaattacaataatgcagaaactcggttaacatgcaggaattatagtaagccaattccaattgttgcctgtgttgtattagagtgtcaatatgagcaatggtgtccttgcgtttctctgatagaatgcgagcagcgattttggcgttatcatttgacgatatttctggaatgacgaatcctgtttctactaactttttggtaggacaaagtgaaacaatcaagaagatagcttctcctcctatttgtggaagaaattgaactcctctagatgatctactgacgatagtatctccttgacagatattggaccgaattacagaagtacctggaatgtaaagccctgaaaccccctcattttttaagcagattgttgccgtaaatcctgcactatgcccaagatagagagctcctttggtgaatccatctctatgtttcagtttaaccaagaaacagtcagctggtctaaaatttccatctctatctaatacagcatctaacttgatgtcaggaactatgaccggtttaatgttatatgtaacattgagtaaatccttaagttcataatcatcactgtcatcagttatgtacgatccaaacaatgtttctaccggcatagtggatacgaagatgctatccatcagaatgtttccctgattagtattttctatatagctattcttctttaaacgattttccaaatcagtaactatgttcatttttttaggagtaggacgcctagccagtatggaagaggattttctagatcctctcttcaacatctttgatctcgatggaatgcaaaaccccatagtgaaacaaccaacgataaaaataatattgtttttcactttttataattttaccatctgactcatggattcattaatatctttataagagctactaacgtataattctttataactgaactgagatatatacaccggatctatggtttccataattgagtaaatgaatgctcggcaataactaatggcaaatgtatagaacaacgaaattatactagagttgttaaagttaatattttctatgagctgttccaataaattatttgttgtgactgcgttcaagtcataaatcatcttgatactatccagtaaaccgtttttaagttctggaatattatcatcccattgtaaagcccctaattcgactatcgaatatcctgctctgatagcagtttcaatatcgacggacgtcaatactgtaataaaggtggtagtattgtcatcatcgtgataaactacgggaatatggtcgttagtaggtacggtaactttacacaacgcgatatataactttccttttgtaccatttttaacgtagttgggacgtcctgcagggtattgttttgaagaaatgatatcgagaacagatttgatacgatatttgttggattcctgattattcactataatataatctagacagatagatgattcgataaatagagaaggtatatcgttggtaggataatacatccccattccagtattctcggatactctattgatgacactagttaagaacatgtcttctattctagaaaacgaaaacatcctacatggactcattaaaacttctaacgctcctgattgtgtctcgaatgcctcgtacaaggatttcaaggatgccatagattctttgaccaacgatttagaattgcgtttagcatctgatttttttattaaatcgaatggtcggctctctggtttgctaccccaatgataacaatagtcttgtaaagataaaccgcaagaaaatttatacgcatccatccaaataaccctagcaccatcggatgatattaatgtattattatagattttccatccacaattattgggccagtatactgttagcaacggtatatcgaatagattactcatgtaacctactagaatgatagttcgtgtactagtcataatatctttaatccaatctaaaaaatttaaaattagattttttacactgttaaagttaacaaaagtattacccgggtacgtggatatcatatatggcattggtccattatcagtaatagctccataaactgatacggcgatggtttttatatgtgtttgatctaacgaggaagaaattcgcgcccacaattcatctctagatatgtatttaatatcaaacggtaacacatcaatttcgggacgcgtatatgtttctaaatttttaatccaaatataatgatgacctatatgccctattatcatactgtcaactatagtacacctagggaacttacgatacatctgtttcctataatcgttaaattttacaaatctataacatgctaaaccttttgacgacagccattcattaatttctgatatggaatctgtattctcgataccgtatcgttctaaagccagtgctatatctccctgttcgtgggaacgctttcgtataatatcgatcaacggataatctgaagtttttggagaataatatgactcatgatctatttcgtccataaacaatctagacataggaattggaggcgatgatcttaattttgtgcaatgagtcgtcaatcctataacttctaatcttgtaatattcatcatcgacataatactatctatgttatcatcgtatattagtataccatgaccttcttcatttcgtgccaaaatgatatacagtcttaaatagttacgcaatatctcaatagtttcataattgttagctgttttcatcaaggtttgtatcctgtttaacatgatggcgttctataacgtctctattttctatttttaattttttaaatttttaacgatttactgtggctagatacccaatctctctcaaatatttttttagcctcgcttacaagctgtttatctatactattaaaactgacgaatccgtgattttggtaatgggttccgtcgaaatttgccgaagtgatatgaacatattcgtcgtcgactatcaacaattttgtattattctgaatagtgaaaaccttcacagatagatcattttgaacacacaacgcatctagacttttggcggttgccatagaatatacgtcgttcttatcccaattaccaactagaagtctgatcttaactcctctattaatggctgcttctataatggagttgtaaatgtcgggccaatagtagctattaccgtcgacacgtgtagtgggaactatggccaaatgttcaatatctatactagtcttagctgacctgagtttatcaataactacatcggtatctagatctctagaatatcccaataggtgttccggagaatcagtaaagaacactccacctataggattcttaatatgatacgcagtgctaactggcaaacaacaagccgcagagcataaattcaaccatgaattttttgcgctattaaaggctttaaaagtatcaaatcttctacgaagatctgtggccagcgggggataatcagaatatacacctaacgttttaatcgtatgtatagatcctccagtaaatgacgcgtttcctacataacatctttcatcatctgacacccaaaaacaaccgagtagtagtcccacattattttttttatctatattaacggttataaaatttatatccgggcagtgactttgtagctctcccagatttcttttccctcgttcatctagcaaaactattattttaatccctttttcagatgcctcttttagtttatcaaaaataagcgctcccctagtcgtactcagaggattacaacaaaaagatgctatgtatatatatttcttagctagagtgataatttcgttaaaacattcaaatgttgttaaatgatcggatctaaaatccatattttctggtagtgtttctaccagcctacattttgctcccgcaggtaccgatgcaaatggccacatttagttaacataaaaacttatacatcctgttctatcaacgattctagaatatcatcggctatatcgctaaaattttcatcaaagtcgacatcacaacctaactcagtcaatatattaagaagttccatgatgtcatcttcgtctatttctatatccgtatccattgtagattgttgaccgattatcgagtttaaatcattactaatactcaatccttcagaatacaatctgtgtttcattgtaaatttataggcggtgtatttaagttggtagattttcaattatgtattaatatagcaacagtagttcttgctcctccttgattctagcatcctcttcattattttcttctacgtacataaacatgtccaatacgttagacaacacaccgacgatggcggccgctacagacacgaatatgactaaaccgatgaccatttaaaaacccctctctagctttcacttaaactgtatcgatcattcttttagcacatgtataatataaaaacattattctatttcgaatttaggcttccaaaaatttttcatccgtaaaccgataataatatatatagacttgttaatagtcggaataaatagattaatgcttaaactatcatcatctccacgattagagatacaatatttacattctttttgctgtttcgaaactttatcaatacacgttaatacaaacccaggaaggagatattgaaactgaggctgttgaaaatgaaacggtgaatacaataattcagataatgtaaaatcatgattccgtattctgatgatattagaactgctaatggatgtcgatggtatgtatctaggagtatctattttaacaaagcatcgatttgctaatatacaattatccttttgattaattgttattttattcatattcttaaaaggtttcatatttatcaattcttctacattaaaaatttccatttttaatttatgtagccccgcaatactcctcattacgtttcattttttgtctataatatccattttgttcatctcggtacatagattatccaattgagaagcgcatttagtagttttgtacattttaagtttattgacgaatcgtcgaaaactagttatagttaacattttattatttgataccctgatattaatacccctgccgttactattatttataactgatgtaatccacgtaacattggaattaactatcgatagtaatgcatcgacgcttccaaaattgtctattataaactcaccgataatttttttattgcatgttttcatattcattaggattatcaaatctttaatcttattacgattgtatgcgttgatattacaagacgtcattctaaaagacggaggatctccatcaaatgccagacaatcacgtacaaagtacatggaaataggttttgttctattgcgcatcatagatttatatagaacacccgtagaaatactaatttgttttactctataaaatactaatgcatctatttcatcgttttgtataacgtctttccaagtgtcaaattccaaatttttttcattgatagtaccaaattcttctatctctttaactacttgcatagataggtaattacagtgatgcctacatgccgttttttgaaactgaatagatgcgtctagaagcgatgctacgctagtcacaatcaccactttcatatttagaatatatatatgtaaaaatatagtagaatttcattttgtttttttctatgctataaatgaattctcattttgcatctgctcatactccgttttatattaataccaaagaaggaagatatctggttctaaaagccgttaaagtatgcgatgttagaactgtagaatgcgaaggaagtaaagcttcctgcgtactcaaagtagataaaccctcatcgcccgcgtgtgagagaagaccttcgtccccgtccagatgcgagagaatgaataaccctggaaaacaagttccgtttatgaggacggacatgctacaaaatatgttcgcggctaatcgcgataatgtagcttctagacttttgtcctaaaatactattatatccttttcgatattaataaatccgtgtcgtccaggttttttatctctttcagtatgtgaatagataggtattttatctctattcatcatcgaatttaagagatccgataaacattgtttgtattctccagatgtcagcatctgatacaacaatatatgtgcacataaacctctggcacttatttcatgtaccttccccttatcactaaggagaatagtatttgagaaatatgtatacatgatattatcatgaattagatatacagaatttgtaacactctcgaaatcacacgatgtgtcggcgttaagatctaatatatcactcgataacacattttcatctagatacactagacattttttaaagctaaaatagtctttagtagtaacagtaactatgcgattattttcatcgatgatacatttcatcggcatattattacgcttaccatcaaagactataccatgtgtatatctaacgtattctagcatggttgccatacgcgcattaaacttttcaggatctttggatagatcttccaatctatctatttgagaaaacatttttatcatgttcaatagttgaaacgtcggatccactatatagatattatctataaagattttaggaactacgttcatggtatcctggcgaatattaaaactatcaatgatatgattatcgttttcatcttttatcaccatatagtttctaagatatgggattttacttaatataatattatttcccgtgataaattttattagaaaggccaaatctataagaaaagtcctagaattagtctgaagaatatctatatcgccgtatagtatatttggattaattagatatagagaatatgatccgtaacatatacaacttttattatggcgtctaagatattcttccatcaacttattaacatttttgactagggaagatacattatgacgtcccattacttttgccttgtctattactgcgacgttcatagaatttagcatatctcttgccaattcttccattgatgttacattataagaaattttagatgaaattacatttggagctttaatagtaagaactcctaatatgtccgtgtatgtggtcactaatacagattgtagttctataatcgtaaataatttacctatattatatgtttgagtctgtttagaaaagtagctaagtatacgatcttttatttctgatgcagatgtattaacatcggaaaaaaatctttttttattcttttttactaaagatacaaatatgtctttgttaaaaacagttattttctgaatatttctagcttgtaattttaacatatgatattcgttcacactaggtactctgcctaaataggtttctataatctttaatgtaatattaggaaaagtattctgatcaggattcctattcattttgaggatttaaaactctgattattgtctaatatggtctctacgcaaactttttcacagagcgatagagtttttgataactcgtttttcttaagaaatataaaactactgtctccagagctcgctctatcttttattttatctaattcgatacaaactcctgatactggttcagaaagtaattcattaattttcagtcctttatagaagatatttaatatagataatacaaaatcttcagtttttgatatcgatctgattgatcctagaactagatatattaataacgtgctcattaggcagtttatggcagcttgataattagatatagtatattccagttcatatttattagataccgcattgcccagattttgatattctatgaattcctctgaaaataaatccaaaataactagacattctattttttgtggattagtgtactctcttccctctatcatgttcactactggtgtccacgatgataaatatctagagggaatataatatagtccataggatgccaatctagcaatgtcgaataactgtaattttattcttcgctcttcattatgaattgattcttgaggtataaacctaacacaaattatattattagacttttcgtatgtaatgtctttcatgttataagtttttaatcctggaatagaatctattttaatgaggcttttaaacgcagagttctccaacgagtcaaagcataatactctgttgtttttcttatatacgatgttacgattttcttctttgaatggaataggtttttgaattagtttataattacaacataatagataaggaagtgtgcaaatagtacgcggaaaaaacataatagctcccctgttttcatccatggttttaagtaaatgatcactggcttctttagtcaatggatattcgaacattaaccgtttcatcatcattggacagaatccatatttcttaatgtaaagagtgatcaaatcattgtgtttattgtaccatcttgttgtaaatgtgtattcggttatcggatctgctcctttttctattaaagtatcgatgtcaatctcgtctaagaattcaactatatcgacatatttcatttgtatacacataaccattactaacgtagaatgtataggaagagatgtaacgggaacagggtttgttgattcgcaaactattctaatacataattcttctgttaatacgtcttgcacgtaatctattatagatgccaagatatctatataattattttgtaagatgatgttaactatgtgatctatataagtagtgtaataattcatgtattttgatatatgttccaactctgtctttgtgatgtctagtttcgtaatatctatagcatcctcaaaaaatatattcgcatatattcccaagtcttcagttctatcttctaaaaaatcttcaacgtatggaatataataatctattttacctcttctgatatcattaatgatatagtttttgacactatcttctgtcaattgattcttattcactatatctaagaaacggatagcgtccctaggacgaactactgccattaatatctctattatagcttctggacataattcatctattataccagaattaatgggaactattccgtatctatctaacatagttttaagaaagtcagaatctaagacttgatgttcatatattggttcatacatgaaatgatctctattgatgatagtgactatttcattctctgaaaattggtaactcattctatatatgctttccttgttgatgaaggatagaatatactcaatagaatttgtaccaacaaactgttctcttatgaatcgtatatcatcatctgaaataatcatgtaaggcatacatttaacaattagagacttgtctcctgttatcaatatactattcttgtgataatttatgtgtgaggcaaatttgtccacgttctttaattttgttatagtagatatcaaatccaatggagctacagttcttggcttaaacagatatagtttttctggaacaaattctacaacattattataaaggactttgggtagataagtgggatgaaatcctattttaattaatgcgatagccttgtcctcgtgcagatatccaaacgcttttgtgatagtatggcattcattgtctagaaacgctctacgaatatctgtgacagatatcatctttagagaatatactagtcgcgttaatagtactacaatttgtattttttaatctatctcaataaaaaaattaatatgtatgattcaatgtataactaaactactaactgttattgataactagaatcagaatctaatgatgacgtaaccaagaagtttatctactgccaatttagctgcattatttttagcatctcgtttagattttccatcggccttatcgaatactcttccgtcgatgtctacacaggcataaaatgtaggagagttactaggcccaactgattcaatacgaaaagaccaatctctcctagtaatttggcagtactcattaataacggtgacagggttagcatctttccaatcaataatttttttagccggaataacatcatcaaaagacttatgatcctctctcattgatttttcgcgggatacatcatctattatgacgtcagccatagcatcagcatccggcttatccgcctccgttgtcataaaccaacgaggaggaatatcgtcggagctgtacaccatagcactacgttgaagatcgtacagagctttattaacttctcgcttctccatattaagttgtctagttagttgtgcagcagtagctccttcgattccaatgtttttaatagccgcacacacaatctctgcgtcagaacgctcgtcaatatagatcttagacatttttagagagaactaacgcaaccagcaataaaactgaacctactttatcatttttttattcatcatcctctggtggttcgtcgttcctatcaaatgtagctctgattaacccgtcatctataggtgatgctggttctggagattctggaggagatggattattatctggaagaatctctgttatttccttgttttcatgtatcgattgcgttgtaacattaagattgcgaaatgctctaaatttgggaggcttaaagtgttgtttgcaatctctacacgcgtgtctaactagtggaggttcgtcagctgctctagtttgaatcatcatcggcgtagtattcctacttttacagttaggacacggtgtattgtatttctcgtcgagaacgttaaaataatcgttgtaactcacatcctttattttatctatattgtattctactcctttcttaatgcattttataccgaataagagatagcgaaggaattctttttcggtgccgctagtacccttaatcatatcacatagtgttttatattccaaatttgtggcaatagacggtttatttctatacgatagtttgtttctggaatcctttgagtattctataccaatattattctttgattcgaatttagtttcttcgatattagattttgtattacctatattcttgatgtagtactttgatgatttttccatggcccattctattaagtcttccaagttggcatcatccacatattgtgatagtaattctcggatatcagtagcggctaccgccattgatgtttgttcattggatgagtaactactaatgtatacattttccatttataacacttatgtattaactttgttcatttatattttttcattattatgttgatattaacaaaagtgaatatatatatgttaataattgtattgtggttatacggctacaattttataatgagtgaaagtcagtgtccgatgatcaatgacgatagctttactctgaaaagaaagtatcaaatcgatagtgcggagtcaacaataaaaatggataagaagaggataaagtttcagaatagagccaaaatggtaaaagaaataaatcagacaataagagcagcacaaactcattacgagacattgaaactaggatacataaaatttaagagaatgattatgactactactctagaagatatagcaccatctattccaaataatcagaaaacttataaactattctcggacatttcagccatcggcaaagcatcacagaatccgagtaagatggtatatgctctgctgctttacatgtttcccaatttgtttggagatgatcatagattcattcgttatagaatgcatccaatgagtaaaatcaaacacaagatcttctctcctttcaaacttaatcttattagaatattagtggaagaaagattctataataatgaatgcagatctaataaatggagaataattggaacacaagttgataaaatgttgatagctgaatctgataaatatacaatagatgcaaggtataacctaaaacccatgtatagaatcaagggagaatctgaagaagataccctctttatcaaacagatggtagaacaatgtgtgacatcccaggaattggtggaaaaagtgttgaagatactgtttagagatttgttcaagagtggagaatacaaagcgtacagatacgatgatgatgtagaaaatggatttattggattggatacactaaaattaaacattgttcatgatatagttgaaccatgtatgcctgttcgtaggccagtggctaagatactgtgtaaagaaatggtaaataaatactttgagaatccgctacatattattggtaaaaatcttcaagagtgcattgactttgttagtgaataggcatttcatctttctccaatactaattcaaattgttaaattaataatggatagtataaatagttattagttataagatagtaaaaataattattagaataagagtgtagtatcatagataactctcttctataaaaatggattttattcgtagaaagtatcttatatacacagtagaaaataatatagattttttaaaggatgatacattaagtaaagtaaacaattttaccctcaatcatgtactagctctcaagtatctagttagcaattttcctcaacacgttattactaaggatgtattagctaataccaatttttttgttttcatacatatggtacgatgttgtaaagtgtacgaagcggttttacgacacgcatttgatgcacccacgttgtacgttaaagcattgactaagaattatttatcgtttagtaacgcaatacaatcgtacaaggaaaccgtgcataaactaacacaagatgaaaaatttttagaggttgccgaatacatggacgaattaggagaacttataggcgtaaattatgacttagttcttaatccattatttcacggaggggaacccatcaaagatatggaaatcatttttttaaaactgtttaagaaaacagacttcaaagttgttaaaaaattaagtgttataagattacttatttgggcatacctaagcaagaaagatacaggcatagagtttgcggataatgatagacaaaatatatacactctatttcaacaaactggtagaatcgtccatagcaatctaacagaaacgtttagagattatatctttcccggagataagactagctattgggtgtggttaaacgaaagtatagctaatgatgcggatatcgttcttaatagacacgccattaccatgtatgataaaattcttagttatatatactctgagataaaacaaggacgcgttaataaaaacatgcttaagttagtttatatctttgagcctgaaaaagatatcagagaacttctgctagaaatcatatatgatattcctggagatatcctatctattattgatgcaaaaaacgacgattggaaaaaatattttattagtttttataaagctaattttattaacggtaatacatttattagtgatagaacgtttaacgaggacttattcagagttgttgttcaaatagatcccgaatatttcgataatgaacgaattatgtctttattctctacgagtgctgcggacattaaacgatttgatgagttagatattaataacagttatatatctaatataatttatgaggtgaacgatatcacattagatacaatggatgatatgaagaagtgtcaaatctttaacgaggatacgtcgtattatgttaaggaatacaatacatacctgtttttgcacgagtcggatcccatggtcatagagaacggaatactaaagaaactgtcatctataaaatccaagagtagacggctgaacttgtttagcaaaaacattttaaaatattatttagacggacaattggctcgtctaggtcttgtgttagatgattataaaggagacttgttagttaaaatgataaaccatcttaagtctgtggaggatgtatccgcattcgttcgattttctacagataaaaaccctagtattcttccatcgctaatcaaaactattttagctagttataatatttccatcatcgtcttatttcaaaggtttttgagagataatctatatcatgtagaagaattcttggataaaagcatccatctaaccaagacggataagaaatatatacttcaattgataagacacggtagatcatagaacagaccaaatatattattaataatttgtatatacatagatataattatcacacatttttgataaatgggaactgctgcaacaattcagactcccaccaaattaatgaataaagaaaatgcagaaatgattttggaaaaaattgttgatcatatagttatgtatattagtgacgaatcaagtgattcagaaaataatcctgaatatattgattttcgtaacagatacgaagactatagatctctcattataaaaagtgatcacgagtttgtaaagctatgtaaaaatcatgcggagaaaagttctccagaaacgcaacaaatgattatcaaacacatatacgaacaatatcttattccagtatctgaagtactattaaaacctataatgtccatgggtgacataattacatataacggatgtaaagacaatgaatggatgctagaacaactctctaccctaaactttaacaatctccgcacatggaactcatgtagcataggcaatgtaacgcgtctgttttatacattttttagttatctgatgaaagataaactaaatatataagtataatcccattctaatactttaacctgatgtattagcatcttattagaatattaacctaactaaaagacataacataaaaactcattacatagttgataaaaagcggtaggatataaatattatggctgccaccgttccgcgttttgacgacgtgtacaaaaatgcacaaagaagaattctagatcaagaaacattttttagtagaggtctaagtagaccgttaatgaaaaacacatatctatttgataattacgcgtatggatggataccagaaactgcaatttggagtagtagatacgcaaacctagatgctagtgactattatcccatttcgttgggattacttaaaaagttcgagtttctcatgtctctatataaaggtcctattcccgtatatgaagaaaaagtaaatactgaattcatagccaatggatcgttctctggtagatacgtatcatatcttcgaaagttttctgcccttccaacaaacgagtttattagttttttgttactgacttccattccaatctataatatcttgttctggtttaaaaacacacagtttgatattactaaacacacattattcagatacgtctatacagataatgccaaacacctggcgttggctaggtatatgcatcaaacaggagactataagcctttgtttagtcgtctcaaagagaattatatatttaccggtcccgttccaataagtatcaaagatatagatcaccctaatcttagtagagcaagaagtccatccgattatgagacattagctaatattagtactatattgtactttaccaagtatgatccggtattaatgtttttattgttttacgtacctgggtattcaattactacaaaaattactccagccgtagaatatctaatggataaactgaatctaacaaagagcgacgtacaactgttgtaaattattttatgcttcgtaaaatgtaggttttgaaccaaacattctttcaaagaatgagatgcataaaactttattatccaatagattgactatttcggacgtcaatcgtttaaagtaaacttcgtaaaatattctttgatcactgccgagtttaaaacttctatcgataattgtctcatatgttttaatatttacaagttttttggtccatggtacattagccggacaaatatatgcaaaataatatcgttctccaagttctatagtttctggattatttttattatattcagtaactaaatacatattagggttatctgcggatttataatttgagtgatgcattctactcaacataaataattctagaggagacgatctactatcaaattcggatcgtaaatctgtttctaaagaacggagaatatctatacatacctgattagaattcatccgtccttcagacaacatctcagacagtctggttttgtacatcttaatcatattcttatgaaacttggaaacatctcttctagtttcactagtacctttattaattctctcaggtacagattttgaattcgacgatgctgagtatttcatcgttgtatatttcttcttcgattgcataatcagattcttatataccgcctcaaactctattttaaaattattaaacaatactctattattaatcagtcgttctaactctttcgctatttctatagacttatctacatcttgactgtctatctctgtaaacacggagtcggtatctccatacacgctacgaaaacgaaatctgtaatctataggcaacgatgttttcacaatcggattaatatctctatcgtccatataaaatggattacttaatggattggcaaaccgtaacataccgttagataactctgctccatttagtaccgattctagatacaagatcattctacgtcctatggatgtgcaactcttagccgaagcgtatgagtatagagcactatttctaaatcccatcagaccatatactgagttggctactatcttgtacgtatattgcatggaatcatagatggccttttcagttgaactggtagcctgttttagcatctttttatatctggctctctctgccaaaaatgttcttaatagtctaggaatggttccttctatcgatctatcgaaaattgctatttcagagatgaggttcggtagtctaggttcacaatgaaccgtaatatatctaggaggtggatatttctgaagcaatagctgattatttatttcttcttccaatctattggtactaacaacgacaccgactaatgtttccggagatagatttccaaagatacacacattaggatacagactgttataatcaaagattaatacattattactaaacattttttgttttggagcaaataccttaccgccttcataaggaaacttttgttttgtttctgatctaactaagatagttttagtttccaacaatagctttaacagtggacccttgatgactgtactcgctctatattcgaataccatggattgaggaagcacatatgttgacgcacccgcgtctgtttttgtttctactccataatactcccacaaatactgacacaaacaagcatcatgaatacagtatctagccatatctaaagctatgtttagattataatccttatacatctgagctaaatcaacgtcatcctttccgaaagataatttatatgtatcattaggtaaagtaggacataatagtacgactttaaatccattttcccaaatatctttacgaattactttacatataatatcctcatcaacagtcacataattacctgtggttaaaacctttgcaaatgcagcggctttgcctttcgcgtctgtagtatcgtcaccgatgaacgtcatttctctaactcctctatttaatactttacccatgcaactgaacgcgttcttggatatagaatccaatttgtacgaatccaatttttcaaatttttgaatgaatgaatatagatcgaaaaatatagttccattattgttattaacgtgaaacgtagtattggccatgccgcctactcccttatgactagactgatttctctcataaatacagagatgtacagcttcctttttgtccggagatctaaagataattttctctcctgttaataactctagacgattagtaatatatctcagatcaaagttatgtccgttaaaggtaacgacgtagtcgaacgttagttccaacaattgtttagctattcgtaacaaaactatttcagaacatagaactagttctcgttcgtaatccatttccattagtgactgtatcctcaaacatcctctatcgacggcttcttgtatttcctgttccgttaacatctcttcattaatgagcgtaaacaataatcgtttaccacttaaatcgatataacagtaacttgtatgcgagattgggttaataaatacagaaggaaacttcttatcgaagtgacactctatatctagaaataagtacgatcttgggatatcgaatctaggtatttttttagcgaaacagttacgtggatcgtcacaatgataacatccattgttaatctttgtcaaatattgctcgtccaacgagtaacatccgtctggagatatcccgttagaaatataaaaccaactaatattgagaaattcatccatggtggcattttgtatgctgcgtttctttggctcttctatcaaccacatatctgcgacggagcattttctatctttaatatctagattataacttattgtctcgtcaatgtctatagttctcatctttcccaacggcctcgcattaaatggaggaggagacaatgactgatatatttcgtccgtcactacgtaataaaagtaatgaggaaatcgtataaatacggtctcgccatttcgacatctggatttcagatataaaaatctgttttcaccgtgactttcaaaccaattaatgcaccgaacatccatttatagaatttagaaatatattttcatttaaatgaatcccaaacattggggaagagccgtatggaccattatttttatagtactttcgcaagcgggtttagacggcaacatagaagcgtgtaaacgaaaactatatactatagttagcactcttccatgtcctgcatgtagacggcacgcgactatcgctatagaggacaataatgtcatgtctagcgatgatctgaattatatttattattttttcatcagattatttaacaatttggcatctgatcccaaatacgcgatcgatgtgacaaaggttaaccctttataaacttaacccattataaaacttatgattagtcacaactgaaataaccgcgtgattattttttggtataattctacacggcatggtttctgtgactatgaattcaacccccgttacattagtgaaatctttaacaaacagcaagggttcgtcaaagacataaaactcattgtttacaatcgaaatagaccccctatcacacttaaaataaaaaatatccttatcctttaccaccaaataaaattctgattggtcaatgtgaatgtattcacttaacagttccacaaatttatttattaactccgaggcacatacatcgtcggtattttttatggcaaactttactcttccagcatccgtttctaaaaaaatattaacgagttccatttatatcatccaatattattgaaatgacgttgatggacagatgatacaaataagaaggtacggtacctttgtccaccatctcctccaattcatgctctattttgtcattaactttaatgtatgaaaacagtacgccacatgcttccatgacagtgtgtaacactttggatacaaaatgtttgacattagtataattgtccaagactgtcaatctataatagatagtagctataatatattctatgatggtattgaagaagatgacaaccttggcatattgatcatttaacacagacatggtatcaacagatagcttgaatgaaagagaatcagtaattggaataagcgtcttctcgatagagtgtccgtataccaacatgtctgatattttgatgtattccattaaattatttagttttttctttttattctcgttaaacagcatttctgtcaacggaccccaacatcgttgaccgattaagttttgattgatttttccgtgtaaggcgtatctagtcagatcgtatagcctatccaataatccatcgtctgtgtgtagatcacatcgtacactttttaattctctatagaagagcgacagacatctggagcaattacagacagcaatttctttattctctacagatgtaagatacttgaagacattcctatgatgatgcagaattttggataacacggtattgatggtatctgttaccataattcctttgatggctgatagtgtcagagcacaagatttccaatctttgacaatttttagcaccattatctttgttttgatatctatatcagacagcatggtgcgtctgacaacacagggattaagacggaaagatgaaatgattctctcaacatcttcaatagataccttgctattttttctggcattatctatatgtgcgagaatatcctctagagaatcagtatcctttttgatgatagtggatctcaatgacatgggacgtttaaaccttcttattctatcaccagattgcatggtgatttgtcttctttcttttatcataatgtaatctctaaattcatcggcaaattgtctatatctaaaatcataatatgagatgtttacctctacaaatatctgttcgtccaatgttagagtatttacatcagttttgtattccaaattaaacatggcaacggatttaattttatattcctctattaagtcctcgtcgataataacagaatgtagataatcatttaatccgtcgtacatggttggaagatgcttgttgacaaaatctttaattgtcttgatgaaggtgggactatatctaacatcttgattaataaaatttataacattgtccataggatactttgtaactagttttatacacatctcttcatcggtaagtttagacagaatatcgtgaacaggtggtatattatattcatcagatatacgaagaacaatgtccaaatctatattgtttaatatattatatagatgtagcgtagctcctacaggaatatctttaactaagtcaatgatttcatcaaccgttagatctattttaaagttaatcatataggcattgatttttaaaaggtatgtagccttgactacattctcattaattaaccattccaagtcattgtgtgtaagaagattatattctatcataagcttgactacatttggtcccgataccattaaagaattcttatgatataaggaaacagattttaggtactcatctactctacaagaattttggagagccttaacgatatcagtgacgtttattatttcaggaggaaagaatctaacattgagaatatcggaattaatagcttccagatacagtgattttggcaatagtccgtgtaatccataatccagtaacacgagctggtgcttgctagacaccttttcaatgtttaatttttttgaaataagctttgataaagccttcctcgcaaattccggatacatgaacatgtcggcgacatgattaagtattgttttttcattatttttatattttctcaacaagttctcaataccccaatagatgatagaatatcacccaatgcgtccatgttgtctatttccaacaggtcgctatatccaccaatagaagtttttccaaaaaagattctaggaacagttctaccaccagtaatttgttcaaaataatcccgcaattcattttcgggtttaaattctttaatatcgacaatttcatacgctcctcttttgaaactaaacttatttagaatatccagtgcatttctacaaaaaggacatgtatacttgacaaaaattgtcactttgttattggccaacctttgttgtacaaattcctcggccattttaatatttaagtgatataaaactatctcgacttatttaactctttagtcgagatatatggacgcagatagctatatgatagccaactacagaaggcaaacgctataaaaaacataattacgacgagcatatttataaatatttttattcagcattacttgatatagtaatattaggcacagtcaaacattcaaccactctcgatacattaactctctcattttctttaacaaattctgcaatatcttcgtaaaaagattcttgaaactttttagaatatctatcgactctagatgaaatagcgttcgtcaacatactatgttttgtatacataaaggcgcccattttaacagtttctagtgacaaaatgctagcgatcctaggatcctttagaatcacatagattgacgattcgtctctcttagtaactctagtaaaataatcatacaatctagtacgcgaaataatattatccttgacttgaggagatctaaacaatctagttttgagaacatcgataagttcatcgggaatgacatacatactatctttaatagaactcttttcatccagttgaatggattcgtccttaaccaactgattaatgagatcttctattttatcattttccagatgatatgtatgtccattaaagttaaattgtgtagcgcttctttttagtctagcagccaatactttaacatcactaatatcgatatacaaaggagatgatttatctatggcattaagaattcgtttttcgacatccgtcaaaaccaattcctttttgcctgtatcatccagttttccatcctttgtaaagaaattattttctactagactattaataagactgataaggattcctccataattgcacaatccaaactttttaacaaaactagactttacgagatctacaggaatgcgtacttcaggttttttagcttgtgattttttcttttgcggacattttctagtaaccaactcatctaccatttcattgattttagcagtgaaataagctttcaatgcacgggcactgatactattgaaaacgagttgatcttcaaattccgccatttaagttcaccaaacaacttttaaatacaaatatatcaatagtagtagaataagaactataaaaaaaataataattaaccaaccccaacaaccggtattattagttgatgtggtagttttctcatcacttagaacagatttaacaatttctataaagtctgtcaaatcatcttccggagaccccataaatacaccaaatatagcggcgtacaacttatccatttatacattgaatattggcttttctttatcgctatcttcatcatattcatcatcaatatcaacaagtcccagattacgagccagatcttcttctacattttcagtcattgatacacgttcactatctccagagagtccgataacgttagccaccacttctctatcaatgattagtttcttgagcgcgaaagtaatttttgtttccgttccggatctatagaagacgataggtgtgataattgccttggccaattgtctttctcttttactgagtgattctagttcaccttctatagatctgagaatggatgattctccagtcgaaacatattctaccatggatccgtttaatttgttgatgaagatggattcatccttaaatgttttctctgtaatagtttccaccgaaagactatgcaaagaatttggaatgcgttccttgtgcttaatgtttccatagacggcttctagaagttgatacaacataggactagccgcggtaacttttatttttagaaagtatccatcgcttctatcttgtttagatttatttttataaagtttagtctctccttccaacataataaaagtggaagtcatttgactagataaactatcagtaagttttatagagatagacgaacaattagcgtattgagaagcatttagtgtaacgtattcgatacattttgcattagatttactaatcgattttgcatactctataacacccgcacaagtctgtagagaatcgctagatgcagtaggtcttggtgaagtttcaactctcttcttgattaccttactcatgattaaacctaaataattgtactttgtaatataatgatatatattttcactttatctcatttgagaataaaaatgtttttgtttaaccactgcatgatgtacagatttcggaatcgcaaaccaccagtggttttattttatccttgtccaatgtgaattgaatgggagcggatgcgggtttcgtacgtagatagtacattcccgtttttagaccgagactccatccgtaaaaatgcatactcgttagtttggaataactcggatctgctatatggatattcatagattgactttgatcgatgaaggctcccctgtctgcagccatttttatgatcgtcttttgtggaatttcccaaatagttttataaactcgcttaatatcttctggaaggtttgtattctgaatggatccaccatctgccataatcctattcttgatctcatcattccataattttctctcggttaaaactctaaggagatgcggattaactacttgaaattctccagacaatactctccgagtgtaaatattactggtatacggttccaccgactcattatttcccaaaatttgagcagttgatgcagtcggcataggtgccaccaataaactatttctaagaccgtatgttctgattttatcttttagaggttcccaattccaaagatccgacggtacaacattccaaagatcatattgtagaataccgttactggcgtacgatcctacatatgtatcgtatggtccttccttctcagctagttcacaactcgcctctaatgcaccgtaataaatggtttcgaagatcttcttatttagatcttgtgcttccaggctatcaaatggataatttaagagaataaacgcgtccgctaatccttgaacaccaataccgataggtctatgtctcttattagagatttcagcttctggaataggataataattaatatctataattttattgagatttctgacaattactttgaccacatccttcagtttgagaaaatcaaatcgcccatctattacaaacatgttcaaggcaacagatgccagattacaaacggctacctcattagcatccgcatattgtattatctcagtgcaaagattactacacttgatagttcctaaattttgttgattactctttttgttacacgcatccttataaagaatgaatggagtaccagtttcaatctgagattctataatcgctttccagacgactcgagcctttattatagatttgtatctcctttctctttcgtatagtgtatacaatcgttcgaactcgtctccccaaacattgtccaatccaggacattcatccggacacatcaacgaccactctccgtcatccttcactcgtttcataaagagatcaggaatccaaagagctataaatagatctctggttctatgttcctcgtttcctgtattctttttaagatcgaggaacgccataatatcagaatgccacggttccaagtatatggccataactccaggccgtttgtttcctccctgatctatgtatctagcggtgttattataaactctcaacattggaataataccgtttgatataccattggtaccggagatatagcttccactggcacgaatattactaattgatagacctattccccctgccattttagagattaatgcgcatcgttttaacgtgtcatagataccctctatgctatcatcgatcatgttaagtagaaaacagctagacatttggtgacgactagttcccgcattaaataaggtaggagaagcgtgcgtaaaccatttttcagaaagtagattgtacgtctcaatagctgagtctatatcccattgatgaattcctactgcgacacgcattaacatgtgctgaggtctttcaacgatcttgttgtttattttcaacaagtaggatttttccaaagttttaaaaccaaaatagttgtatgaaaagtctcgttcgtaaataataaccgagttgagtttatccttatatttgttaactatatccatggtgatacttgaaataatcggagaatgtttcccatttttaggattaacatagttgaataaatcctccatcacttcactaaatagtttttttgtttccttgtgtagatttgatacggctattctggcggctagaatggcataatccggatgttgtgtagtacaagtggctgctatttcggctgccagagtgtccaattctaccgttgttactccattatatattccttgaataaccttcatagctattttaataggatctatatgatccgtgtttaagccataacataattttctaatacgagacgtgattttatcaaacatgacattttccttgtatccatttcgtttaatgacaaacatttttgttggtgtaataaaaaaattatttaacttttcattaatagggatttgacgtatgtagcgtacaaaatgattgttcctggtatatagataaagagtcctatatatttgaaaatcgttacggctcgattaaactttaatgattgcatagtgaatatatcattaggatttaactccttgactatcatggcggcgccagaaattaccatcaaaagcattaatacagttataccgatcgcagttagaacggttatagcatccaccatttatatctaaaaattagatcaaagaatatgtgacaaagtcctagttgtatactgagaattgacgaaacaatgtttcttacatatttttttcttattagtaaccgacttaatagtaggaactggaaaactagacttgattattctataagtatagatacccttccaaataatattctctttgataaaagttccagaaaatgtagaattttttaaaaagttatcttttgctattaccaagattgtgtttagacgcttattattaatatgagtgatgaaatccacaccgcctctagatatcgcctttatttccacattagatggtaaatccaatagtgaaactatctttttaggaatgtatggactcgcgtttagaggagtaaacgtcttaggcgtcggaaaggatgattcatcaaacgaataaacaatttcacaaatggatgttaatgtattagtaggaaattttttgacgctattggaattgaagattctaatggatgatgttctacctatttcatccgataacatgttaatttccgacaccaacggttttaatatttcgatgatatacggtagtctctctttcggacttatatagcttattccacaatacgagtcattatatactccaaaaaacaaaataactagtataaaatctgtatcgaatgggaaaaacgaaattatcgacataggtatagaatccggaacattgaacgtattaatacttaattctttttctgtggtaagtaccgataggttattgacattgtatggttttaaatattctataacttgagacttgatagatattagtgatgaattgaaaattatttttatcaccacgtgtgtttcaggatcatcgtcgacgcccgtcaaccaaccgaacggagtaaaataaatatcattaatatatgctctagatattagtatttttatcaatcctttgattatcatcttctcgtaggcgaatgattccatgatcaagagtgatttaagaacatcctccggagtattaatgggcttagtaaacagtccatcgttgcaataataaaagttatccaagttaaaggatattatgcattcgtttaaagatatcacctcatctgacggagacaattttttggtaggttttagagactttgaagctacttgtttaacaaagttattcatcgtcgtctactattctatttaattttgtagttaatttatcacatatcacattaattgactttttggtccacttttccatacgtttatattcttttaatcctgcgttatccgtttccgttatatccagggatagatcttgcaagttaaatagaatgctcttaaataatgtcattttcttatccgctaaaaatttaaagaatgtataaacctttttcagagatttgaaactcttaggtggtgtcctagtacacaatatcataaacaaactaataaacattccacattcagattccaacagctgattaacttccacattaatacagcctattttcgctccaaatgtacattcgaaaaatctgaataaaacatcgatgtcacaatttgtattatccaatacagaatgtttgtgattcgtgttaaaaccatcggagaaggaatagaaataaaaattattatagtggtggaattcagttggaatattgcctccggagtcataaaaggatactaaacattgttttttatcataaattacacatttccaatgagacaaataacaaaatccaaacattacaaatctagaggtagaacttttaattttgtctttaagtatatacgataagatatgtttattcataaacgcgtcaaatttttcatgaatcgctaaggagtttaagaatctcatgtcaaattgtcctatataatccacttcggatccataagcaaactgagagactaagttcttaatacttcgattgctcatccaggctcctctctcaggctctattttcatcttgacgacctttggattttcaccagtatgtattcctttacgtgataaatcatcgattttcaaatccatttgtgagaagtctatcgccttagatactttttcccgtagtcgaggtttaaaaaaatacgctaacggtatactagtaggtaactcaaagacatcatatatagaatggtaacgcgtctttaactcgtcggttaactctttcttttgatcgagttcgtcgctactattgggtctgctcaggtgccccgactctactagttccaacatcataccgataggaatacaagacactttgccggcggttgtagatttatcatatttttccactacatatccgttacaatttgttaaaaatttagatacatctatattgctacataatccagctagtgaatatatatgacataataaattggtaaatcctagttctggtattttactaattactaaatctgtatatctttccatttatcatggaaaagaatttaccagatatcttcttttttccaaactgcgttaatgtattctcttacaaatattcacaagatgaattcagtaatatgagtaaaacggaacgtgatagtttctcattggccgtgtttccagttataaaacatagatggcataacgcacacgttgtaaaacataaaggaatatacaaagttagtacagaagcacgtggaaaaaaagtatctcctccatcactaggaaaacccgcacacataaacctaaccgcgaagcaatatatatacagtgaacacacaataagctttgaatgttatagttttctaaaatgtataacaaatacagaaatcaattcgttcgatgagtatatattaagaggactattagaagctggtaatagtttacagatattttccaattccgtaggtaaacgaacagatactataggtgtactagggaataagtatccatttagcaaaattccattggcctcattaactcctaaagcacaacgagagatattttcagcgtggatttctcatagacctgtagttttaactggaggaactggagtgggtaagacgtcacaggtacccaagttattgctttggtttaattatttatttggtggattctctactctagataaaatcactgactttcacgaaagaccagtcattctatctcttcctaggatagctttagttagattgcatagcaataccattttaaaatcattgggatttaaggtactagatggatctcctatttctttacggtacggatctataccggaagaattaataaacaaacaaccaaaaaaatatggaattgtattttctacccataagttatctctaacaaaactatttagttatggcactcttattatagacgaagttcatgagcatgatcaaataggagatattattatagcagtagcgagaaagcatcatacgaaaatagattctatgtttttaatgactgccacgttagaggatgacagggaacggctaaaagtatttttacctaatcccgcatttatacatattcctggagatacactgtttaaaattagcgaggtatttattcataataagataaatccatcttccagaatggcatacatagaagaagaaaagagaaatttagttactgctatacagatgtatactcctcctgatggatcatccggtatagtctttgtggcatccgttgcacagtgtcacgaatataaatcatatttagaaaaaagattaccgtatgatatgtatattattcatggtaaggtcttagatatagacgaaatattagaaaaagtgtattcatcacctaatgtatcgataattatttctactccttatttggaatccagcgttactatacgcaatgttacacacatttatgatatgggtagagtttttgtccccgctccttttggaggatcgcaacaatttatttctaaatctatgagagatcaacgaaaaggaagagtaggaagagttaatcctggtacatacgtctatttctatgatctgtcttatatgaagtctatacagcgaatagattcagaatttctacataattatatattgtacgctaataagtttaatctaacactccccgaagatttgtttataatccctacaaatttggatattctatggcgtacaaaggaatatatagactcgttcgatattagtacagaaacatggaataaattattatccaattattatatgaagatgatagagtatgctaaactttatgtactaagtcctattctcgctgaggagttggataactttgagaggacgggagaattaactagtattgtacgagaagccattttatctctaaatttacaaattaagattttaaattttaaacataaagatgatgatacgtatatacacttttgtaaaatattattcggtgtctataacggaacaaacgctactatatattatcatagacctctaacgggatatatgaatatgatttcagatactatatttgttcctgtagataataactaaaaatcaaactctaatgaccacatctttttttagagatgaaaaattttccacatctccttttgtagacacgactaaacattttgcagaaaaaagtttattagtgtttagataatcgtatacttcatcagtgtagatagtaaatgtgaacagataaaaggtattcttgctcaatagattggtaaattccatagaatatattaatcctttcttcttgagatcccacatcatttcaaccagagacgttttatccaatgatttacctcgtactataccacatacaaaactagattttgcagtgacgtcgtacctggtattcctaccaaacaaaattttacttttagttcttttagaaaattctaaggtagaatctctatttgccaatatgtcatctatggaattaccactagcaaaaaatgatagaaatatatattgatacatcgcagctggttttgatctactatactttaaaaacgaatcagattccataattgcctgtatatcatcagctgaaaaactatgttttacacgtattccttcggcatttctttttaatgatatatcttgtttagacaatgataaagttatcatgtccatgagagacgcgtctccgtatcgtataaatatttcattagatgttagacgcttcattaggggtatacttctataaggtttcttaatcagtccatcattggttgcgtcaagaactactatcggatgttgttgggtatctctagtgttacacatggccttactaaagtttgggtaaataactatgatatctctattaattatagatgcatatatttcattcgtcaaggatattagtatcgacttgctatcgtcattaatacgtgtaatgtaatcatataaatcatgcgatagccaaggaaaatttaaatagatgttcatcatataatcgtcgctataattcatattaatacgttgacattgactaatttgtaatatagcctcgccacgaagaaagctctcgtattcagtttcatcgataaaggataccgttaaatataactggttgccgatagtctcatagtctattaagtggtaagtttcgtacaaatacagaatccctaaaatattatctaatgttggattaatctttaccataactgtataaaatggagacggagtcataactattttaccgtttgtacttactggaatagatgaaggaataatctccggacatgctggtaaagacccaaatgtctgtttgaagaaatccaatgttccaggtcctaatctcttaacaaaaattacgatattcgatcccgatatcctttgcattctatttaccagcatatcacgaactatattaagattatctatcatgtctattctcccaccgttatataaatcgcctccgctaagaaacgttagtatatccatacaatggaatacttcatttctaaaatagtattcgttttctaattctttaatgtgaaatcgtatactagaaagggaaaaattatctttgagttttccgttagaaaagaaccacgaaactaatgttctgattgcgtccgattccgttgctgaattaatggatttacaccaaaaactcatataacttctagatgtagaagcattcgctaaaaaattagtagaatcaaaggatataagtagatgttccaacaagtgagcaattcccaagatttcatctatatcattctcgaatccgaaattagaaattcccaagtagatatcctttttcatccgatcgttgatgaaaatacgaactttattcggtaagacaatcatttactaaggagtaaaataggaagtaatgttcgtatgtcgttatcatcgtataaattaaaggtgtgttttttaccattaagtgacattataattttaccaatattggaattataatataggtgtatttgcgcactcgcgacggttgatgcatcggtaaatatagctgtatctaatgttctagtcggtatttcatcatttcgctgtctaataatagcgttttctctatctgtttccattacagctgcctgaagtttattggtcggataatatgtaaaataataagaaatacatacgaataacaaaaataaaataagatataataaagatgccatttagagatctaattttgtttaacttgtccaaattcctacttacagaagatgaggaatcgttggagatagtgtcttccttatgtagaggatttgaaatatcttataatgacttgataacttactttccagataggaaataccataaatatatttataaagtatttgaacatgtagatttatcggaggaattaagtatggaattccatgatacaactctgagagatttagtctatcttagattgtacaagtattccaagtgtatacggccgtgttataaattaggagataatctaaaaggcatagttgttataaaggacaggaatatttatattagggaagcaaatgatgacttgatagaatatctcctcaaggaatacactcctcagatttatacatattctaatgagcgcgtccccataactggttcaaaattaattctttgtggattttctcaagttacatttatggcgtatacaacgtcgcatataacaacaaataaaaaggtagatgttctcgtttccaaaaaatgtatagatgaactagtcgatccaataaattatcaaatacttcaaaatttatttgataaaggaagcggaacaataaacaaaatactcaggaagatattttattcggtaacaggtggccaaactccataggtagctttttctatttcggattttagaatttccaaattcaccagcgatttatcggttttggtgaaatccaaggatttattaatgtccacaaatgccatttgttttgtctgtggattgtatttgaaaatggaaacgatgtagttagatagatgcgctgcgaagtttcctattagggttccgcgcttcacgtcacccagcatacttgaatcaccatcctttaaaaaaaatgataagatatcaacatggagtatatcatactcgaattttaattcttctactgactcactgacattttcacaaatactacaatacggtttaccgaaaataatcagtacgttcttcatttatgggtatcaaaaacttaaaatcgttactgctggaaaataaatcactgacgatattagatgataatttatacaaagtatacaatggaatatttgtggatacaatgagtatttatatagccgtcgccaattgtgtcagaaacttagaagagttaactacggtattcataaaatacgtaaacggatgggtaaaaaagggagggcatgtaaccctttttatcgatagaggaagtataaaaattaaacaagacgttagagacaagagacgtaaatattctaaattaaccaaggacagaaaaatgttagaattagaaaagtgtacatccgaaatacaaaatgttaccggatttatggaagaagaaataaaggcagaaatgcaattaaaaatcgataaactcacatttcaaatatatttatctgattctgataacataaaaatatcattgaatgagatactaacacatttcaacaataatgagaatgttacattattttattgtgatgaacgagacgcagaattcgttatgtgtctcgaggctaaaacacatttctctaccacaggagaatggccgttgataataagtaccgatcaggatactatgctatttgcatctgctgataatcatcctaagatgataaaaaacttaactcaactgtttaaatttgttccctcggcagaggataactatttagcaaaattaacggcgttagtgaatggatgtgatttctttcctggactctatggggcatctataacacccaccaacttaaacaaaatacaattgtttagtgattttacaatcgataatatagtcactagtttggcaattaaaaattattatagaaagactaactctaccgtagacgtgcgtaatattgttacgtttataaacgattacgctaatttagacgatgtctactcgtatattcctccttgtcaatgcactgttcaagaatttatattttccgcattagatgaaaaatggaatgaatttaaatcatcttatttagaaagcgtgccgttaccctgccaattaatgtacgcgttagaaccacgcaaggagattgatgtttcagaagttaaaactttatcatcttatatagatttcgaaaatactaaatcagatatcgatgttataaaatctatatcctcgatcttcggatattctaacgaaaactgtaacacgatagtattcggcatctataaggataatttactactgagtataaataattcattttactttaacgatagtctgttaataaccaatactaaaagtgataatataataaatataggttactagattaaaaatggtgttccaactcgtgtgctctacatgcggtaaagatatttctcacgaacgatataaattgattatacgaaaaaaatcattaaaggatgtactcgtcagtgtaaagaacgaatgttgtaggttaaaattatctacacaaatagaacctcaacgtaacttaacagtgcaacctctattggatataaactaatatggatccggttaattttatcaagacatatgcgcctagaggttctattatttttattaattataccatgtcattaacaagtcatttgaatccatcgatagaaaaacatgtgggtatttattatggtacgttattatcggaacacttggtagttgaatctacctatagaaaaggagttcgaatagtcccattggatagtttttttgaaggatatcttagtgcaaaagtatacatgttagagaatattcaagttatgaaaatagcagctgatacgtcattaactttattgggtattccgtatggatttggtcatgatagaatgtattgttttaaattggtagctgactgttataaaaatgccggtattgatacatcgtctaaacgaatattgggcaaagatatttttctgagccaaaacttcacagacgataatagatggataaagatatatgattctaataatttaacattttggcaaattgattaccttaaagggtgagttaatatgcataactactcctccgttgttttttccctcgttctttttcttaacgttgtttgccatcactctcataatgtaaagatattctaaaatggtaaacttttgcatatcggacgcagaaattggtataaatgttgtaattgtattatttcccgtcaatggactagtcacagctccatcagttttatatcctttagagtatttctcactcgtgtctaacattctagagcattccatgatctgtttatcgttgatattggccggaaagatagattttttattttttattatattactattggcaattgtagatataacttctggtaaatatttttctaccttttcaatctcttctattttcaagccggctatatattctgctatattgttgctagtatcaataccttttctggctaagaagtcatatgtggtattcactatatcagttttaactggtagttccattagcctttccacttctgcagaataatcagaaattggttctttaccagaaaatccagctactataataggctcaccgatgatcattggcaaaatcctatattgtaccagattaatgagagcatatttcatttccaataattctgctagttcttgagacattgatttatttgatgaatctagttggttctctagatactctaccatttctgccgcatacaataacttgttagataaaatcagggttatcaaagtgtttagcgtggctagaatagtgggcttgcatgtattaaagaatgcggtagtatgagtaaaccgttttaacgaattatatagtctccagaaatctgtggcgttacatacatgagccgaatgacatcgaagattgtccaatatttttaatagctgctctttgtccattatttctatatttgactcgcaacaattgtagataccattaatcaccgattcctttttcgatgccggacaatagcacaattgtttagctttggactctatgtattcagaattaatagatatatctctcaatacagattgcactatacattttgaaactatgtcaaaaattgtagaacgacgctgttctgcagccatttaactttaaataatttacaaaaatttaaaatgagcatccgtataaaaatcgataaactgcgccaaattgtggcatatttttcagagttcagtgaagaagtgtctataaatgtagactcgacggatgagttaatgtatatttttgccgccttgggcggatctgtaaacatttgggcaattatacctctaagtgcatcagtgttttaccgaggagccgaaaatattgtgtttaatcttcctgtgtccaaggtaaaatcgtgtttgtgtagttttcacaatgatgccatcatagatatagaacctgatctggaaaataatctagtaaaactttctagttatcatgtagtaagtgtcgattgtaacaaggaactgatgcctattaggacagatactactatttgtctaagtatagatcaaaagaaatcttacgtgtttaattttcacaagtatgaagaaaaatgttgtggtagaaccgtcattcatctagaatggttgttgggctttatcaagtgtattagtcagcatcagcatctggctattatgtttaaagatgacaatattattatgaagactcctggtaatactgatgcgttttccagggaatattctatgactgaatgttctcaagaactacaaaagttttctttcaaaatagctatctcgtctctcaacaaactacgaggattcaaaaagagagtcaatgtttttgaaactagaatcgtaatggataatgacgataacattttaggaatgttgttttcggatagagttcaatcctttaagatcaacatctttatggcgtttttagattaatactttcaatgagataaatatgggtggcggagtaagtgttgagctccctaaacgggatccgcctccgggagtacccactgatgagatgttattaaacgtggataaaatgcatgacgtgatagctcccgctaagcttttagaatatgtgcatataggaccactagcaaaagataaagaggataaagtaaagaaaagatatccagagtttagattagtcaacacaggacccggtggtctttcggcattgttaagacaatcgtataatggaaccgcacccaattgctgtcgcacttttaatcgtactcattattggaagaaggatggaaagatatcagataagtatgaagagggtgcagtattagaatcgtgttggccagacgttcacgacactggaaaatgcgatgttgatttattcgactggtgtcagggggatacgttcgatagaaacatatgccatcagtggatcggttcagcctttaataggagtaatagaactgtagagggtcaacaatcgttaataaatctgtataataagatgcaaacattatgtagtaaagatgctagtgtaccaatatgcgaatcatttttgcattatttacgcgcacacaatacagaagatagcaaagagatgatcgattatattctaagacaacagtctgcggactttaaacagaaatatatgagatgtagttatcccactagagataagttagaagagtcattaaaatatgcggaacctcgagaatgttgggatccagagtgttcgaatgccaatgttaatttcttactaacacgtaattataataatttaggactttgcaatattgtacgatgtaataccagcgtgaacaacttacagatggataaaacttcctcattaagattgtcatgtggattaagcaatagtgatagattttctactgttcccgtcaatagagcaaaagtagttcaacataatattaaacactcgttcgacctaaaattgcatttgatcagtttattatctctcttggtaatatggatactaattgtagctatttaaatgggtgccgcggcaagcatacagacgacggtgaatacactcagcgaacgtatctcgtctaaattagaacaagaagcgaacgctagtgctcaaacaaaatgtgatatagaaatcggaaatttttatatccgacaaaaccatggatgtaacctcactgttaaaaatatgtgctctgcggacgcggatgctcagttggatgctgtgttatcagccgctacagaaacatatagtggattaacaccggaacaaaaagcatacgtgccagctatgtttactgctgcgttaaacattcagacgagtgtaaacactgttgttagagattttgaaaattatgtgaaacagacttgtaattctagcgcggtcgtcgataacaaattaaagatacaaaacgtaatcatagatgaatgttacggagccccaggatctccaacaaatttggaatttattaatacaggatctagcaaaggaaattgtgccattaaagcgttgatgcaattgacgactaaggccactactcaaatagcacctagacaagttgctggtacaggagttcagttttatatgattgttatcggtgttataatattggcagcgttgtttatgtactatgccaagcgtatgttgttcacatccaccaatgataaaatcaaacttattttagccaataaggaaaacgtccattggactacttacatggacacattctttagaacttctccgatggttattgctaccacggatatgcaaaactgaaaatatattgataatattttaatagattaacatggaagttatcgctgatcgtctagacgatatagtgaaacaaaatatagcggatgaaaaatttgtagattttgttatacacggtctagagcatcaatgtcctgctatacttcgaccattaattaggttgtttattgatatactattatttgttatagtaatttatatttttacggtacgtctagtaagtagaaattatcaaatgttgttggtggtgctagtcatcacattaactattttttattactttatactataatagtactagactgacttctaacaaacatctcacctgccataaataaatgcttgatattaaagtcttctatttctaacactattccatctgtggaaaataatactctgacattatcgctaattgacacatcggtgagtgatatgcctataaagtaataatcttctttgggcacatataccagtgtaccaggttctaacaacctatttactggtgctcctgtagcatactttttctttaccttgagaatatccatcgtttgcttggtcaatagcgatatgtgattttttatcaaccactcaaaaaagtaattggagtgttcatatcctctacgggctattgtctcatggccgtgtatgaaatttaagtaacacgactgtggtagatttgttctatagagccgattgccgcaaatagatagaactaccaatatgtctgtacaaatgttaaacattaattgattaacagaaaaaacaatgttcgttctgggaatagaaaccagatcaaaacaaaattcgttagaatatatgccacgtttatacatggaatataaaataactacagtttgaaaaataacagtatcatttaaacatttaacttgcggggttaatctcacaactttactgtttttgaactgttcaaaatatagcatcgatccgtgagaaatacgtttagccgcctttaatagaggaaatcccaccgcctttctggatctcaccaacgacgatagttctgaccagcaactcatttcttcatcatccacctgttttaacatataataggcaggagatagatatccgtcattgcaatattccttctcgtaggcacacaatctaatattgataaaatctccattctcttctctgcatttattatcttgtctcggtggctgattaggctgtggtcttggtttaggccttggtctatcgttgttgaatctattttggtcattaaatctttcatttcttcctggtatatttctatcacctcgtttggttggatttttgtctatattatcgtttgtaacatcggtacgggtattcatttatcacaaaaaaaacttctctaaatgagtctactgctagaaaacctcatcgaagaagataccatattttttgcaggaagtatatctgagtatgatgatttacaaatggttattgccggcgcaaaatccaaatttccaagatctatgctttctatttttaatatagtacctagaacgatgtcaaaatatgagttggagttgattcataacgaaaatatcacaggagcaatgtttaccacaatgtataatataagaaacaatttgggtctaggagatgataaactaactattgaagccattgaaaactatttcttggatcctaacaatgaagttatgcctcttattattaataatacggatatgactgccgtcattcctaaaaaaagtggtaggagaaagaataagaacatggttatcttccgtcaaggatcatcacctatcttgtgcattttcgaaactcgtaaaaagattaatatttataaagaaaatatggaatccgcgtcgactgagtatacacctatcggagacaacaaggctttgatatctaaatatgcgggaattaatgtcctgaatgtgtattctccttccacatccataagattgaatgccatttacggattcaccaataaaaataaactagagaaacttagtactaataaggaactagaatcgtatagttctagccctcttcaagaacccattaggttaaatgattttctgggactattggaatgtgttaaaaagaatattcctctaacagatattccgacaaaggattgattactataaatggagaatgttcctaatgtatactttaatcctgtgtttatagagcccacgtttaaacattctttattaagtgtttataaacacagattaatagttttatttgaagtattcgttgtattcattctaatatatgtattttttagatctgaattaaatatgttcttcatgcctaaacgaaaaatacccgatcctattgatagattacgacgtgctaatctagcgtgtgaagacgataaattaatgatctatggattaccatggatgacaactcaaacatctgcgttatcaataaatagtaaaccgatagtgtataaagattgtgcaaagcttttgcgatcaataaatggatcacaaccagtatctcttaacgatgttcttcgcagatgatgattcattttttaagtatttggctagtcaagatgatgaatcttcattatctgatatattgcaaatcactcaatatctagactttctgttattattattgatccaatcaaaaaataaattagaagctgtgggtcattgttatgaatctctttcagaggaatacagacaattgacaaaattcacagactttcaagattttaaaaaactgtttaacaaggtccctattgttacagatggaagggtcaaacttaataaaggatatttgttcgactttgtgattagtttgatgcgattcaaaaaagaatcctctctagctaccaccgcaatagatcctgttagatacatagatcctcgtcgtgatatcgcattttctaacgtgatggatatattaaagtcgaataaagtgaacaataattaattctttattgtcatcatgaacggcggacatattcagttgataatcggccccatgttttcaggtaaaagtacagaattaattagacgagttagacgttatcaaatagctcaatataaatgcgtgactataaaatattctaacgataatagatacggaacgggactatggacgcatgataagaataattttgaagcattggaagcaactaaactatgtgatgtcttggaatcaattacagatttctccgtgataggtatcgatgaaggacagttctttccagacattgtttaattctgtgagcgtatggcaaacgaaggaaaaatagttatagtagccgcactcgatgggacatttcaacgtaaaccgtttaataatattttgaatcttattccattatctgaaatggtggtaaaactaactgctgtgtgtatgaaatgctttaaggaggcttccttttctaaacgattgggtgaggaaaccgagatagagataataggaggtaatgatatgtatcaatcggtgtgtagaaagtgttacgtcggctcataatattatattttttatctaaaaaactaaaaataaacattgattaaattttaatataatacttaaaaatggatgttgtgtcgttagataaaccgtttatgtattttgaggaaattgataatgagttagattacgaaccagaaagtgcaaatgaggtcgcaaaaaaactgccgtatcaaggacagttaaaactattactaggagaattattttttcttagtaagttacagcgacacggtatattagatggtgccaccgtagtgtatataggatcggctcctggtacacatatacgttatttgagagatcatttctataatttaggagtgatcatcaaatggatgctaattgacggccgccatcatgatcctattttaaatggattgcgtgatgtaactctagtgactcggttcgttgatgaggaatatctacgatccatcaaaaaacaactgcatccttctaagattattttaatttctgatgtaagatccaaacgaggaggaaatgaacctagtacggcggatttactaagtaattacgctctacaaaatgtcatgattagtattttaaaccccgtggcgtctagtcttaaatggagatgcccgtttccagatcaatggatcaaggacttttatatcccacacggtaataaaatgttacaaccttttgctccttcatattcagctgaaatgagattattaagtatttataccggtgagaacatgagactgactcgagttaccaaattagacgctgtaaattatgaaaaaaagatgtactaccttaataagatcgtccgtaacaaagtagttgttaactttgattatcctaatcaggaatatgactattttcacatgtactttatgctgaggaccgtgtactgcaataaaacatttcctactactaaagcaaaggtactatttctacaacaatctatatttcgtttcttaaatattccaacaacatcaactgaaaaagttagtcatgaaccaatacaacgtaaaatatctagcaaaaattctatgtctaaaaacagaaatagcaagagatccgtacgcggtaataaatagaaacgtactactgagatatactaccgatatagagtataatgatttagttactttaataaccgttagacataaaattgattctatgaaaactgtgtttcaggtatttaacgaatcatccataaattatactccggttgatgatgattatggagaaccaatcattataacatcgtatcttcaaaaaggtcataacaagtttcctgtaaattttctatacatagatgtggtaatatctgacttatttcctagctttgttagactagatactacagaaactaatatagttaatagtgtactacaaacaggcgatggtaaaaagactcttcgtcttcccaaaatgttagagacggaaatagttgtcaagattctctatcgccctaatataccattaaaaattgttagatttttccgcaataacatggtaactggagtagagatagccgatagatctgttatttcagtcgctgattaatcaattagtagagatgagataagaacattataataatcaataatatatcttatatcttatatcttatatcttatatcttgtttagaaaaatgctaatattaaaatagctaacgctagtaatccaatcggaagccatttgatatctataatagggtatctaatttcctgatttaaatagcggacagctatattctcggtagctactcgtttggaatcacaaacattatttacatctaatttactatctgtaatggaaacgtttcccaatgaaatggtacaatccgatacattgcattttgttatatttttttttaaagaggctggtaacaacgcatcgcttcgtttacatggctcgtaccaacaataatagggtaatcttgtatctattcctatccgtactatgcttttatcaggataaatacatttacatcgtatatcgtctttgttagcatcacagaatgcataaatttgttcgtccgtcatgataaaaatttaaagtgtaaatataactattatttttatagttgtaataaaaagggaaatttgattgtatactttcggttctttaaaagaaactgacttgataaaaatggctgtaatctctaaggttacgtatagtctatatgatcaaaaagagattaatgctacagatattatcattagtcatgttaaaaatgacgacgatatcggtaccgttaaagatggtagactaggtgctatggatggggcattatgtaagacttgtgggaaaacggaattggaatgtttcggtcactggggtaaagtaagtatttataaaactcatatagttaagcctgaatttatttcagaaattattcgtttactgaatcatatatgtattcactgcggattattgcgttcacgagaaccgtattccgacgatattaacctaaaagagttatcgggacacgctcttaggagattaaaggataaaatattatccaagaaaaagtcatgttggaacagtgaatgtatgcaaccgtatcaaaaaattactttttcaaagaaaaaggtttgtttcgtcaacaagttggatgatattaacgttcctaattctctcatctatcaaaagttaatttctattcatgaaaagttttggccattattagaaattcatcaatatccagctaacttattttatacagactactttcccatccctccgttgattattagaccggctattagtttttggatagatagtatacccaaagagaccaatgaattaacttacttattaggtatgatcgttaagaattgtaacttgaatgctgatgaacaggttatccagaaggcggtaatagaatacgatgatattaaaattatttctaataacactaccagtatcaatttatcatatattacatccggcaaaaataatatgattagaagttatatcgtcgcccgacgaaaagatcagaccgctagatctgtaattggtcccagtacatctatcaccgttaatgaggtaggaatgcccgcatatattagaaatacacttacagaaaagatatttgttaatgcctttacagtggataaagttaaacaactattagcgtcaaaccaagttaaattttactttaataaacgattaaaccaattaacaagaatacgccaaggaaagtttattaaaaataaaatacatttattgcctggtgattgggtagaagtagctgttcaagaatatacaagtattatttttggaagacagccgtctctacatagatacaacgtcatcgcttcatctatcagagctaccgaaggagatactatcaaaatatctcccggaattgccaactctcaaaatgctgatttcgacggggatgaggaatggatgatattagaacaaaatcctaaagctgtaattgaacaaagtattcttatgtatccgacgacgttactcaaacacgatattcatggagcccccgtttatggatctattcaagatgaaatcgtagcagcgtattcattgtttaggatacaagatctttgtttagatgaagtattgaacatcttggggaaatatggaagagagttcgatcctaaaggtaaatgtaaattcagcggtaaagatatctatacttacttgataggtgaaaagattaattatccgggtctcttaaaggatggtgaaattattgcaaacgacgtagatagtaattttgttgtggctatgaggcatctgtcattggctggactcttatccgatcataagtcgaacgtggaaggtatcaactttattatcaagtcatcttatgtttttaagagatatctatctatttacggttttggggtgacattcaaagatctgagaccaaattcgacgttcactaataaattggaggccatcaacgtagaaaaaatagaacttatcaaagaagcatacgccaaatatctcaacgatgtaagagacgggaaaatagttccattatctaaagctttagaggcggactatgtggaatccatgttatccaacttgacaaatcttaatatccgagagatagaagaacatatgagacaaacgctgatagatgatccagataataacctcctgaaaatggccaaagcgggttataaagtaaatcccacagaactaatgtatattctaggtacgtatggacaacaaaggattgatggtgaaccagcagagactcgagtattgggtagagttttaccttactatcttccagactctaaggatccagaaggaagaggttacattcttaattctttaacaaaaggattaacgggttctcaatattacttttcgatgctggttgccagatctcaatctactgatatcgtctgtgaaacatcacgtaccggaacactggctagaaaaatcattaaaaagatggaggatatggtggtcgacggatacggacaagtagttataggtaatacgctcatcaagtacgccgccaattataccaaaattctaggctcagtatgtaaacctgtagatcttatctatccagatgagtccatgacttggtatttggaaattagtgctctgtggaataaaataaaacagggattcgtttactctcagaaacagaaacttgcaaagaagacattggcgccgtttaatttcctagtattcgtcaaacccaccactgaggataatgctattaaggttaaggatctgtacgatatgattcataacgtcattgatgatgtgagagagaaatacttctttacggtatctaatatagattttatggagtatatattcttgacgcatcttaatccttctagaattagaattacaaaagaaacggctatcactatctttgaaaagttctatgaaaaactcaattatactctaggtggtggaactcctattggaattatttctgcacaggtattgtctgagaagtttacacaacaagccctgtccagttttcacactactgaaaaaagtggtgccgtcaaacaaaaacttggtttcaacgagtttaataacttgactaatttgagtaagaataagaccgaaattatcactctggtatccgatgatatctctaaacttcaatctgttaagattaatttcgaatttgtatgtttgggagaattaaatccaaacatcactcttcgaaaagaaacagataaatatgtagtagatataatagtcaatagattatacatcaagagagcagaaataaccgaattagtcgtcgaatatatgattgaacgatttatctcctttagcgtcattgtaaaggaatggggtatggagacattcattgaggacgaggataatattagatttactgtctacctaaatttcgttgaaccggaagaattgaatcttagtaagtttatgatggttcttccgggggcagccaacaagggaaagattagtaaattcaagattcctatctctgattatacgggatatgacgacttcaatcaaacaaaaaagctcaataagatgactgtagaactcatgaatctaaaagaattgggttctttcgatttggaaaacgtcaacgtgtatcctggagtatggaatacatacgatatcttcggtatcgaggccgctcgtgaatacttgtgcgaagccatgttaaacacctatggagaagggttcgattatctgtatcagccttgtgatcttctcgctagtttactatgtgctagttacgaaccagaatcagtgaataaattcaagttcggcgcagctagtactcttaagagagctacgttcggagacaataaagcattgttaaacgcggctcttcataaaaagtcagaacctattaacgataatagtagctgccacttttttagcaaggtccctaatataggaactggatattacaaatactttatcgacttgggtcttctcatgagaatggaaaggaaactatctgataagatatcttctcaaaagatcaaggaaatggaagaaacagaagacttttaattcttatcaataacatatttttctatgatctgtcttttaaacgatggattttccacaaatgcgcctctcaagtccctcatagaatgatacacgtataaaaaatatagcataggcaatgactccttatttttagacattagatatgccaaaatcatagccccgcttctatttactcccgcagcacaatgaaccaacacgggctcgtttcgttgatcacatttagataaaaaggcggttacgtcgtcaaaatatttactaatatcggtagttgtatcatctaccaacggtatatgaataatattaatattagagttaggtaatgtatatttatccatcgtcaaatttaaaacatatttgaacttaacttcagatgatggtgcatccatagcatttttataatttcccaaatacacattattggttacccttgtcattatagtgggagatttggctttgtgcatatctccagttgaacgtagtagtaagtatttatacaaacttttcttatccatttataacgtacaaatggataaaactactttatcggtaaacgcgtgtaatttagaatacgttagagaaaaggctatagtaggcgtacaagcagccaaaacatcaacacttatattctttgttattatattggcaattagtgcgctattactctggtttcagacgtctgataatccagtctttaatgaattaacgagatatatgcgaattaaaaatacggttaacgattggaaatcattaacggatagcaaaacaaaattagaaagtgatagaggtagacttctagccgctggtaaggatgatatatttgaattcaaatgtgtggatttcggcgcctattttatagctatgcgattggataagaaaacatatctgccgcaagctattaggcgaggtactggagacgcgtggatggttaaaaaggcggcaaaggtcgatccatctgctcaacaattttgtcagtatttgataaaacacaagtctaataatgttattacttgtggtaatgagatgttaaatgaattaggttatagcggttattttatgtcaccgcattggtgttccgattttagtaatatggaatagtgttagataaatgcggtaacgaatgttcctgtaaggaaccataacagcttagatttaacgttaaagatgagcataaacataataaacaaaattacaatcaaacttataacattaatatcaaacaatccaaaaaatgaaatcagtggagtagtaaacgcgtacataactcctggataacgtttagcagctgccgttcctattctagaccaaaaattcggtttcatgttttcgaaacggtattctgcaacaagtcgaggatcgtgttctacatatttggcggcattatccagtatctgcctattgatcttcatttcgttttcgattctggctatttcaaaataaaatcccgatgatagacctccagactttataatttcatctacgatgttcagcgccgtagtaactctaataatataggctgataagctaacatcataccctcctgtatatgtgaatatggcatgatttttgtccattacaagctcggttttaactttattgcctgtaataatttctctcatctgtaggatatctatttttttgtcatgcattgccttcaagacgggacgaagaaacgtaatatcctcaataacgttatcgttttctacaataactacatattctacctttttattttctaactcggtaaaaaaattagaatcccatagggctaaatgtctagcgatatttcttttcgtttcctctgtacacatagtgttacaaaaccctgaaaagaagtgagtatacttgtcatcatttctaatgtttcctccagtccactgtataaacgcataatccttgtaatgatctggatcatccttgactaccacaacatttcttttttctggcataacttcgttgtcctttacatcatcgaacttctgatcattaatatgctcatgaacattaggaaatgtttctgatggaggtctatcaataactggcacaacaataacaggagttttcaccgccgccatttagttattgaaattaatcatatacaactctttaatacgagttatattttcgtctatccattgtttcacattgacatatttcgacaaaaagatataaaatgcgtattccaatgcttctctgtttaatgaattactaaaatatacaaacacgtcactgtctggcaataaatgatatcttagaatattgtaacaatttattttgtattgcacatgttcgtgatctatgagttcttcttcgaatggcataggatctccgaatctgaaaacgtataaataggagttagaataataatatttgagagtattggtaatatataaactctttagcggtataattagtttttttctctcaatttctatttttagatgtgatggaaaaatgactaattttgtagcattagtatcatgaactctaatcaaaatcttaatatcttcgtcacacgttagctctttgaagtttttaagagatgcatcagttggttctacagatggagtaggtgcaacaattttttgttctacacatgtatgtactggagccattgttttaactataatggtgcttgtatcgaaaaactttaatgcagatagcggaagctcttcgccgcgactttctacgtcgtaattgggttctaacgccgatctctgaatggatactagttttctaagttctaatgtgattctctgaaaatgtaaatccaattcctccggcattatagatgtgtatacatcggtaaataaaactatagtatccaacgatcccttctcgcaaattctagtcttaaccaaaaaatcgtatataaccacggagatggcgtatttaagagtggattcttctaccgttttgttcttggatgtcatataggaaactataaagtccgcactactgttaagaatgattactaacgcaactatatagtttaaattaagcattttggaaacataaaataactctgtagacgatacttgactttcgaataagtttgcagacaaacgaagaaagaacagacctctcttaatttcagaagaaaactttttttcgtattcctgacgtctagagtttatatcaataagaaagttaagaattagtcggttaatgttgtatttcattacccaagtttgagatttcataatattatcaaaagacatgataatattaaagataaagcgctgactatgaacgaaatagctatatggttcgctcaagaatatagtcttgttaaacgtggaaacgataactgtatttttaatcacgtcagcggcatctaaattaaatataggtatatttattccacacactctacaatatgccacaccatcttcataataaataaattcgttagcaaaattattaattttagtgaaatagttagcgtcaactttcatagcttccttcaatctaatttgatgctcacacggtgcgaattccactctaacatcccttttccatgcctcaggttcatcgatctctataatatctagttttttgcgtttcacaaacacaggctcgtctctcgcgatgagatctgtatagtaactatgtaaatgataactagatagaaagatgtagctatatagatgacgatcctttaagagaggtataataactttaccccaatcagatagactgttgttatggtcttcggaaaaagaatttttataaatttttccagtattttccaaatatacgtacttaacatctaaaaaatccttaatgataataggaatggataatccgtctattttataaagaaatacatatcgcacattatacttttttttggaaatgggaataccgatgtgtctacataaatatgcaaagtctaaatattttttagagaatcttagttggtccaaattcttttccaagtacggtaatagatttttcatattgaacggtatcttcttaatctctggttctagttccgcattaaatgatgaaactaagtcactatttttataactaacgattacatcacctctaacatcatcatttaccagaatactgatcttcttttgtcgtaaatacatgtctaatgtgttaaaaaaaagatcatacaagttatacgtcatttcatctgtggtattcttgtcattgaaggataaactcgtactaatctcttctttaacagcctgttcaaatttatatcctatatacgaaaaaatagcaaccagtgtttgatcatccgcgtcaatattctgttctatcgtagtgtataacaatcgtatatcttcttctgtgatagtcgatacgttataaaggttgataacgaaaatatttttatttcgtgaaataaagtcatcgtaggattttggacttatattcgcgtctagtagatatgcttttatttttggaatgatctcaattagaatagtctctttagagtccatttaaagttacaaacaactaggaaattggtttatgatgtataatttttttagtttttatagattctttattctatacttaaaaaatgaaaataaatacaaaggttcttgagggttgtgttaaattgaaagcgagaaataatcataaattatttcattatcgcgatatccgttaagtttgtatcgtaatggcgtggtcaattacgaataaagcggatactagtagcttcacaaagatggctgaaatcagagctcatctaaaaaatagcgctgaaaataaagataaaaacgaggatattttcccggaagatgtaataattccatctactaagcccaaaaccaaacgagccactactcctcgtaaaccagcggctactaaaagatcaaccaaaaaggaggaagtggaagaagaagtagttatagaggaatatcatcaaacaactgaaaaaaattctccatctcctggagtcagcgacattgtagaaagcgtggccgctgtagagctcgatgatagcgacggggatgatgaacctatggtacaagttgaagctggtaaagtaaatcatagtgctagaagcgatctctctgacctaaaggtggctaccgacaatatcgttaaagatcttaagaaaattattactagaatctctgcagtatcgacggttctagaggatgttcaagcagctggtatctctagacaatttacttctatgactaaagctattacaacactatctgatctagtcaccgagggaaaatctaaagttgttcgtaaaaaagttaaaacttgtaagaagtaaatgcgtgcacttttttataaagatggtaaactctttaccgataataattttttaaatcctgtatcagacgataatccagcgtatgaggttttgcaacatgttaaaattcctactcatttaacagatgtagtagtatatgaacaaacgtgggaggaggcgttaactagattaatttttgtgggaagtgattcaaaaggacgtagacaatacttttacggaaaaatgcatgtacagaatcgcaacgctaaaagagatcgtatttttgttagagtatataacgttatgaaacgaattaattgttttataaacaaaaatataaagaaatcgtccacagattccaattatcagttggcggtttttatgttaatggaaactatgttttttattagatttggtaaaatgaaatatcttaaggagaatgaaacagtagggttattaacactaaaaaataaacacatagaaataagtcccgatgaaatagttatcaagtttgtaggaaaggacaaagtttcacatgaatttgttgttcataagtctaatagactatataaaccgctattgaaactgacggatgattctagtcccgaagaatttctgttcaacaaactaagtgaacgaaaggtatacgaatgtatcaaacagtttggtattagaatcaaggatctccgaacgtatggagtcaattatacgtttttatataatttttggacaaatgtaaagtccatatctcctcttccgtcaccaaaaaagttaatagcattaactatcaaacaaactgctgaagtggtaggtcatactccatcaatttcaaaaagagcttatatggcaacgactattttagaaatggtaaaggataaaaattttttagatgtagtatctaaaactacgttcgatgaattcctatctatagtcgtagatcacgttaaatcatctacggatggatgatatagatctttacacaaataattacaagaccgataaatggaaatggataagcgtatgaaatctctcgcaatgacagctttcttcggagagctaagcacattagatattatggcattgataatgtctatatttaaacgccatccaaacaataccattttttcagtggataaggatggtcagtttatgattgatttcgaatacgataattataaggcttctcaatatttggatctgaccctcactccgatatctggagatgaatgcaagactcacgcatcgagtatagccgaacaattggcgtgtgcggatattattaaagaggatattagcgaatatatcaaaactactccccgtcttaaacgatttataaaaaaataccgcaatagatcagatactcgtatcagtcgagatacagaaaagcttaaaatagctctagctaaaggcatagattacgaatatataaaagacgcttgttaataagtaaatgaaaaaaaactagtcgtttataataaaacacgatatggatgccaacgtagtatcattttctactattgcgacgtatatagacgctttagcgaagaatgcttcggaattagaacagaggtctaccgcatacgaaataaataatgaattggaactagtatttattaagccgccattgattactttgacaaatgtagtgaatatctctacgattcaggaatcgtttattcgatttaccgttactaataaggaaggtgttaaaattagaactaagattccattatctaaggtacatggtctagatgtaaaaaatgtacagttagtagatgctatagataacatagtttgggaaaagaaatcattagtgacggaaaatcgtcttcacaaagaatgcttgttgagactatcgacagaggaacgtcatatatttttggattacaagaaatatggatcctctatccgactagaattagtcaatcttattcaagcaaaaacaaaaaactttacgatagactttaagctaaaatattttctaggatccggtgcccagtctaaaagttctttgttgcacgctattaatcatccaaagtcaaggcctaatacatctctggaaatagaattcacacctagagacaatgaaacagttccatatgatgaactaataaaggaattgacgactctctcgcgtcatatatttatggcttctccagagaatgtaattctttctccgcctattaacgcgcctataaaaacctttatgttgcctaaacaagatatagtaggtttggatctggaaaatctatatgccgtaactaagactgacggcattcctataactatcagagttacatcaaacgggttgtattgttattttacacatcttggttatattattagatatcctgttaagagaataatagattccgaagtagtagtctttggtgaggcagttaaggataagaactggaccgtatatctcattaagctaatagagcctgtgaatgcaatcaatgatagactagaagaaagtaagtatgttgaatctaaactagtggatatttgtgatcggatagtattcaagtcaaagaaatacgaaggtccgtttactacaactagtgaagtcgtcgatatgttatctacatatttaccaaagcaaccagaaggtgttattctgttctattcaaagggacctaaatctaacattgattttaaaattaaaaaggaaaatactatagaccaaactgcaaatgtagtatttaggtacatgtccagtgaaccaattatctttggagaatcgtctatctttgtagagtataagaaatttagcaacgataaaggctttcctaaagaatatggttctggtaagattgtgttatataacggcgttaattatctaaataatatctattgtttggaatatattaatacacataatgaagtgggtattaagtccgtggttgtacctattaagtttatagcagaattcttagttaatggagaaatacttaaacctagaattgataaaaccatgaaatatattaactcagaagattattatggaaatcaacataatatcatagtcgaacatttaagagatcaaagcatcaaaataggagatatctttaacgaggataaactatcggatgtgggacatcaatacgccaataatgataaatttagattaaatccagaagttagttattttacgaataaacgaactagaggaccgttgggaattttatcaaactacgtcaagactcttcttatttctatgtattgttccaaaacatttttagacgattccaacaaacgaaaggtattggcgattgattttggaaacggtgctgacctggaaaaatacttttatggagagattgcgttattggtagcgacggatccggatgctgatgctatagctagaggaaatgaaagatacaacaaattaaactctggaattaaaaccaagtactacaaatttgactacattcaggaaactattcgatccgatacatttgtctctagtgtcagagaagtattctattttggaaagtttaatatcatcgactggcagtttgctatccattattcttttcatccgagacattatgctaccgtcatgaataacttatccgaactaactgcttctggaggcaaggtattaatcactaccatggacggagacaaattatcaaaattaacagataaaaagacttttataattcataagaatttacctagtagcgaaaactatatgtctgtagaaaaaatagctgatgatagaatagtggtatataatccatcaacaatgtctactccaatgactgaatacattatcaaaaagaacgatatagtcagagtgtttaacgaatacggatttgttcttgtagataacgttgatttcgctacaattatagaacgaagtaaaaagtttattaatggcgcatctacaatggaagatagaccgtctacaaaaaactttttcgaactaaatagaggagccattaaatgtgaaggtttagatgtcgaagacttacttagttactatgttgtttatgtcttttctaagcggtaaataataatatggtatgggttctgatctcccagttctaaatgcattaaataattccaatagagcgatttttgttcctataggaccttccaactgtggatactctgtattgttaatagatatattaatacttttgtcgggtaacagaggttctacgtcttctaaaaataaaagttttataacatctggcctgttcataaataaaaacttggcgattctatatatactcttattatcaaatctagccattgtcttatagatgtgagctactgtaggtgtaccatttgattttctttctaatactatatatttctctcgaagaagttcttgcacatcatctgggaataaaatactactgttgagtaaatcagttattttttttatatcgatattgatggacatttttatagttaaggataataagtatcccaaagtcgataacgacgataacgaagtatttatacttttaggaaatcacaatgactttatcagattaaaattaacaaaattaaaggagcatgtatttttttctgaatatattgtgactccagatacatatggatctttatgcgtcgaattaaatgggtctagttttcagcacggcggtagatatatagaggtggaggaatttatagatgctggaagacaagttagatggtgttctacatccaatcatatatctaaagatatacccgaagatatgcacactgataaatttgtcatttatgatatttatacgtttgattcgttcaagaataaacgattggtattcgtacaggtacctccgtcgttaggagatgatagtcatttgactaatccgttattgtcaccgtattatcgtaattcagtagccagacaaatggtcaatgatatgatttttaatcaagattcatttttaaaatatttattagaacatctgattagaagccactatagagtttctaaacatataacaatagttagatacaaggataccgaagaattaaatctaacgagaatatgttataatagagataagtttaaggcgtttgtattcgcttggtttaacggcgtttcggaaaatgaaaaggtactagatacgtataaaaaggtatctaatttgatataatgaattcagtgactgtatcacacgcgccatatactattacttatcacgatgattgggaaccagtaatgagtcaattggtagagttttataacgaagtagccagttggctgctacgagacgagacgtcgcctattcctgataagttctttatacagttgaaacaaccgcttagaaataaacgagtatgtgtgtgtggtatagatccgtatccgaaagatggaactggtgtaccgttcgaatcaccaaattttacaaaaaaatcaattaaggagatagcttcatctatatctagattaaccggagtaattgattataaaggttataaccttaatataatagacggggttataccctggaattattacttaagttgtaaattaggagaaacaaaaagtcacgcgatttactgggataagatttccaagttactgctgcagcatataactaaacacgttagtgttctttattgtttgggtaaaacagatttctcgaatatacgggccaagttagaatccccggtaactaccatagtcggatatcatccagcggctagagaccgccaattcgagaaagatagatcatttgaaattatcaacgttttactggaattagacaacaaggcacctataaattgggctcaagggtttatttattaatgctttagtgaaattttaacttgtgttctaaatggatgcggctattagaggtaatgatgttatctttgttcttaagactataggtgtcccgtcagcgtgcagacaaaatgaagatccaagatttgtagaagcatttaaatgcgacgagttagaaagatatattgagaataatccagaatgtacactattcgaaagtcttagggatgaggaagcatactctatagtcagaattttcatggatgtagatttagacgcgtgtctagacgaaatagattatttaacggccattcaagattttattatcgaggtgtcaaactgtgtagctagattcgcgtttacagaatgcggcgccattcatgaaaatgtaataaaatccatgagatctaatttttcattgactaagtctacaaatagagataaaacaagttttcatattatctttttagatacgtataccactatggatacattgatagctatgaaacgaacactattagaattaagtagatcatctgaaaatccactaaccagatcgatagacactgccgtatataggagaaaaacaactcttcgggttgtaggtactaggaaaaatccaaattgcgacactattcatgtaatgcaaccaccgcatgataatatagaagattacctattcacttacgtggatatgaacaacaatagttattacttttctctacaacaacgattggaggatttagttcctgataagttatgggaaccagggtttatttcattcgaagacgctataaaaagagtttcaaaaatattcattaattctataataaactttaatgatctcgatgaaaataattttacaacggtaccactggtcatagattacgtaacaccttgtgcattatgtaaaaaacgatcgcataaacatccgcatcaactatcgttggaaaatggtgctattagaatttacaaaactggtaatccacatagttgtaaagttaaaattgttccgttggatggtaataaactgtttaatattgcacaaagaattttagacactaactctgttttattaaccgaacgaggagaccatatagtttggattaataattcatggaaatttaacagcgaagaacccttgataacaaaactaattttgtcaataagacatcaactacctaaggaatattcaagcgaattactctgtccaagaaaacgaaagactgtagaagctaacatacgagacatgttagtagattcagtggagaccgatacctatccggataaacttccgtttaaaaatggtgtattggacctggtagacggaatgttttactctggagatgatgctaaaaaatatacgtgtactgtatcaaccggatttaaatttgacgatacaaagttcgtcgaagacagtccagaaatggaagagttaatgaatatcattaacgatatccaaccattaacggatgaaaataagaaaaatagagagctatatgaaaaaacattatctagttgtttatgcggtgctaccaaaggatgtttaacattcttttttggagaaactgcaactggaaagtcgacaaccaaacgtttgttaaagtctgctatcggtgacctgtttgttgagacgggtcaaacaattttaacagatgtattggataaaggacctaatccatttatcgctaacatgcatttgaaaagatctgtattctgtagcgaactacctgattttgcctgtagtggatcaaagaaaattagatctgacaatattaaaaagttgacagaaccttgtgtcattggaagaccgtgtttctccaataaaattaataatagaaaccatgcgacaatcattatcgatactaattacaaacctgtttttgataggatagataacgcattaatgagaagaattgccgtcgtgcgattcagaacacacttttctcaaccttctggtagagaggctgctgaaaataatgacgcgtacgataaagtcaaactattagacgaggggttagatggtaaaatacaaaataatatatatagatttgcatttctatacttgttggtgaaatggtacaaaaaatatcatgttcctattatgaaactatatcctacacccgaagagattcctgactttgcattctatctcaaaataggtactctgttggtatctagctctgtaaagcatattccattaatgacggacctctccaaaaagggatatatattgtacgataatgtggtcactcttccgttgactactttccaacagaaaatatccaagtattttaattctagactatttggacacgatatagagagcttcatcaatagacataagaaatttgccaatgttagtgatgaatatctgcaatatatattcatagaggatatttcatctccgtaaatatatgctcatatatttatagaagatatcacatatctaaatgaataccggaatcatagatttatttgataatcatgttgatagtataccaactatattacctcatcagttagctactctagattatctagttagaactatcatagatgagaacagaagcgtgttattgttccatattatgggatcaggtaaaacaataatcgctttgttgttcgccttggtagcttccagatttaaaaaggtttacattctagtgccgaacatcaacatcttaaaaattttcaattataatatgggtgtagctatgaacttgtttaatgacgaattcatagctgagaatatctttattcattccacaacaagtttttattctcttaattataacgataacgtcattaattataacggattatctcgctacaataactctatttttatcgttgatgaggcacataatatctttgggaataatactggagaacttatgaccgtgataaaaaataaaaacaagattccttttttactattgtctggatctcccattactaacacacctaatactctgggtcatattatagatttaatgtccgaagagacgatagattttggtgaaattattagtcgtggtaagaaagtaattcagacacttcttaacgaacgcggtgtgaatgtacttaaggatttgcttaaaggaagaatatcatattacgaaatgcctgataaagatctaccaacgataagatatcacggacgtaagtttctagatactagagtagtatattgtcacatgtctaaacttcaagagagagattatatgattactagacgacagctatgttatcatgaaatgtttgataaaaatatgtataacgtgtcaatggcagtattgggacaacttaatctgatgaataatttagatactttatttcaggaacaggataaggaattgtacccaaatctgaaaataaataatggcgtgttatacggagaagaattggtaacgttaaacattagttccaaatttaaatactttattaatcggatacagacactcaacggaaaacattttatatacttttctaattctacatatggcggattggtaattaaatatatcatgctcagtaatggatattctgaatataatggttctcagggaactaatccacatatgataaacggcaaaccaaaaacatttgctatcgttactagtaaaatgaaatcgtctttagaggatctattagatgtgtataattctcctgaaaacgatgatggtagtcaattgatgtttttgttttcatcaaacattatgtccgaatcctatactctaaaagaggtaaggcatatttggtttatgactatcccagatactttttctcaatacaaccaaattcttggacgatctattagaaaattctcttacgccgatatttctgaaccagttaatgtatatcttttagccgccgtatattccgatttcaatgacgaagtgacgtcattaaacgattacacacaggatgaattaattaatgttttaccatttgacatcaaaaagctgttgtatctaaaatttaagacgaaagaaacgaatagaatatactctattcttcaagagatgtctgaaacgtattctcttccaccacatccatcaattgtaaaagttttattgggagaattggtcagacaatttttttataataattctcgtattaagtataacgataccaagttacttaaaatggttacatcagttataaaaaataaagaagacgctaggaattacatagatgatattgtaaacggtcacttctttgtatcgaataaagtatttgataaatctcttttatacaaatacgaaaacgatattattacagtaccgtttagactttcctacgaaccatttgtttggggagttaactttcgtaaagaatataacgtggtatcttctccataaaactgatgagatatataaagaaataaatgtcgagctttgttaccaatggatacctttccgttacattggaaccacacgagctgacgttagacataaaaactaatattaggaatgccgtatataagacgtatctccatagagaaattagtggtaaaatggccaagaaaatagaaattcgtgaagacgtggaattacctctcggcgaaatagttaataattctgtagttataaacgttccgtgtgtaataacctacgcgtattatcacgttggggatatagtcagaggaacattaaacatcgaagatgaatcaaatgtaactattcaatgtggagatttaatctgtaaactaagtagagattcgggtactgtatcatttagcgattcaaagtactgcttttttcgaaatggtaatgcgtatgacaatggcagcgaagtcactgccgttctaatggaggctcaacaaggtatcgaatctagttttgtttttctcgcgaatatcgtcgactcataaaaaagagaatagcggtaagtataaacacgaatactatggcaataattgcgaatgttttattctcttcgatatatttttgataatatgaaaaacatgtctctctcaaatcggacaaccatctcataaaatagttctcgcgcgctggagaggtagttgccgctcgtataatctctccagaataatatacttgcgtgtcgtcgttcaatttatacggatttctatagttctctgttatataatgcggtttgccctcatgattagacgacgacaatagtgttctaaatttagatagttgatcagaatgaatgtttattggcgttggaaaaattatccatacagcgtctgcagagtggttgatagttgttcctagatatgtaaaataatccaacttactaggcagcaaattgtctagataaaatactgaatcaaacggtgcagacgtattggcggatctaatggaatccaattgattaactatcttttgaaaatatacatttttatgatccaatacttgtaagaatatagaaataatgataagtccatcatcgtgtttttttgcctcttcataagaactatattttttcttattccaatgaacaagattaatctctccagagtatttgtacacatctatcaagtgattggatccataatcgtcttcctttccccaatatatatgtagtgatgataacacatattcattggggagaaaccctccacttatatatcctcctttaaaattaatccttactagttttccagtgttctggatagtggttggtttcgactcattataatgtatgtctaacggcttcaatcgcgcgttagaaattgcttttttagtttctatattaataggagatagttgttgcggcatagtaaaaatgaaatgataactgtttaaaaatagctcttagtatgggaattacaatggatgaggaagtgatatttgaaactcctagagaattaatatctattaaacgaataaaagatattccaagatcaaaagacacgcatgtgtttgctgcgtgtataacaagtgacggatatccgttaataggagctagaagaacttcattcgcgttccaggcgatattatctcaacaaaattcagattctatctttagagtatccactaaactattacggtttatgtactacaatgaactaagagaaatctttagacggttgagaaaaggttctatcaacaatatcgatcctcactttgaagagttaatattattgggtggtaaactagataaaaaggaatctattaaagattgtttaagaagagaattaaaagaggaaagtgatgaacgtataacagtaaaagaatttggaaatgtaattctaaaacttacaacacgggataaattatttaataaagtatatataagttattgcatggcgtgttttattaatcaatcgttggaggatttatcgcatactagtatttacaatgtagaaattagaaagattaaatcattaaatgattgtattaacgacgataaatacgaatatctgtcttatatttataatatgctagttaatagtaaatgaacttttacagatctagtataattagtcagattattaagtataatagacgactagctaagtctattatttgcgaggatgactctcaaattattacactcacggcattcgttaaccaatgcctatggtgtcataaacgagtatccgtgtccgctattttattaactactgataacaaaatattagtatgtaacagacgagatagttttctctattctgaaataattagaactagaaacatgtttagaaagaaacgattatttctgaattattccaattatttgaacaaacaggaaagaagtatactatcgtcatttttttctctagatccagctactactgataatgatagaatagacgctatttatccgggtggcatacccaaaaggggtgagaatgttccagagtgtttatccagggaaattaaagaagaagttaatatagacaattcttttgtattcatagacactcggttttttattcatggcatcatagaagataccattattaataaattttttgaggtaatcttctttgtcggaagaatatctctaacgagtgatcaaatcattgatacatttaaaagtaatcatgaaatcaaggatctaatatttttagatccgaattcaggtaatggactccaatacgaaattgcaaaatatgctctagatactgcaaaacttaaatgttacggccatagaggatgttattatgaatcattaaaaaaattaactgaggatgattgattaaaaaatataaattaatttaccatcgtgtatttttataacgggattgtccggcatatcatgtagatagttaccgtctacatcgtatactcgaccatctacgcctttaaatcctctatttattgacattaatctattagaattggaataccaaatattagtaccctcaattagtttattggtaatattttttttagacgatagatcgatggctcttgaaaccaaggttttccaaccggactcattgtcgatcggtgagaagtctttttcattagcatgaatccattctaatgatgtatgtttaaacactctaaacaattggacaaattcttttgatttgctttgaatgatttcaaataggtcttcgtctacagtaggcataccattagataatctagccattataaagtgcacgtttacatatctacgttctggaggagtaagaacgtgactattgagacgaatggctcttcctactatctgacgaagagacgcctcgttccatgtcatatctaaaatgaagatatcattaattgagaaaaaactaataccctcgcctccactagaagagaatacgcatgttttaatgcattctccgttagtgtttgattcttggttaaactcagccaccgccttgattctagtatcttttgttctagatgagaactctatattagagataccaaagactttgaaatatagtaataagatttctattcctgactgattaacaaatggttcaaagactagacatttaccatgggatgctaatattcccaaacatacatctataaatttgacgcttttctcttttaattcagtaaatagagagatatcagccgcactagcatcccctttcaatagttctccctttttaaaggtatctaatgcggatttagaaaactctctatctcttaatgaatttttaaaatcattatatagtgttgctatctcttgcgcgtattcgcccggatcacgattttgtctttcaggaaagctatcgaacgtaaacgtagtagccatacgtctcagaattctaaatgatgatatacctgtttttatttcagcgagtttagccttttgataaatttcttcttgctttttcgacatattaacgtatcgcattaatactgttttcttagcgaatgatgcagacccttctacgtcatcaaaaatagaaaactcgttattaactatatacgaacatagtcctcctagtttggagactaattctttttcatcgactagacgtttattctcaaatagcgattggtgttgtaaggatcctggtcgtagtaagttaaccaacatggtgaattcttgcacactattgacgataggtgtagccgataaacaaatcatcttatggttttttaacgcaatggtcttagataaaaaattatatactgaacgagtaggacggatcttaccatcttctttgattaatgatttagaaatgaagttatgacattcatcaataatgacgcatattctactcttggaattaatagttttgatattagtaaaaaatttatttctaaaattttgatcatcgtaattaataaaaatacaatccttcgttatctctggagcgtatctgagtatagtgttcatccaaggatcttctatcaaagcctttttcaccaataagataatagcccaattcgtataaatatccttaagatgtttgagaatatatacagtagtcattgttttaccgacacccgtttcatggaacaataaaagagaatgcatactgtctaatcctaagaaaactcttgctacaaaatgttgataatccttgaggcgtactacgtccgaccccatcatttcaacgggcatattagtagttctgcgtaaggcataatcgatataggccgcgtgtgatttactcatttatgagtgataagtaataactatgttttaaaaatcacagcagtagtttaactagtcttctctgatgtttgttttcgatactttttgaatcagaagtcatactagaataaagcaacgagtgaacgtaatagagagcttcgtatactctattcgaaaactctaagaacttattaatgaattccgtatccactggattgtttaaaatactaaattgaacactgttcacatccttccaagaagaagacttagtgacggacttaacatgagacataaataaatccaaattttttttacaaacatcactagccaccataatggcgctatctttcaaccagctatcgcttacgcattttagcagtctaacatttttaaagagactacaatatattctcatagtatcgattacacctctaccgaataaagttggaagtttaataatacaatatttttcgtttacaaaatcaaataatggtcgaaacacgtcgaaggttaacatcttataatcgctaatgtatagattgttttcagtgagatgattattagatttaatagcatctcgttcacgtttgaacagtttattgcgtgcgctgaggtcggcaactacggcgtccgctttagtactcctcccataatactttacgctattaatctttaaaatttcatagactttatctagatcgctttctggtaacatgatatcatgtgtaaaaagttttaacatgtcggtcggcattctatttagatcattaactctagaaatctgaagaaagtaattagctccgtattccagactaggtaatgggcttttacctagagacagattaagttctggcaatgtttcataaaatggaagaaggacatgcgttccctcccggatattttttacaatttcatccatttacaactctatagtttgttttcattattattagttattatctcccataatcttggtaatacttaccccttgatcgtaagataccttatacaggtcattacatacaactaccaattgtttttgtacataatagattggatggttgacatccatggtggaataaactactcgaacagatagtttatctttccccctagatacattagccgtaatagttgtcggcctaaagaatatctttggtgtaaagttaaaagttagggttcttgttccattattgctttttgtcagtagttcattataaattctcgagatgggtccgttctctgaatatagaacatcatttccaaatctaacttctagtctagaaataatatcggtcttattcttaaaatctattcccttgatgaagggatcgttaatgaacaaatccttggcctttgattcggctgatctattatctccgttatagacgttacgttgactagtccaaagacttacaggaatagatgtatcgatgatgttgatactatgtgatatgtgagcaaagattgttctcttagtggcatcactatatgttccagtaatggcggaaaactttttagaaatgttatatataaaagaattttttcgtgttccaaacattagcagattagtatgaagataaacactcatattatcaggaacattatcaatttttacatacacatcagcatcttgaatagaaacgataccatcttctggaacctctacgatctcggcagactccggataaccagtcggtgggccatcgctaacaataactagatcatccaacaatctactcacatatgcatctatataatctttttcatcttgtgagtaccctggatacgaaataaatttattatccgtatttccataataaggtttagtataaacagagagagatgttgccgcatgaacttcagttacagtcgccgttggttggtttatttgacctattactctcctaggtttctctataaacgatggtttaatttgtacattcttaaccatatatccaataaagctcaattcaggaacataaacaaattctttgttgaacgtttcaaagtcgaacgaagagtcacgaataacgatatcggatactggattgaaggttaccgttacggtaatttttgaatcggatagtttaagactgctgaatgtatcttccacatcaaacggagttttaatataaacgtatactgtagatggttctttaatagtgtcattaggagttaggccaatagaaatatcattaagttcactagaatatccagagtgtttcaaagcaattgtattattgatacaattattatataattcttcgccctcaatttcccaaataacaccgttacacgaagagatagatacgtgattaatacatttatatccaacatatggtacgtaactgaatcttcccatacctttaacttctggaagttccaaactcagaaccaaatgattaagcgcagtaatatactgatccctaatttcgaagctagcgatagcctgattgtctggaccatcgtttgtcataactccggatagagaaatatattgcggcatatacaaagttggaatttgactatcgactgcgaagacattagaccgtttaatagagtcatccccaccgatcaaagaattaatgatagtattattcattttctatttaaaatggaaaaagcttacaataaactccgtagagaaatatctataatttgtgagttttccttaaagtaacagcttccgtaaacgccgtctttatctcttagtaggtttattgtatttatgaccttttccttatcttcatagaatactaaaggcaacaaagaaatttttggttcttctctaagagctacgtgagacttaaccatagaagccaacgaatccctacatattttagaacagaaataccctacttcaccacccttgtatgtctcaatactaataggtctaaaaaccaaatcttgattacaaaaccaacacttatcaattacactatttgtcttaatagacacatctgccatagatttataatactttggtagtatacaagcgagtgcttcttctttagcgggcttaaagactgctttaggtgctgaaataaccacatctggaaggcttactcgcttagccatttaattacggaactatttttttatacttctaatgagcaagtagaaaacctctcatctacaaaaacgtactcgtgtccataatcctctaccatagttacacgttttttagatctcatatgtgctaaaaagttttcccatactaattggttactattatttttcgtataatttttaacagtttgaggttttagatttttagttacagaagtgatatcgaatattttatccaaaaagaatgaataattaattgtcttagaaggagtgttttcttggcaaaagaataccaagtgcttaaatatttctactacttcattaatcttttctgtactcagattcagtttctcatcttttacttgattgattatttcaaagactaacttataatcctttttatttattctctcgttagccttaagaaaactagatacaaaatttgcatctacatcatccgtggatatttgatttttttccatgatatccaagagttccgagataatttctccagaacattgatgagacaataatctccgcaatacatttctcaaatgaataagtttattagacacgtggaagtttgactttttttgtacctttgtacatttttgaaataccgactcgcaaaaaatacaatattcatatccttgttcagatactataccgttatgtctacaaccgctacataatcgtagattcatgttaacactctacgtatctcgtcgtccaatattttatataaaaacattttatttctagacgttgccagaaaatcctgtaatatttttagttttttgggctgtgaataaagtatcgccctaatattgttaccgtcttccgccaatatagtagttaaattatccgcacatgcagaagaacaccgcttaggcggattcagtacaatgttatatttttcgtaccaactcatttaaatatcataatctaaaatagttctgtaatatgtctagcgctaatatattgatcataatcctgtgcataaattaagatacaacaatgtctcgaaatcatcgacatggcttcttccatagttagaagatcgtcgtcaaagttagcaacgtgattcatcaacatttgctgttttgaggcagcaaatactgaaccgtcgccattcaaccattcataaaaaccatcgtctgaatccattgataatttcttgtactggtttttgagagctcgcatcaatctagcatttctagctcccggattgaaaacagaaagaggatcgtacatccagggtccattttctgtaaatagaatcgtataatgtcccttcaagaagatatcagacgatccacaatcaaagaattggtctccgagtttgtaacaaactgcggactttaacctatacatgataccgtttagcataatttctggtgatacgtcaatcggagtatcatctattagagatctaaagccggtgtaacattctccaccaaacatattcttattctgacgtcgttctacataaaacatcattgctccattaacgataacaggggaatgaacagcactacccatcacattagttcccaatggatcaatgtgtgtaactccagaacatcttccatagcctatgttaggaggagcgaacaccactcttccactattgccatcgaatgccatagaataaatatccttggaattgatagaaatcggactgtcggatgttgtgatcatcttcataggattaacaactatgtatggtgccgcctgaagtttcatatcgtaactgatgccgtttataggtctagccacagaaaccaacgtaggtctaaatccaactatagacaaaatagaagccaatatctgttcctcatctgtcataacttgagagcatccagtatgaataatcttcattagatggggatctaccgcatcatcatcgttacaataaaaaattcccattctaatgttcataattgcttttctaatcatggtatgcatgtttgctctctgaatctctgtggaaattagatctgatacacctgtaatcactatcggattatcctccgtaagacgattaaccaacaacatataattataagactttacttttctaaattcataaagttgctggattaggctataggtgtctccatgtacatacgcgttctcgagcgcaggaagtttaataccgaatagtgccatcagaataggatgaatatagtaattagtttctggttttctataaataaaagacaaatcttgtgaactagacatatcggtaaaatgcatggattggaatcgtgtagtcgacagaagaatatgatgattagatggagagtatattttatctaactctttgagttggtcaccgattctaggactagctcgagaatgaataagtactaaaggatgagtacatttcacagaaacactagcattgttcaatgtgctctttacatgggtaaggagttgaaatagctcgtttctatttgttctgacaatatttagtttattcataatgttaagcatatcctgaatagtaaagttagatgtgtcatacttgttagtagttagatatttagcaattgcattcccatcatttctcaatctcgtactccaatcatgcgtggatgctacttcgtcgatggaaaccatacaatcctttttgataggctgttgagattgatcatttcctgcacgtttaggtttggtacgttgatttctagcccctgcggatataaagtcatcgtctacaatttgggacaatgaattgcatacactacaagacaaagatttatcagaagtgtgaatatgatcttcatctaccaaagaaagagtttgattagtataactagattttagtcctgcgttagatgttaaaaaaacatcgctattgaccacggcttccattatttatattcgtagtttttactcgaaagcgtgattttaatatccaatcttattacttttggaatcgttcaaaacctttgactagttgtagaatttgatctattgccctacgcgtatactcccttgcatcatatacgttcgtcaccagatcgtttgtttcggcctgaagttggtgcatatctctttcaacattcgacatgagatccttaagggccatatcgtctagattttgttgagatgctgctcctggatttggattttgttgtgctgttgtacatactgtaccaccagtaggtgtaggagtacatacagtggccacaataggaggttgagaaagtgtaaccgttggagtagtacaagaaatacttccatccgattgttgtgtacatgtagttgttggtaacgtctgagaaggttgggtagatggcggcgtcgtcgttttttgatctttattaaatttagagataatatcctgaacagcattgctcggcgtcaacgctggaaggagtgaactcgccggcgcatcagtatcttcagacagccaatcaaaaagattagacatatcagatgatgtattagtttgttgtcgtggttttggtgtaggagcagtactactaggtagaagaataggagccgatgtagctgttggaaccggctgtggagttatatgaatagttggttgtagcggttggataggctgtctgctggcggccatcatattatctctagctagttgttctcgcaactgtctttgataatacgactcttgagactttagtcctatttcaatcgcttcatcctttttcgtatccggatccttttcttcagaataatagattgacgactttggtgtagaggattctgccagcctctgtgagaacttgttaaagaagtccatttaaggctttaaaattgaattgcgattataagattaaatggcagacacagacgatattatcgactatgaatccgatgatctcaccgaatacgaggatgatgaagaagaggaagaagatggagagtcactagaaactagtgatatagatcccaaatcttcttataagattgtagaatcagcatccactcatatagaagatgcgcattccaatcttaaacatatagggaatcatatatctgctcttaaacgacgctatactagacgtataagtctatttgaaatagcgggtataatagcagaaagctataacttgcttcaacgaggaagattacctctagtttcagaattttctgacgaaacgatgaagcaaaatatgctacatgtaattatacaagagatagaggagggttcttgtcctatagtcatcgaaaagaacggagaattgttgtcggtaaacgattttgacaaagatggtctaaaattccatctagactatattatcaaaatttggaaacttcaaaaacgatattagaatttatacgaatatcgttctctaaatgtcacaatcaagtctcgcatgttcagcaatttattgtcgtactttatatcgtgttcattaacgatatcttgcaaaatagtaatgattctatcttccttcgatagatattcttcagagattattgtcttatattctttcttgttatcagatatgaatttgataagactttgaacattattgatacccgtctgtttaattttttctacagatattttagttttggcagattctatcgtatctgtcaatagacatccaacatcgacattcgacgtcaattgtctataaatcaacgtataaattttagaaataacattagcgaattgttgtgcgttgatgtcgttattctgaaacagtatgattttaggtagcattttcttaacaaagagaacgtatttattgttactcagttgaacagatgatatatccagattactaacgcatctgattccgtataccaaactttcagaagaaatggtatacaattgtttgtattcattcaatgtctctttttcagaaattagtttagagtcgaatactgcaataattttcaagagatagttttcatcagataagattttatttagtgtagatatgataaaactattgttttgttggagaacttgatacgccgcgttctctgtagtcgacgctctcaaatgggaaacaatctccattatttttttggaatcggatactatatcttcggtatcttgacgcagtctagtatacatagagttaagagagattagagtttgtacattaagcaacatgtctctaaatgtggctacaaacttttcctttttcacatcatctagtttattatataccgatttcacaacggcaccagatttaaggaaccagaatgaaaaactctgataactacaatatttcatcatagttacgattttatcatcttctatagttggtgtaatagcgcatacctttttctccaagactggaaccaacgtcataaaaatgtttaaatcaaaatccatatcaacatctgatgcgctaagaccagtctcgcgttcaagattatctttactaatggtgacgaactcatcgtataaaactctaagtttgtccattatttatttacagatttagttgtttaatttatttgtgctcttccagagttgggatagtatttttctaacgtcggtattatattattaggatctacgttcatatgtatcataatattaatcatccacgttttgataaatctatctttagcttctgaaataacgtatttaaacaaaggagaaaaatatttagctacggcatcagacgcaataacattttttgtaaatgtaacgtatttagacgacagatcttcgttaaaaagttttccatctatgtagaatccatcggttgttaacaccattcccgcgtcagattgaataggagtttgaatagtttgttttggaaatagatccttcaataacttatagttgggtgggaaaaaatcgattttatcactagactctttcttttttactatcattacctcatgaactatttcttgaatgagtatatgtattttctttcctatatcggacgcgttcattggaaaatataccatgtcgttaactataagaatatttttatcctcgtttacaaactgaataatatcagatgtagttcgtaaacgaactatatcatcaccagcacaacatctaactatatgatatccactagtttcctttagccgtttattatcttgttccatattagcagtcattccatcatttaagaaggcgtcaaaaataatagggagaaatgacattttggattctgttacaactttaccaaaattaaggatatacggacttactatctttttctcaacgtcaatttgatgaacacacgatgaaaatgtgcttctatgagattgatcatgtagaaaacaacaagggatacaatatttccgcatatcatgaaatatattaagaaatcccaccttattatatttccccaaaggatccatgcacgtaaacattatgccgttatcattaataaagacttctttctcatcggatctgtaaaagttgttactgatttttttcattccaggatctagataattaataatgatgggttttctattcttattctttgtattttggcatatcctagaccagtaaacagtttccactttggtaaaatcagcagacttttgaacgctattaaacatggcattaatggcaataactaaaaatgtaaaatatttttctatgttaggaatatggtttttcactttaatagatatatggtttttggccaaaatgatagatatttttttatccgaggatagtaaaatattattagtcgccgtctctataaaaatgaagctagtctcgatatccaattttattctagaattgataggagtcgccaaatgtaccttatacgttatatctcccttgatgcgttccatttgtgtatctatatcggacacaagatctgtaaatagttttacgttattaatcatcacggtatcgccgtcgctagataacgctaatgtaccatccaagtcccaaatggagagatttaactgttcatcgtttagaataaaatgattaccggtcatattaataaagtgttcatcgtatctagataacaacgacttataattaatgtccaagtcttgaactcgctgaatgatcttttttaacccagttagttttagattggtacgaaatatattgttaaactttgattctacagtaatgtccaaatctagttgtggaaatacttccatcaacattgtttcaaacttgataatattattatctacatcttcgtacgatccaaattccggaatagatgtatcgcacgctctggccacccagataaccaaaaagtcacacgctccaggatatacattgtataaaaagctatcgttttttagtagggtttttttctgcgtgtatacgaagggattaaaaatagtattatcaacgtaactatattccaaattattcttatgagaatagataataatatcgtccttaatatctaacaaatttcctaaatatccctttaattgagtcattcgaagcgtcaatagaatatgtctcttaactatttccggctgttgtatatttaaatgacttcgtaaaaaataatatatgggcgacttctcatctatgtaatcatatggagtgagatatagggctcgttctacctcctgccccttacccacctgtaataccaattgcggacttactatatatcgcatatttatatcgtggggtaaagtgaaaatctactaccgatgatgtaagtcttacaatgttcgaaccagtaccagatcttaatttggaggcctccgtagaactaggggaggtaaatatagatcaaacaacacctatgataaaggagaatagcggttttatatcccgcagtagacgtctattcgcccatagatctaaggatgatgagagaaaactagcactacgattctttttacaaagactttattttttagatcatagagagattcattatttgttcagatgcgttgacgctgtaaaagacgtcactattaccaaaaaaaataacattatcgtggcgccttatatagcacttttaactatcgcatcaaaaggatgcaaacttacagaaacaatgattgaagcattctttccagaactatataatgaacatagtaagaaatttaaattcaactctcaagtatccatcatccaagaaaaactcggataccagtttggaaactatcacgtttatgattttgaaccgtattactctacagtagctctggctattcgagatgaacattcatctggcatttttaatatccgtcaagagagttatctggtaagttcattatctgaaataacatatagattttatctaattaatctaaaatctgatcttgttcaatggagtgctagtacgggcgctgtaattaatcaaatggtaaatactgtattgattacagtgtatgaaaagttacaactggtcatagaaaatgattcacaatttacatgttcattggctgtggaatcaaaacttccaataaaattacttaaagatagaaatgaattatttacaaaattcattaacgagttaaaaaagaccagttcattcaagataagcaaacgcgataaggatacgctactaaaatattttacttaggactggagttagaatttatagacgactcatttcgtttatcattgttactattattactattactatcattattagtgttggcattattagtattcttcttgtcatcttgttcagaaatatacagcaatgctatacctaatactaaatacattatcatgctcgcaatggctctaacaacaacgaaccaaaatgaatttggtcgtagcttttgttcacaaaaatacataaagaaatgtctacataaatctatggcgccattggctacttgaaatagcgccagtcctcctacagattttaatatagctgtataacatgacatttattcatcatcaaaagagacagagtcaccatctgtcatatttagattttttttcatgtgttcaaagtatcctctactcatttcattataatagtttatcatacttagaattttaggacggatcaatgagtaagacttgactagatcgtcagtagtaatttgtgcatcgtctattctgcatccgcttcgtcgaataatgtatagcatcgctttgagattctccatagctatcaagtctttatacaatgacatggaaatatctgtgaatactttatacttctccaacatcgatgccttaacatcatcgcctactttagcattgaaaatacgttctattgtgtagatggatgtagcaagatttttaaacaacaatgccatcttacacgatgattgcctcaagtctccaatcgtttgtttagaacgattagctacagagtccaatgcttggctgactagcatattattatctttagaaattgtattcttcaatgaggcgtttatcatatctgtgatttcgttagtcatattacagtctgactgggttgtaatgttatccaacatatcacctatggatacggtacacgtaccagcatttgtaataatcctatctaagatgttgtatggcattgcgcagaaaatatcttctcctgtaatatctccactctcgataaatctactcagattattcttaaatgccttattctctggagaaaagatatcagtgtccatcatttcattaatagtatacgcagaaaagataccacgagtatcaattctatccaagatacttatcggttccgagtcacagataatggtttcctctccttcgggagatcctgcatagaaatatctaggacaatagtttctatactgtctgtaactctgataatctctaaagtcactaactgataccatgaaattgagaagatcaaacgctgaagtaattaatttttctgcctcgtttttactacaactagttttcatcaatgtagtgacgatgtattgtttagttacttttggtctaatactgatgatagagatattattgcttcccataatggatcttctagtagtcaccttaaagcccattgatgcgaatagcagatagataaagtcttggtatgactcctttctaatatagtacggactacctttgtcacccaactttatacccacataagccataacaacctctttaatagccgtttcatgaggtttatcagccatgagcctgagtagttggaagaatctcatgaatcccgtctcagaaagtcctatatgcatgatagatttatctttcctgggaaactctcgtatagtcatagatgaaatactctttaaagtttctgaaataagattagtaacagtcttacctccgactactctaggtaacaaacaaactctaataggtgttttctctgcggagataatatcagaaaggatagagcaataagtagtattattgtgattataaagaccgaatacataacaggtagaatttataaacatcatgtcctgaaggtttttagacttgtattcctcgtaatccataccgtcccaaaacatggatttggtaactttgatagccgtagatctttgttccttcgccaacaggttaaagaaattaataaagaatttgttgtttctatttatgtccacaaattgcacgtttggaagcgccacggttacattcactgcagcattttgaggatcgcgagtatgaagtacgatgttattgtttactggtatatctggaaagaaatctaccagtctaggaataagagattgatatcgcatagaaatagtaaagtttataatctcatcatcgaagagcattttgttaccattgtaataaatatccactctgtcatatgtataaatgaagtactgttcaaacatgatgagatgtttatatgttggcatagtagtgagatcgacgtttggtaatggcaatgtattaagattaactccataatgtctagcagcatctgcgatgttataagcgtcgtcaaagcggggtcgatcttgtattgttatatattgtctaacacctataagattatcaaaatcttgtctgcttaatacaccgttaacaatttttgccttgaattcttttattggtgcattaataacatccttatagaggatgttaaacaaataagtgttatcaaagttaagatctggatatttcttttctgctagaacatccattgagtcggagccatctggtttaatataaccaccgataaatctagctctgtattctgtatccgtcaatctaatattaagaaggtgttgagtgaaaggtggaagatcgtaaaagctgtgagtattaatgataggattagtttccgaactaatgttaattggggtattaataatatctatatttccagcgttaagtgtaacattaaacagttttaattcacgtgacgtggtatcaattaaataattaatgcccaatttggatatagcagcctgaagctcatcttgtttagttacggatcctaatgagttattaagcaatatatcgaacggatgaacgaaggttgttttaagttggtcacatactttgtaatctagacatagatgcggaagaacggtagaaactatacgaaataaatattcagagtcctctaattgatcaagagtaactattgacttaataggcatcatttatttagtattaaatgacgaccgtaccagtgacggatatacaaaacgatttaattacagagttttcagaagataattatccatctaacaaaaattatgaaataactcttcgtcaaatgtctattctaactcacgttaacaacgtggtagatagagaacataatgccgccgtagtgtcatctccagaggaaatatcctcacaacttaatgaagatctatttccagatgatgattcaccggccactattatcgaacgagtacaacctcatactactattattgacgatactccacctcctacgtttcgtagagagttattaatatcggaacaacgtcaacaacgagaaaaaagatttaatattacagtatcgaaaaatgctgaagcaataatggaatctagatctatgataacttctatgccaacacaaacaccatccttgggagtagtttatgataaagataaaagaattcagatgttagaggatgaagtggttaatcttagaaatcaacgatctaatacaaaatcatctgataatttagataattttaccaaaatactatttggtaagactccgtacaaatcaacagaagttaataagcgtatagccatcgttaattatgcaaatttgaacgggtcccccttatcagtcgaggacttggatgtttgttcggaggatgaaatagatagaatctataaaacgattaaacaatatcacgaaagtagaaaacgaaaaattatcgtcactaacgtgattattattgtcataaacattatcgagcaggcattgctaaaactcggatttgaagaaatcaaaggactgagtaccgatatcacttcagaaattatcgatgtggagatcggagatgactgcgatgctgtagcatctaaactaggaatcggtaacagtccggttcttaatattgtattgtttatactcaagatattcgttaaacgaattaaaattatttaatttaatacattcccatatccagacaacaatcgtctggattaatctgttcctgtcgtctcataccggacgacatattaatctttttattagtgggcatctttttagatggtttctttttcccagcattaactgagtcgatacctagaagatcgtgattgatctctccgaccattccacgaacttctaattggccgtctctgacggtaccataaactattttaccagcattagtaacagcttggacaatctgaccatccatcgcattgtacgatgtagtagtaactgttgttctacgtctaggagcaccagaagtatttttggagcccttggatgttgatgtagaagaagacgaggattttgattttggtttacatgtaatacattttgaactctttgattttgtatcacatgcgccggcagtcacatctgtttgagaattaagattattgttgcctcctttgacggctgcatctccaccgatttgcgctagtagatttttaagctgtggtgtaatcttattaactgtttcgatataatcatcgtaactgcttctaacggctaaattttttttatccgccatttagaagctaaaaatatttttatttatgcagaagatttaactagattatacaatgaactaatatgatccttttccagattatttacaaacttggtattttttggttctggaggaggcgaatttaaattcggacttggattcggattttgtaagttcttgatcttattatacatcgagtataggatggcgacagtaactgctacacaaataccgatcaaaagaagaataccaatcatttattgacaataacttcactattgatcaagtatgcaatatatcatcttttcactaaataagtagtaataatgattcaacaatgtcgagatatatggacgataataatttagttcatggaaatatcgctatgattggtgtgaatgactccgctaactctgtggggtgcgcagtgctttccccacatagaataaattagcattccgactgtgataataataccaagtataaacgccataatactcaatactttccatgtacgagtgggactggtagacttactaaagtcaataaaggcgaagatacacgaaagaatcaaaagaatgattccagcgattagcacgccggaaaaataatttccaatcataagcatcatgtccatttaactaataaaaattttaaatcgccgaatgaacaaagtggaatataaaccatataaaaacaatagtttgtactgcaaaaataatatctatttttgttttcgaagatatggtaaaattaaatagtagtacacagcatgttataactaacagcagcaacggctcgtaattacttatcatttactagacgaaaaggtggtgggatattttcttgctcaaataatacgaatatatcacccatccattttatgcgatgtttatatactctaatctttaatagatctatagacgacgggtttaccaacaatatagattttatcgattcatctaatttaaacccttccttaaacgtgaatgatctattatctggcataacgatgaccctacctgatgaatcggacaatgtactgggccatgtagaataaattatcaacgaattatcgtctacgaacatttatatcatttgttttaattttaggacgcgaataaatggatataaaatagaaaataacagatattacaaccagtgttatggccgcgcccaaccaggtaggcagttttattttatcttttactacaggttctcctggatgtacgtcaccaacggcggacgtagttctagtacaattagacgtaagttccgcttgggaattttttaacgctaaagagttaacgttaatcgtgcacccaacgtatttacatctagttcgttgaacatcttgattataatataaccattttctatctctagattcgtcagtgcactcatgtaaccaacataccctaggtcctaaatatttatctccggaattagattttggataattcgcgcaccaacaatttctatttcctttatgatcgttacaaaagacgtataatgccgtatccccaaaagtaaaataatcaggacgaataattctaataaactcagaacaatatctcgcatccatatgtttggagcaaatatcggaataagtagacatagccggtttccgttttgcacgtaaccattctaaacaattggggtttccaggatcgtttctacaaaatccagtcatgaaatcgtcacaatgttctgtcttgtaattattattaaatatttttggacagtgtttggtatttgtcttagaacaacattttgccacgctatcactatcgcccaggagataatccttttttataaaatgacatcgttgcccggatgctatataatcagtagcgtgttttaaatccttaatatattcaggagttacctcgttctgataatagattaatgatccaggacgaaatttgaaagaactacatggttctccatgaattaatacatattgtttagcaaattcaggaactataaaactactacaatgatctatcgacataccatctatcaaacaaaacttgggtttaatttctcccggagatgtttcataatagtacgtataactttcttctgcaaacttaacagctctattatattcaggataattaaaacctaattccatatatttgtctcgtatatctgctattcctggtgctattttgattctattaagagtaacagctgcccccattcttaataatcgtcagtatttaaactgttaaatgttggtatatcaacatctaccttatttcccgcagtataaggtttgttgcaggtatactgttcaggaatggttacatttatacttcttctatagtcctgtctttcgatgttcatcacatatgcaaagaacagaataaacaaaataatgtaagaaataatattaaatatctgtgaattcgtaaatacattgattgccataataattacagcagctacaatacacacaatagacattcccacagtgttgccattacctccacgatacatttgagttactaagcaataggtaataactaagctagtaagaggcaatagaaaagatgagataaatatcatcaatatagagattagaggagggctatatagagccaagacgaacaaaatcaaaccgagtaacgttctaacatcattatttttgaagattcccaaataatcattcattcctccataatcgttttgcatcatacctccatctttaggcataaacgattgctgctgttcctctgtaaataaatctttatcaagcactccagcacccgcagagaagtcgtcaagcatattgtaatatcttaaataactcatttatatattaaaaaatgtcactattaaagatggagtataatctttatgccgaactaaaaaaaatgacttgtggtcaacccctaagtctttttaacgaagacggggatttcgtagaagttgaaccgggatcatcctttaagtttctgatacctaagggattttacgcctctccttccgtaaagacgagtctagtattcgagacattaacaacgaccgataataaaatcactagtatcaatccaacaaatgcgccaaagttatatcctcttcaacgcaaagtcgtatctgaagtagtttctaatatgaggaaaatgatcgaatcaaaacgtcctctatacatcactcttcacttggcgtgtggatttggtaagactattaccacgtgttatcttatggctacacacggtagaaaaaccgtcatttgcgtacccaataaaatgttaatacatcaatggaagacacaggtagaggcagtcggattggaacataagatatccatagatggagtaagtagtctattaaaggaactaaagactcaaagtccggatgtattaatagtagtcagtagacatctgacaaacgatgccttttgtaaatatatcaataagcattatgatttgttcatcttggatgaatcacatacgtataatctgatgaacaatacagcagttacaagatttttagcgtattatcctccgatgatgtgttattttttaactgctacacctagaccatctaaccgaatttattgtaacagtattattaatattgccaagttatccaatctaaaaaaaactatctatgcagtagatagtttttttgagccatattccacagataatattagacatatggtaaaacgactagatggaccatctaataaatatcatatatataccgagaagttattatctgtagacgagcctagaaatcaacttattcttgataccctggtagaagaattcaagtcaggaactattaatcgcattttagttattactaaactacgtgaacatatggtattattctacaaacgattattagattttttcggaccagaggttgtatttataggagacgcccaaaatagacgtactccagatatggtcaaatcaatcaaggaactaaatagatttatattcgtatccaccttattttattccggtactggtttagatattcctagtttggattcgttgttcatttgctcggcagtaatcaacaatatgcaaatagagcaattactagggagggtatgtcgagaaacagaactattagataggacggtatatgtatttcctaacacatccatcaaagaaataaagtacatgataggaaatttcatgcaacgaattattagtctgtctgtagataaactaggatttaaacaaaaaagttatcggaaacatcaagaatccgatcccacttctgcatgtacaacatcatccagagaagaacgtgtattaaatagaatatttaactcgcaaaatcgttaagaagtttaagcgacgatccgcatgctgcgcaggccagtgtattacccctcatagtattaatataatccaatgatacttttgtgatgtcggaaatcttaaccaatttagactgacaggcagaacacgtcatgcaatcatcatcgtcatcgataactgtagtcttgggcttctttttgcgactcttcattccggaacgcacattggtgctatccatttaggtagtaaaaaataagtcagaatatgccctataacacgatcgtgcaaaacctggtatatcgtctctatctttatcacaatatagtgtatcgacatttttattattattgacctcgtttatcttggaacatggaatgggaacatttttgttatcaacggccatctttgccttaattccagatgttgtaaaattataactaaacagtctatcatcgacacaaatgaaattcttgtttagacgtttgtagtttacgtatgcggctcgttcgcgtctcattttttcagatattgcaggtactataatattaaaaataagaatgaaataacataggattaaaaataaagttatcatgacttctagcgctgatttaactaacttaaaagaattacttagtctgtacaaaagtttgagattttcagattctgcggctatagaaaagtataattctttggtagaatggggaacatctacttactggaaaataggcgtgcaaaaggtagctaatgtcgagacgtcaatatctgattattatgatgaggtaaaaaataaaccgtttaatattgatccgggctattacattttcttaccggtatattttgggagcgtctttatttattcgaagggtaaaaatatggtagaacttggatctggaaactcttttcaaataccagatgatatgcgaagtgcgtgtaacaaagtattagacagcgataacggaatagactttctgagatttgttttgttaaacaatagatggataatggaagatgctatatcaaaatatcagtctccagttaatatatttaaactagctagtgagtacggattaaacatacccaaatatttagaaattgaaatagaggaagacacattatttgacgacgagttatactctattatagaacgctctttcgatgataaatttccaaaaatatccatatcgtatattaagttgggagaacttagacggcaagttgtagactttttcaaattctcattcatgtatattgagtccatcaaggtagatcgtataggagataatatttttattcctagcgttataacaaaatcaggaaaaaagatattagtaaaagatgtagaccatttaatacgatccaaggttagagaacatacatttgtaaaagtaaaaaagaaaaacacattttccattttatacgactatgatggaaacggaacagaaactagaggagaagtaataaaacgaattatagacactataggacgagactattatgttaacggaaagtatttctctaaggttggtagtgcaggcttaaagcaattgactaataaattagatattaatgagtgcgcaactgtcgatgagttagttgatgagattaataaatccggaactgtaaaacgaaaaataaaaaaccaatcagcatttgatttaagcagagaatgtttgggatatccagaagcggattttataacgttagttaataacatgcggttcaaaatagaaaattgtaaggttgtaaatttcaatattgaaaatactaattgtttaaataacccgagtattgaaactatatatggaaactttaaccagttcgtctcaatctttaatgtcgtcaccgatgtcaaaaaaagattattcgagtgaaataatatgcgcctttgatataggtgcaaaaaatcctgccagaactgttttagaagtcaaggataactccgttagggtattggatatatcaaaattagactggagttctgattgggaaaggcgcatagctaaagatttgtcacaatatgaatacactacagttcttctagaacgtcagcctagaaggtcgccgtatgttaaatttatctattttattaaaggctttttatatcatacatcggctgccaaagttatttgcgtctcgcctgtcatgtctggtaattcatatagagatcgaaaaaagagatcggtcgaagcatttcttgattggatggacacattcggattgcgagactccgttccggatagacgcaaattagacgatgtagcggatagtttcaatttggctatgagatacgtattagataaatggaatactaattatacaccttataataggtgtaaatctagaaattacataaaaaaaatgtaataacgttagtaacgccattatggataatctatttacctttctacatgaaatagaagatagatatgccagaactatttttaactttcatctaataagttgcgatgaaataggagatatatatggtcttatgaaagaacgcatttcctcagaggatatgtttgataatatagtgtataataaagatatacatcctgccattaagaaactagtgtattgcgacatccaacttactaaacacattattaatcagaatacgtatccggtatttaacgattcttcacaagtgaaatgttgtcattatttcgacataaactcagataatagcaatattagctctcgtacagtagagatatttgagagggaaaagtcatctcttgtatcatatattaaaactaccaataagaagagaaaggtcaattacggcgaaataaagaaaactgttcatggaggcactaatgcaaattacttttccggtaaaaagtctgacgagtatctgagtactacagttagatccaacattaatcaaccttggatcaaaaccatctctaagaggatgagagttgatatcattaatcactctatagtaacgcgtggaaaaagctctatattacaaactatagaaattatttttactaatagaacatgtgtgaaaatattcaaggattctactatgcacattattctatccaaggacaaggatgaaaaggggtgtatacacatgattgacaaattattctatgtctattataatttatttctgttgttcgaagatatcatccaaaacgagtactttaaagaagtagctaatgttgtaaaccacgtactcacggctacggcattagatgagaaattattcctaattaagaaaatggctgaacacgatgtttatggagttagcaatttcaaaatagggatgtttaacctgacatttattaagtcgttggatcataccgttttcccctctctgttagatgaggatagcaaaataaagttttttaaggggaaaaagctcaatattgtagcattacgatctctggaggattgtataaattacgtgactaaatccgagaatatgatagaaatgatgaaggaaagatcgactattttaaatagcatagatatagaaacggaatcggtagatcgtctaaaagaattgcttctaaaatgaaaaaaaacactaattcagaaatggatcaacgactagggtataagtttttggtgcctgatcctaaagccggagttttttatagaccgttacatttccaatatgtatcgtattctaattttatattgcatcgattgcatgaaatcttgaccgtcaagcggccactcttatcgtttaagaataatacagaacgaattatgatagaaattagcaatgttaaagtgactcctccagattactcacctataatcgcgagtattaaaggtaagagttatgacgcattagccacgttcactgtaaatatctttaaagaggtaatgaccaaagagggtatatccatcactaaaataagtagttatgagggaaaagattctcatttgataaaaattccgctactaataggatacgggaataaaaatccacttgatacagccaagtatcttgttcctaatgtcataggtggagtctttatcaataaacaatctgtcgaaaaagtaggaattaatctagtagaaaagattacaacatggccaaaatttagggttgttaagccaaactcattcactttctcgttttcctccgtatcccctcctaatgtattaccgacaagatatcgccattacaagatatctctggatatatcacaattggaagcgttgaatatatcatcgacaaagacatttataacggtcaatattgttttgctgtctcaatatttatctagagtgagtctagaattcattagacgtagtttatcatacgatatgcctccagaagttgtctatctagtaaacgcgataatagatagtgctaaacgaattactgaatctattactgactttaatattgatacatacattaatgacctggtggaagctgaacacattaaacaaaaatctcagttaacgatcaacgagttcaaatatgaaatgctgcataactttttacctcatatgaactatacacccgatcaactaaagggattttatatgatatctttactaagaaagtttctctactgtatcttccacacttctagatatccagatagagattcgatggtttgtcatcgcatcctaacgtacggcaaatattttgagacgttggcacatgatgaattagagaattacataggcaacatccgaaacgatatcatgaacaatcacaagaacagaggcacttacgcggtaaacattcatgtactaacaactcccggacttaatcacgcgttttctagcttattgagtggaaagttcaaaaagtcagacggtagttatcgaacacatcctcactattcatggatgcagaatatttctattcctaggagtgttggattttatccggatcaagtaaagatttcaaagatgttttctgtcagaaaataccatccaagtcaatatctttacttttgttcatcagacgttccggaaagaggtcctcaggtaggtttagtatctcaattgtctgtcttgagttccattacaaatatactaacgtctgagtatttggatttggaaaagaaaatttgtgagtatatcagatcatattataaagatgatataagttactttgaaacaggatttccaatcactatagaaaatgctctagtcgcatctcttaatccaaatatgatatgtgattttgtaactgactttagacgtagaaaacggatgggattcttcggtaacttggaggtaggtattactttagttagggatcacatgaatgaaattcgcattaatattggagcgggaagattagtcagaccattcttggttgtggataacggagagctcatgatggatgtgtgtccggagttagaaagcagattagacgacatgacattctctgacattcagaaagagtttccgcatgtcatcgaaatggtagatatagaacaatttacttttagtaacgtatgtgaatcggttcaaaaatttagaatgatgtcaaaggatgaaagaaagcaatacgatttatgtgactttcctgccgaatttagagatggatatgtagcatcttcattagtgggaatcaatcacaattctggacccagagctattcttggatgtgctcaagctaaacaagctatctcttgtctgagctcggatatacgaaataaaatagacaatggaattcatttgatgtatccagagaggccaatcgtgattagtaaggctttagaaacttcaaagattgcggctaattgcttcggccaacatgttactatagcattaatgtcgtacaaaggtatcaatcaagaggatggaattatcatcaaaaaacaatttattcagagaggcggtctcgatattgttacagccaagaaacatcaagtagaaattccattggaaaactttaataacaaagaaagagataggtctaacgcctattcaaaattagaaagtaatggattagttagactgaatgctttcttggaatccggagacgctatggcacgaaatatctcatcaagaactcttgaagatgattttgctagagataatcagattagcttcgatgtttccgagaaatataccgatatgtacaaatctcgcgttgaacgagtacaagtagaacttactgacaaagttaaggtacgagtattaaccatgaaagaaagaagacccattctaggagacaaatttaccactagaacgagtcaaaagggaacagtcgcgtatgtcgcggatgaaacggaacttccatacgacgaaaatggtatcacaccagatgtcattattaattctacatccatcttctctagaaaaactatatctatgttgatagaagttattttaacagccgcatattctgctaagccgtacaacaataagggagaaaaccgacctgtctgttttcctagtagtaacgaaacatccatcgatacatatatgcaattcgctaaacaatgttatgagcattcaaatccgaaattgtccgatgaagaattatcggataaaatcttttgtgaaaagattctctatgatcctgaaacggataagccttatgcatccaaagtattttttggaccaatttattacttgcgtctgaggcatttaactcaggacaaggcaaccgttagatgtagaggtaaaaagacgaagctcattagacaggcgaatgagggacgaaaacgtggaggaggtatcaagttcggagaaatggagagagactgtttaatagcgcatggtgcagccaatactattacagaagttttgaaagattcggaagaagattatcaagatgtgtatgtttgtgaaaattgtggagacatagcagcacaaatcaagggtattaatacatgtcttagatgttcaaaacttaatctctctcctctcttaacaaaaattgataccacgcacgtatctaaagtatttcttactcaaatgaacgccagaggcgtaaaagtcaaattagatttcgaacgaaggcctccttcgttttataaaccattagataaagttgatctcaagccgtcttttctggtgtaatattctagtttggtagtagatacatatcaatatcatcaaattcgagatccgaattataaaatgggcgtggattgttaactatagaatcggacgtctgatattcgaaaatctgtggagtttcaggttttggtggaggtgtaactgctacttgggatactgaagtctgatattcagaaagctgtggatgttctggttcggcatccaccgatggtgtcacatcactaatcggttcggtaacgtctgtggatggaggtgctacttctacagaacctgtagcctcagttgtcaacggagatacatttttaatgcgagaaaatgtataatttggtaatggtttcttatgtggatctgaagaagaggtaagatatctactagaaagataccgatcacgttctagttctcttttgtagaacttaactttttctttctccgcatctagttgatattccaacctcttcacgttactacgttcagattccaattcacgttcgcatgggttacctccgcagtttttacgagcgatttcacgttcagccttcatgcgtctctccctctctctatcgagtttatcagagcagtctttctgaaggcgatcgaactccataaatttctccaacgctttgattgtttccatagatttccgaagttcagcttttaggactgtgattctttttctttcgaattcacagctggatgtacaaccgtttccattaccgccatctctaagtttcttttctagatcggcaacatttcatccccatgccttttacattcctcgagtctactgtcgtcgaaatatcgttccagctccttttcgacatcaataactttagcacgttgtctctcaagctctcttttgtagttatctgattccctggcacgtttaagatcttcatgcaattgagtcagctcttaacttcctctcttgcttcttcgtcatagtacgcgcaatcactgtgagatccattgttaccacgtctacactcggcgagctcgcgtttaagagattcaatttcccgtttgtattggtccatgtttccattgctaccaccattagatttacaggctgctagttgtcgttcgagatcagaaatacgggttttcttggaattgatttcgtcgatgtacttggcatcgaaacacttattaagttctttttccaattctacgattttatttctttcgcgagtcaattccctcctgtagtaactatctgttttgtcagattcacgctctctacgtagactttcttgcaagttactaatttgttccctagcacgtccgagtttagttttatatgctgaatagagttctgattcatcctttgagcagatctctagcgatcgtttaagattcctaattctagtctttagcctatttacctcctcagaagatgttccgttaccgttgcgtttacactcgttaagctgtctatcaagatccatgattctatctctaagacgttgcatctctctttccatatcagcattgctttcattattacgtctgcagtcactcaactgtctttcaatatctgagattctatctctaagacgtcgcatctctctctgtttcggcattggtttcattattacgtttacagtcgttcaactgtctttcaagatctgatattctagattggagtctgctaatctctgtagcattttcacggcattcactcagttgtctttcaagatctgaaattttagattggagtctgctaatctctgtaagatttcctcctccgctctcgatgcagtcggtcaacttattctctagttctctaatacgcgaacgcagtgcatcaacttcttgcgtgtcttcctggttgcgtgtacattcatcgagatctctaacgcgtcgtcgttcttcctcaagttctctgcgtactacagaaagcgtgtccctatcttgttgatatttagcaatttctgattctagagtactgattttgcttacgtagttactaatagttgtcttggccttatcaagatcctccttgtatttgtcgcattccttgatatccctacgaagtctggacagttcccattcgacattacgacgtttatcgatttcagctcggagatcgtcatcgcgttgttttagccacatacgactgagttcaagttctcgttgacaagatccatctacttttccattcctaatagtatccagttccttttctagttctgaacgcatttctcgttccctatcaagcgattctctcaattctcggatagtcttcttatcaatttctaataaatctgaaccatcatctgtcccattttgaatatccctgtgttctttgatctcttttgtaagtcggtcgattctttcggttttataaacagaatccctttccaaagtcctaatcttactgagtttatcactaagttctgcattcaattcggtgagttttctcttggcttcttccaactctgttttaaactctccactatttccgcattcttcctcgcatttatctaaccattcaattagtttattaataactagttggtaatcagcgattcctatagccgttcttgtaattgtgggaacataattaggatcttctaatggattgtatggcttgatagcatcatctttatcattattagggggatggacaaccttaattggttggtcctcatctcctccagtagcgtgtggttcttcaataccagtgttagtaataggcttaggcaaatgcttgtcgtacgcgggcacttcctcatccatcaagtatttataatcgggttctacttcagaatattcttttctaagagacgcgacttcgggagttagtagaagaactctgtttctgtatctatcaacgctggaatcaatactcaagttaaggatagcgaatacctcatcgtcatcatccgtatcttctgaaacaccatcatatgacatttcatgaagtctaacgtattgataaatagaatcagatttagtattaaacagatccttaacctttttagtaaacgcatatgtatattttagatctccagatttcataatatgatcacatgccttaaatgtcagtgcttccatgatataatctggaacactaatgggtgacgaaaaagatacagcaccatatgctacgttgataaataaatctgaaccactaagtagataatgattaatgttaagaaagaggaaatattcagtgtataggtatgtcttggcgtcatatcttgtactaaacacgctaaacagtttgttaatgtgatcaatttccaatagattaattagagcagcgggaataccaacaaacatattaccacatccgtattttctatgaatatcacatatcatgttaaaaaatcttgatagaagagcgaatatctcgtctgacttaatgagtcgtagttcagcagcaacataagtcataactgtaaatagaacatactttcctgtagtgttgattctagactccacatcaacaccattattaaaaatagttttatatacatctttaatctgctctccgttaatcgtcgaacgttctagtatacggaaacactttgatttcttatctgtagttaatgacttagtgatatcacgaagaatattacgaattacatttcttgtttttcttgagagacctgattcagaactcaactcatcgttccatagtttttctacctcagtggcgaaatctttggagtgcttggtacatttttcaataaggttcgtgacctccatttattataaaaaatttattcaaaacttaactacaatcgggtaattataagatcgtagatctcccatgtggcggaatactaccatctatcgcatgtggatggacagtaggtaatggccatgggaacagtaatgtttgcatatttatctttcttgctagtattactgcatattgtcccaatgtttcgatgtgatgttctaacctatcaactgccgctgtatcacaacaatagtgtccgatgaaattaagattatgatccaatgtgtttaatatatgattatcaagtcttatacgatccgcgtcttttttgacaggatcaggttcttctacaggaagaagtttcggcctcttatgatattcatgtctgggaaacggtggtctagggtgaggctccggtatcggagtgggttttggattataatcatcatcgtctatgacatcatcttcgacttcgatatttattttgctatcttgatgatgtcctgtatcagttgcattttcagcactcgactgaatattagcgcattcattgtctattattaccatatttctaaacccaaaatgtatgtgttgaacatcagtactatcgttgatgagtcttatagcatgaattcgcttatcgttatcgggtttatcttctgtcaccttagcaattccttttttattaaactctacataatcatatccatttctattgtttgttctaatataaacgagtatagcatcattgctaaatttttcaatagtatcaaaaacagaatatcctaaaccatataatatatattcaggaacactcaaactaaatgtccaggattctcctaaatacgtaaactttaatagtgcgaaatcattcaaaaatctaccacttatagatagatagtacataaatgcgtatagtagtctacctatctctttattatgaaaaccggcattacgatcatatatgtcgtgatatacctgtgatccgtttacgttaaaccataaatacatgggtgatcctataaacatgaatttatttctaattctcagagctatagttaattgaccgtgtaatatttgcttacatgcatacttgatacgcttattaataagatttttatcattgctcgttatttcagaatcgtatatataaggagtaccatcgtgattcttaccagatattatacaaaatactatatataaaatatattgacccacgttagtaatcatataaatgtttaacgttttaaattttgtattcaatgatccattatcatacgctatcatggtcttgtaatattcattctttaaaatataatattgtgttagccattgcattggagctcctaatggagattttctattctcatccattttaggataggctttcataaagtccctaataacttcgtgaataatgtttctatgttttctactgatgcatgtatttgcttcgatttttttatcccatgtttcatctatcatagatttaaacgcagtaatgctcgcaacattaacatcttgaaccgttggtacaattccgttccataaatttataatgttcgccatttatataactcattttttgaatatacttttaattaacaaaagagttaagttactcatatggacgccgtccagtctgaacatcaatctttttagccagagatatcatagccgctcttagagtttcagcgtgattttccaacctaaatagaacttcatcgttgcgtttacaacacttttctatttgttcaaactttgttgttacattagtaatctttttttccaaattagttagccgttgtttgagagtttcctcattgtcgtcttcatcggctttaacaattgcttcgcgtttagcctctggctttttagcagcctttgtagaaaaaaattcagttgctggaattgcaagatcgtcatctccggggaaaagagttccgtccatttaaagtacagattttagaaactgacactctgcgttatttatatttggtacaacacatggattataaatattgatgttaataacatcagaaaatgtaaagtctatacattgttgcatcgtgttaaattttctaatggatctagtattattgggtccaacttctgcctgaaatccaaatatggaagcggatacaaaaccgtttcctggataaaccacacatctccacttttgctttacatcagaaattgtgtcgttgacatcttgaactctcctatctaatgccggtgttccacctatagattttgaatattcgaatgctgcatgagtagcattaaattccttaatattgccataattttcatatattgagtaaccctggataaaaagtaaacacaccgcagccgtcgctaccacaataaaaaaaattgatagagagttcatttataatctattagaagctgacaaaatttttttacacgcatcagacaatgctttaataaatagttcaacatctacttttgtcatatcgaaccgatggtatgattctaacctagaattacatccgaaaaagttgactatgttcatagtcattaagtcattaacaaacaacattccagactctggattataagacgatactgtttcgtcacaattacctaccttaatcatgtgattatgaatattggctattagagcaccttctaagaaatctataatatctttgaaacacgatttaaaatcaaaccacgaatatacttctacgaagaaagttagtttacccataggagaaataactataaatggagatctaaatacaaaatccggatctatgatagttttaacattattatattctctattaaatacctccacatctaaaaatgttaattttgaaactatgtcttcgtttattaccgtacctgaactaaacgctataagctctattgtttgagaactctttaaacgatattcttgaaatacatgtaacaaagtttcctttaactcggtcggtttatctaccatagttacagaatttgtatccttatctataatataataatcaaaatcgtataaagttatataattatcgcgttcagattgtgatcttttcaaatagactaaaaaccccatttctctagtaagtatcttatgtatatgtttgtaaaatatcttcatggtgggaatatgctctaccgcagttagccattcctcattgacagcggtagatgtattagacaaaactattccaatgtttaacaagggccattttacgagattattaaatccttgtttgataaatgtagccaatgagggttcgagttcaacgacgattgaattctcttcccgcggatgctgcatgatgaacgacgggatgttgttcgattgatttggaattctttttcgactttttgtttatattaaatattttaaaatttatagcggatagcaattcatgtaccacggataatgtagacgcgtattgcgcatcgatatctttattattagataaatttatcaataaatgtgagaagtttgcctcgttaaggtcttccatttaaatattatataaacatttgtgtttgtatcttattcgtcttttatggaatagttttttactagtaaagctgcaattacacactttgtccgtaaaacataaatataaacaccagcttttatcaatcgttccaaaaagtcgacggcggacatttttaacatggcatctattttaaatacacttaggtttttggaaaaaacatcattttataattgtaacgattcaataactaaagaaaagattaagattaaacataagggaatgtcatttgtattttataagccaaagcattctaccgttgttaaatacttgtctggaggaggtatatatcatgatgatttggttgtattggggaaggtaacaattaataatctaaagatgatgctattttacatggatttatcatatcatggagtgacaagtagtggagcaatttacaaattgggatcgtctatcgatagactttctctaaataggactattgttacaaaagttaataattatgatgatacattttttgacgacgatgattgatcgctattgcacaattttgtttttgtactttctaatatagtgtttaggttctttttcatatgagaatattgatttactaaaatatctatgtttaacttttgttctatgacgtccttatcggcggtatcggtacatatacgtaattcaccttcacaaaatacggagtcttcgataataatagccaatcgattattggatctagctgtctgtatcatattcaacatgtttaatatatcctttcgtttcccctttacaggcatcgatcgtagcatattttccgcgtctgatatggaaatgttaaaactacaaaaatgcgtaatgttagcccgtcctaatattggtacgtgtctataagtttggcatagtagaataatagacgtgtttaaatgccttccaaagtttaagaattctattagagtattgcattttgatagtttatcgcctacatcatcaaaaataagtaaaaagtgtgctgattttttatgattttgtgcgacagcaatacatttttctatgttacttttagttcgtatcagattatattctagagattcctgactactaacgaaattaatatgatttggccaaatgtatccatcataatctgggttataaacgggtgtaaacaagaatatatgtttatattttttaactagtgtagaaaacagagatagtaaatagatagtttttccagatccagatcctcctgttaaaaccattctaaacggcatttttaataaattttctcttgaaaattgtttttcttggaaacaattcataattatatttacagttactaaattaatttgataataaatcaaaatatggaaaactaaggttgttagtagggaggagaacaaagaaggcacatcgtgatataaataacatttattatcatgatgacaccagaaaacgacgaagagcagacatctgtgttctccgctactgtttacggagacaaaattcagggaaagaataaacgcaaacgcgtgattggtctatgtattagaatatctatggttatttcactactatctatgattaccatgtccgcgtttctcatagtgcgcctaaatcaatgcatgtctgctaacgaggctgctattactgacgccgctgttgccgttgctgctgcatcatctactcatagaaaggttgcgtctagcactacacaatatgatcacaaagaaagctgtaatggtttatattaccagggttcttgttatatattacattcagactaccagttattctcggatgctaaagcaaattgcactgcggaatcatcaacactacccaataaatccgatgtcttgactacctggctcattgattatgttgaggatacatggggatctgatggtaatccaattacaaaaactacatccgattatcaagattctgatgtatcacaagaagttagaaagtatttttgtgttaaaacaatgaactaatatttatttttgtacattaataaatgaaatcgcttaatagacaaactgtaagtaggtttaagaagttgtcggtgccggccgctataatgatgatactctcaaccattattagtggcataggaacatttctgcattacaaagaagaactgatgcctagtgcttgcgccaatggatggatacaatacgataaacattgttatttagatactaacattaaaatgtctacagataatgcggtttatcagtgtcgtaaattacgagctagattgcctagacctgatactagacatctgagagtattgtttagtattttttataaagattattgggtaagtttaaaaaagaccaatgataaatggttagatattaataatgataaagatatagatattagtaaattaacaaattttaaacaactaaacagtacgacggatgctgaagcgtgttatatatacaagtctggaaaactggttaaaacagtatgtaaaagtactcaatctgtactatgtgttaaaaaattctacaagtgacaacaaaaaatgaattaataataagtcgttaacgtacgccgccatggacgccgcgtttgttattactccaatgggtgtgttgactataacagatacattgtatgatgatctcgatatctcaatcatggactttataggaccatacattataggtaacataaaaactgtccaaatagatgtacgggatataaaatattccgacatgcaaaaatgctactttagctataagggtaaaatagttcctcaggattctaatgatttggctagattcaacatttatagcatttgtgccgcatacagatcaaaaaataccatcatcatagcatgcgactatgatatcatgttagatatagaagataaacatcagccattttatctattcccatctattgatgtttttaacgctacaatcatagaagcgtataacctgtatacagctggagattatcatctaatcatcaatccttcagataatctgaaaatgaaattgtcgtttaattcttcattctgcatatcagacggcaatggatggatcataattgatgggaaatgcaatagtaattttttatcataaaagttgtaaagtaaataataaaacaataaatattgaactagtagtacgtatattgagcaatcagaaatgatgctggtacctcttatcacggtgaccgtagttgcgggaacaatattagtatgttatatattatatatttgtaggaaaaagatacgtactgtctataatgacaataaaattatcatgacaaaattaaaaaagataaagagttctaattccagcaaatctagtaaatcaactgatagcgaatcagactgggaggatcactgtagtgctatggaacaaaacaatgacgtagataatatttctaggaatgagatattggacgatgatagcttcgctggtagtttaatatgggataacgaatccaatgttatggcgcctagcacagaacacatttacgatagtgttgctggaagcacgctgctaataaataatgatcgtaatgaacagactatttatcagaacactacagtagtaattaatgaaacggagactgttgaagtacttaatgaagataccaaacagaatcctaactattcatccaatcctttcgtaaattataataaaaccagtatttgtagcaagtcaaatccgtttattacagaacttaacaataaatttagtgagaataatccgtttagacgagcacatagcgatgattatcttaataagcaagaacaagatcatgaacacgatgatatagaatcatcggtcgtatcattggtgtgattagtttcctttttataaaattgaagtaatatttagtattattgctgccgtcacgttgtacaaatggagatattccctgtattcggcatttctaaaattagcaattttattgctaataatgactgtagatattatatagatacagaacatcaaaaaattatatctgatgagatcaatagacagatggatgaaacggtacttcttaccaacatcttaagcgtagaagttgtaaatgacaatgagatgtaccatcttattcctcatagattatcgacgattatactctgtattagttctgtcggaggatgtgttatctctatagataatgacatcaatggcaaaaatattctaacctttcccattgatcatgctgtaatcatatccccactgagtaaatgtgtcgtagttagcaagggtcctacaaccatattggttgttaaagcggatatacctagcaaacgattggtaacatcgtttacaaacgacatactatatgtaaacaatctgtcactgattaattatttgccgttgtctgtattcattattagacgagtcaccgactatttggatagacacatatgcgatcagatatttgctaataataagtggtattcccttataaccatcgacgataagcaatatcctattccatcaaactgtataggtatgtcctctgccaagtacataaattctagcatcgagcaagatactttaatccatgtttgtaacctcgagcatccgttcgactcagtatacaaaaaaatgcagtcgtacaattctctacctatcaaggaacaaatattgtacggtagaattgataatataaatatgagcattagtatttctgtggattaatagatttctagtatggggatcattaatcatctctaatctctaaatacctcataaaacgaaaaaaaagctattatcaaatactgtacggaatggattcattctcttctctttttatgaaactctgttgtatatctactgataaaactggaagcaaaaaatctgatagaaagaataagaataagatcaaggattatatggaacacgattattataaaataacaatagttcctggttcctcttccacgtctactagctcgtggtattatacacatgcctagtaatagtctctttgcgttgacggaaagcagactagaaataacaggctaaaatgttcagacaccataatagttcccaacccagataataacagagttccatcaacacattcctttaaactcaatcccaaacccaaaaccgttaaaatgtatccggccaattgatagtagataatgaggtgtacagcgcatgataatttacacagtaaccaaaatgaaaatactttagtaattataagaaatatagacggtaatgtcatcatcaacaatccgataatatgcctgagagtaaacattgacggataaaacaaaaatgctccgcataactctatcatggcaataacacaaccaaatacttgtaagattcctaaattagtagaaaatacaacgaatatcgatgtataagtgatctcgagaaataataagaataaagtaatgcccgtaaagataaacatcaacattgtttggtaatcattaaaccaattagtatgaagttgaactaatttcacagtagattttattccagtgttatcctcgcatgtataagtacctggtaagatatctttatattccataatcaatgagacatcactatctgataacgaatgaagtctagcactagtatgccatttacttaatattgtcgtcttggaagttttattataagttaaaatatcatggttatccaatttccatctaatatactttgtcggattatctatagtacacggaataatgatggtatcattacatgctgtatactctatggtctttgtagttgttataacaaccaacgtatagaggtatatcaacgatattctaactcttgacattttttatttatttaaaatgatacctttgttatttattttattctattttgctaacggtattgaatggcataagtttgaaacgagtgaagaaataatttctacttacttattagacgacgtattatacacgggtgttaatggggcggtatacacattttcaaataataaactaaacaaaactggtttaactaataataattatataacaacatctataaaagtagaggatgcggataaggatacattagtatgcggaaccaataacggaaatcccaaatgttggaaaatagacggttcagacgacccaaaacatagaggtagaggatacgctccttatcaaaatagcaaagtaacgataatcagtcacaacggatgtgtactatctgacataaacatatcaaaagaaggaattaaacgatggagaagatttgacggaccatgtggttatgatttattcacggcggataacgtaattccaaaagatggtttacgaggagcattcgtcgataaagacggtacttatgacaaagtttacattcttttcactgatactatcggctcaaagagaattgtcaaaattccgtatatagcacaaatgtgcctaaacgacgaaggtggtccatcatcattgtctagtcatagatggtcgacgtttctcaaagtcgaattagaatgtgatatcgacggaagaagttatagacaaattattcattctagaactataaaaacagataatgatacgatactatatgtattcttcgatagtccttattccaagtccgcattatgtacctattctatgaataccattaaacaatctttttctacgtcaaaattggaaggatatacaaagcaattgccgtctccagctcctggtatatgtttaccagctggaaaagttgttccacataccacgtttgaagtcatagaacaatataatgtactagatgatattataaagcctttatctaaccaacctatcttcgaaggaccgtctggtgttaaatggttcgatataaaggagaaggaaaatgaacatcgggaatatagaatatacttcataaaagaaaattctatatattcgttcgatacaaaatctaaacaaactcgtagctcgcaagtcgatgcgcgactattttcagtaatggtaactgcgaaaccgttatttatagcagatatagggataggagtaggaatgccacaaatgaaaaaaatacttaaaatgtaatcttaatcgagtacaccacacgacaatgaacaaacataagacagattatgctggttatgcttgctgcgtaatatgcggtctaattgtcggaattatttttacagcgacactattaaaagttgtagaacgtaaattagttcatacaccattaatagataaaacgataaaagatgcatatattagagaagattgtcctactgactggataagctataataataaatgtatccatttatctactgatcgaaaaacctgggaggaaggacgtaatgcatgcaaagctctaaattcaaattcggatctaattaagatagagactccaaacgagttaagttttttaagaagccttagacgaggctattgggtaggagaatccgaaatattaaaccagacaaccccatataattttatagctaagaatgccacgaagaatggaactaaaaaacggaaatatatttgtagcacaacgaatactcccaaactgcattcgtgttacactatataacaattacactacatttttatcataccactacttcggttagatgttttagaaaaaaataaatatcgccgtaccgttcttgtttttataaaaataacaattaacaattatcaaattttttctttaatattttacgtggttgaccattcttggtggtaaaataatctcttagtgttggaatggaatgctgtttaatgtttccacactcatcgtatattttgacgtatgtagtcacatcgtttacgcaatagtcagactgtagttctatcatgcttcctacatcagaaggaggaacagttttaaagtctcttggttttaatctattaccgttagttttcatgaaatcctttgttttatccacttcacattttaaataaatgtccactatacattcttttgttaattttactagatcgtcatgggtcatagaatttataggttccgtagtccatggatccaaactagcaaacttcgcgtatacggtatcgcgattagtgtatacaccaactgtatgaaaattaagaaaacagtttaataaatcaacagaaatatttaatcctccgtttgatacagatgcgccatatttatggatttcggattcacacgttgtttgtctgaggtgttcgtctagtgttgcttctacgtaaacttcgattcccatatattctttattgtcagaatcgcataccgatttatcatcatacactgtttgaaaactaaatggtatacacatcaaaataataaataataacgagtacattctgcaatattgttatcgtaattggaaaaatagtgttcgagtgagttggattatgtgagtattggattgtatattttattttatattttgtaataagaataaaatgctaatgtcaagtttattccaatagatgtcttattaaaaacatatataataaataacaatggctgaatggcataaaattatcgaggatatctcaaaaaataataagttcgaggatgccgccatcgttgattacaagactacaaagaatgttctagctgctattcctaacagaacatttgccaagattaatccgggtgaaattattcctctcatcactaatcgtaatattctaaaacctcttattggtcagaaatattgtattgtatatactaactctctaatggatgagaacacgtatgctatggagttgcttactgggtacgcccctgtatctccgatcgttatagcgagaactcataccgcacttatatttttgatgggtaagccaacaacatccagacgtgacgtgtatagaacgtgtagagatcacgctacccgtgtacgtgcaactggtaattaaaataaaaagtaatattcatatgtagtgtcaattttaaatgatgatgatgaaatggataatatccatattgacgatgtcaataatgccggtattggcatacagttcatcgatttttagatttcattcagaggatgtggaattatgttatgggcatttgtattttgataggatctataatgtagtaaatataaaatataatccgcatattccatatagatataattttattaatcgcacgttaaccgtagatgaactagacgataatgtcttttttacacatggttattttttaaaacacaaatatggttcacttaatcctagtttgattgtctcattatcaggaaacttaaaatataatgatatacaatgctcagtaaatgtatcgtgtctcattaaaaatttggcaacgagtacatctactatattaacatctaaacataagacttattctctacatcggtccacgtgtattactataataggatacgattctattatatggtataaagatataaatgacaagtataatgacatctatgattttactgcaatatgtatgctaatagcgtctacattgatagtgaccatatacgtgtttaaaaaaataaaaatgaactcttaattatgctatgctattagaaatggataaaatcaaaattacggttgattcaaaaattggtaatgttgttaccatatcgtataacttggaaaagataactattgatgtcacacctaaaaagaaaaaagaaaaggatgtattattagcgcaatcagttgctgtcgaagaggcaaaagatgtcaaggtagaagaaaaaaatattatcgatattgaagatgacgatgatatggatgtagaaagcgcgtaatacgatctataaaaataagtatataaatactttttatttactgtactcttactgtgtagtggtgataccctactcgattatttttttaaaaaaaaaatacttattctgattcttctagccatttccgtgttcgtttgaatgccacatcgacgtcaaagataggggagtagttgaaatctagttctgcattgttggtacgcacctcaaatgtagtgttggatatcttcaacgtatagttgttgagtagtgatggttttctaaatagaattctcttcatatcattcttgcacgcgtacatttttagcatccatcttggaatcctagatccttgttctattcccaatggtttcatcaatagaagattaaacatatcgtacgaacacgatggagagtaatcgtagcaaaagtaagcatttcctttaatcttagatcccggatactggatatattttgcagccaacacgtgcatccatgcagcatttcctacatatacccggctatgcaccgcgtcatcatcgactgtacgatacataatgttaccgtgttgcttacattgctcgtaaaagactttcatcaatttgtctccttctccgtaaattccagtgggtcttaggcaacaagtatacaattttgctccattcatgattacggaattattggctttcataaccagttgctcggccatacgtttactttttgcgtatacatgtcctggtgatatatcataaagggtatgctcatggccgatgaatggatcaccgtgtttattgggtcctattgcttccatgctactagtatagatcaaatacttgattcctaggtccacacaagctgccaaaatagtctgtgttccataatagtttactttcatgatttcattatcggtgtattttccaaatacatccactagagcagccgtatgaataatcagatttaccccatctagcgcttctctcaccttatcaaagtcgtttatatcacattgtatatagtttataaccttaactttcgaggttattggttgtggatcttctacaatatctatgactctgatttcttgaacatcatctgcactaattaacagttttactatatacctgcctagaaatccggcaccaccagtaaccgcgtacacggccattgctgccactcataatatcagactacttattctattttactaaataatggctgtttgtataatagaccacgataatatcagaggagttatttactttgaaccagtccatggaaaagataaagttttaggatcagttattggattaaaatccggaacgtatagtttgataattcatcgttacggagatattagtcaaggatgtgattccataggcagtccagaaatatttatcggtaacatctttgtaaacagatatggtgtagcatatgtttatttagatacagatgtaaatatatttacaattattggaaaggcgttatctatttcaaaaaatgatcagagattagcgtgtggagttattggtatttcttacataaatgaaaagataatacattttcttacaattaacgagaatggcgtttgatatatcagttaatgcgtctaaaacaataaatgcattagtttacttttctactcagcaaaataaattagtcatacgtaatgaagttaatgatacacactacactgtcgaatttgatagggacaaagtagttgacacgtttatttcatataatagacataatgacaccatagagataagaggggtgcttccagaggaaactaatattggttgcgcggttagtatgacttacttgtataataagtatagttttaaactgattttagcagaatatataagacacagaaatactatatccggcaatatttattcggcattgatgacactagatgatttggctattaaacagtatggagacattgatctattatttaatgagaaacttaaagtagactccgattcgggactatttgactttgtcaactttgtaaaggatatgatatgttgtgattctagaatagtagtagctctatctagtctagtatctaaacattgggaattgacaaataaaaaatataggtgtatggcattagccgaacatatatctgatagtattccaatatctgagctatctagactacgatacaatctatgtaagtatctacgcggacacactgagagcatagaggataaatttgattattttgaagacgatgattcgtctacatgttctgccgtaaccgacagggaaacggatgtataattttttttatagcgtgaaggatatgataaaaaatataattgttgtatttatcccattccaatcaccttatatgattctgtaacacaataaaggagtcttatagatgtatagaggtcagatactggtttgataaactgtttattccacataagtatgtttgactttatggttagacccgcatactttaacaaatcactgaaaattggagttaggtattgacctctcagaatcagttgccgttctggaacattaaatgtattttttatgatatactccaacgcatttatgtgggcatacaacaagtcattactaatggaatattccaagagttttagttgtctagtatttaacaagagaagagatttcaacagactgtttatgaactcgaatgccgcctcattgtcgcttatattgatgatgtcgaattctcccaatatcatcaccgatgagtagctcatcttgttatcgggatccaagttttctaaagatgtcattaaaccctcgatcatgaatggatttatcatcatcgtttttatgttggacatgagcttagtccgtttgtccacatctatagaagatgatttctgaattatttcatatatctctctctttaactccaggaacttgtcaggatggtctactttaatatgttctcgtctaagagatgaaaatctttggatggttgcacgcgacttttctctaaaggatgacgttgcccaagatcctctcttaaatgaatccatcttatccttggacaagatggacagtctattttccttagatggtttaatatttttgttacccatgatctataaaggtagacctaatcgtctcggatgaccatatatttattttcagttttattatacgcataaattgtaaaaaatatgttaggtttacgaaaatgtctcgtggggcattaatcgtttttgaaggattggacaaatctggaaaaacaacacaatgtatgaacatcatggaatcaataccttcaaacacaataaaataccttaactttcctcagagatccactgtcactggaaagatgatagatgactatctaactcgtaaaaaaacctataatgatcatatagttaatctattattttgtgcaaatagatgggagtttgcatcttttatacaagaacaactagaacagggaattactttaatagttgatagatacgcattttctggagtagcgtatgccgccgctaaaggcgcgtcaatgactctcagtaagagttatgaatctggattgcctaaacccgacttagttatattcttggaatctggtagcaaagaaattaatagaaacgtcggtgaggaaatttatgaagatgttacattccaacaaaaggtattacaagaatataaaaaaatgattgaagaaggagatattcattggcaaattatttcttctgaattcgaggaagatgtaaagaaggagttgattaagaatatagttatagaggctatacacacggttactggaccagtggggcaactgtggatgtaatagtgaaattacattttttataaatagatgttagtacagtgttataaatggatgaagcatattactctggcaacttggaatcagtactcggatacgtgtccgatatgcataccgaactcgcatcaatatctcaattagttattgccaagatagaaactatagataatgatatattaaacaaggacattgtaaattttatcatgtgtagatcaaacttggataatccatttatctctttcctagatactgtatatactattatagatcaagagaactatcagactgagttgattaattcattagacgacaatgaaattatcgattgtatagttaataagtttatgagcttttataaggataacctagaaaatatagtagatgctatcattactctaaaatatataatgaataatccagattttaaaactacgtatgccgaagtactcggttccagaatagccgatatagatattaaacaagtgatacgtaagaatatactacaattgtctaataatatccgcgaacgatatttgtgaaaatattaaaaaaaaatactttttttattaaatgacgtcttttcgtgaatttagaaaattatgctgtgctatatatcacgcatcaggatataaagaaaaatctaaattaattagagactttataacagatagggatgataaatatttgatcattaagctattgcttcccggattagacgatagaatttataacatgaacgataaacaaattataaaattatatagtataatatttaaacaatctcaggaagatatgctacaagatttaggatacggatatataggagacactattaggactttcttcaaagagaacacagaaatccgtccacgagataaaagcattttaactttagaagaagtggatagttttttaactacgttatcatccgtaactaaagaatcgcatcaaataaaattattgactgatgtagcatctgtttgtacatgtaatgatttaaaatgtgtagtcatgcttattgataaagatctaaaaattaaagcgggtcctcggtacgtacttaacgctattagtcctaatgcctatgatgtgtttagaaaatctaataacttgaaagagataatagaaaattcatctaaacaaaatctagactctatatctatttctgttatgactccaattaatcccatgttagcggaatcgtgtgattctgtcaataaggcgtttaaaaaatttccatcaggaatgtttgcggaagtcaaatacgatggtgaaagagtacaagttcataaaaataataacgagtttgccttctttagtagaaacatgaaaccagtactctctcataaagtggattatctcaaagaatacataccgaaagcatttaaaaaagctacgtctatcgtattggattctgaaattgttcttgtagacgaacataatgtaccgctcccgtttggaagtttaggtatacacaaaaagaaagaatataaaaactctaacatgtgtttgttcgtgtttgactgtttgtactttgatggattcgatatgacggacattccattgtacgaacgaagatcttttctcaaagatgttatggttgaaatacccaatagaatagtattctcagagttgacgaatattagtaacgagtctcagttaactgacgtattggatgatgcactaacgagaaaattagaaggattggtcttaaaagatattaatggagtatacgaaccgggaaagagaagatggttaaaaataaagcgagactatttgaacgagggttccatggcagattctgccgatttagtagtactaggtgcctactatggtaaaggagcaaagggtggtatcatggcagtctttctaatgggttgttacgacgatgaatccggtaaatggaagacggttaccaagtgttcaggacacgatgataatacgttaagggagttgcaagaccaattaaagatgattaaaattaacaaggatcccaaaaaaattccagagtggttagtagttaataaaatctatattcccgattttgtagtagaggatccgaaacaatctcagatatgggaaatttcaggagcagagtttacatcttccaagtcccataccgcaaatggaatatccattagatttcctagatttactaggataagagaggataaaacgtggaaagaatctactcatctaaacgatttagtaaacttgactaaatcttaatagttacatacaaactgaaaattaaaataacactatttagttggtggtcgccatggatggtgttattgtatactgtctaaacgcgctagtaaaacatggcgaggaaataaatcatataaaaaatgatttcatgattaaaccatgttgtgaaagagtttgtgaaaaagtcaagaacgttcacattggcggacaatctaaaaacaatacagtgattgcagatttgccatatatggataatgcggtatccgatgtatgcaattcactgtataaaaagaatgtatcaagaatatccagatttgctaatttgataaagatagatgacgatgacaagactcctactggtgtatataattattttaaacctaaagatgccattcctgttatcatatctataggaaaggataaagatgtctgtgaactattaatctcatcagacatatcgtgtgcatgcgtggagttaaattcatatcacgtagccattcttcccatggatgtttccttttttaccaaaggaaatgcatcattgattattctcctgtttgatttctctatcgatgcggcacctctcttaagaagtgtaaccgataataatgttattatatctagacaccagcgtctacatgacgagcttccgagttccaattggttcaagttttacataagtataaagtccgactattgttctatattatatatggttgttgatggatctgtgatgcatgcgatagctgataatagaactcacgcaattattagcaaaaatatattagacaatactacgattaacgatgagtgtagatgctgttattttgaaccacagattaggattcttgatagagatgagatgctcaatggatcatcgtgtgatatgaacagacattgtattatgatgaatttacctgatgtaggcgaatttggatctagtatgttggggaaatatgaacctgacatgattaagattgctctttcggtggctggtaatttaataagaaatcgagactacattcccgggagacgaggatatagctactacgtttacggtatagcctctagataatttttttaagcacgaaataaaaaacataattttaaaccaatctatttcatactattttgtgtgatcaccatggacataaagatagatattagtatttctggtgataaatttacggtgactactaggagggaaaatgaagaaagaaaaaaatatctacctctccaaaaagaaaaaactactgatgttatcaaacctgattatcttgagtacgatgacttgttagatagagatgagatgtttactattctagaggaatattttatgtacagaggtctattaggcctcagaataaaatatggacgactctttaacgaaattaaaaaattcgacaatgatgcggaagaacaattcggtactatagaagaactcaagcagaaacttagattaaattctgaagagggagcagataactttatagattatataaaggtacaaaaacaggatatcgtcaaacttactgtatacgattgcatatctatgataggattgtgtgcatgcgtggtagatgtttggagaaatgagaaactgttttctagatggaaatattgtttacgagcgattaaactgtttattgatgatcacatgcttgataagataaaatctatactgcagaatagactagtatatgtggaaatgtcatagaaagttaaaagttaatgagagcaaaaatatataaggttgtattccatatttgttatttttttctgtaatagttagaaaaatacattcgatggtctatctatcagattattatgtgttataaggtactttttctcataataaactagagtatgagtaagatagtgtttttcaaaacatataaatctaaaattgatggatgagatatacagctattaatttcgaaaatatattttaatctgataactttaaacatggatttttaatggtggtttaacgttttaaaaaaagattttgttattgtagtatatgataatattaaaagatggatataaagaatttgctgactgcatgtactattttttacattactacattggctacggcagatatacctacttcgtcactgccacacgctccggtaaacggggcatgtgacgagggagaatatcttgataagaggcataatcaatgttgtaatcagtgtccacctggagaatttgccaaggttagatgtaatggtaacgataacacaaaatgtgaacgctgcccacctcatacatataccgcaatccccaattactctaatggatgtcatcaatgtagaaaatgcccaacaggatcatttgataaggtaaagtgtaccggaacacagaacagtaaatgttcgtgtcttcctggttggtattgcgctactgattcttcacagactgaagattgtcgagattgtataccaaaaaggagatgtccatgcggatactttggtggaatagatgaacaaggaaatcctatttgtaaatcgtgttgtgttggtgaatattgcgactacctacgtaattatagacttgatccatttcctccatgcaaactatctaaatgtaattaattatgattttgatgataatgttaccatacattatatcgctacttggttagtgtattattcagtatgaagacctattaataattacttatcttttgacgatcttgttataattataatataaaaatacttatggcatagtaactcataattgctgacgcgataaattcgtaataatctgttttgttcaaatttttataaggaatctacaggcataaaaataaaaatataatttataatatactcttacagcgcgccatcatgaataacagcagtgaattgattgctgttattaatggatttagaaatagtggacgattttgtgatattaatatagttattaatgatgaaaggataaacgctcacagactcatcctatctggagcctccgaatatttttccattctgttttccaataattttatcgattctaatgaatacgaagttaatctaagtcatttagattatcaaagtgttaacgatttgatcgattacatttatgggatacctttgagcctaactaacgataacgtgaaatatattctttcaaccgctgattttttacaaattggatctgctattacggagtgtgaaaattacatacttaaaaatctttgttctagaaactgtatcgatttctacatatacgctgataaatataataacaagaaaatagaatcagcgtcgtttaacacaatattacaaaatattttgagactcatcaacgatgaaaactttaaatacttaacagaggaatcaatgataaaaattttaagcgatgatatgttaaatataaaaaatgaggatttcgccccactaattctcattaaatggttagagagtactcaacaaccatgcaccgtcgagttacttaaatgcctcagaatatcattgctttccccacaagttataaaatcactttatagtcatcgactggttagttcaatctacgaatgtataacattcttaaacaatatagcattcttggatgaatcatttcctagataccatagcatcgagttgatatctatcggtataagtaattcgcatgataagatttccataaactgctacaatcataaaaaaaatacatgggaaatgatatcttcacgtagatataggtgtagtttcgcagtggccgtcctggataatattatctatatgatgggtggatatgatcagtccccgtatagaagttcaaaggttatagcgtacaatacatgtacaaattcttggatatatgatataccagagctaaaatatcctcgttctaattgtgggggactggctgatgacgaatacatttattgtataggcggcatacgcgatcaggattcatcgttgacatctagtattgatagatggaagccatcaaaaccatattggcagaagtatgctaaaatgcgcgaaccaaaatgtgatatgggggttgcgatgttaaacggattaatatatgttataggtggaatcgttaaaggtgacacgtgtaccgacgcactagagagtttatcagaagatggatggatgaagcatcaacgtcttccaataaaaatgtccaatatgtcgacgattgttcatgatggcaagatttatatatctggaggttacaacaatagtagtgtagttaatgtaatatcgaatctagtccttagctataattcgatatatgatgaatggaccaaattatcatcattaaacattcctagaattaatcccgctctatggtcagcgcataataaattatatgtaggaggaggaatatctgatgatgttcgaactaatacatctgaaacatacgacaaagaaaaagattgttggacattggataatggtcacgtgttaccacgcaattatataatgtataaatgcgaaccgattaaacataaatatccattggaaaaaacacagtacacgaatgattttctaaagtatttggaaagttttataggtagttgatagaacaaaatacataattttgtaaaaataaatcactttttatactaatatgacacgattaccaatacttttgttactaatatcattagtatacgctacaccttttcctcagacatctaaaaaaataggtgatgatgcaactctatcatgtaatcgaaataatacaaatgactacgttgttatgagtgcttggtataaggagcccaattccattattcttttagctgctaaaagcgacgtcttgtattttgataattataccaaggataaaatatcttacgactctccatacgatgatctagttacaactatcacaattaaatcattgactgctagagatgccggtacttatgtatgtgcattctttatgacatcgcctacaaatgacactgataaagtagattatgaagaatactccacagagttgattgtaaatacagatagtgaatcgactatagacataatactatctggatctacacattcaccggaaactagttctgagaaacctgattatatagataattctaattgctcgtcggtattcgaaatcgcgactccggaaccaattactgataatgtagaagatcatacagacaccgtcacatacactagtgatagcattaatacagtaagtgcatcatctggagaatccacaacagacgagactccggaaccaattactgataaagaagaagatcatacagttacagacactgtctcatacactacagtaagtacatcatctggaattgtcactactaaatcaaccaccgatgatacgtacaatgataatgatacagtaccaccaactactgtaggcggtagtacaacctctattagcaattataaaaccaaggactttgtagaaatatttggtattaccgcattaattatattgtcggccgtggcaatattctgtattacgtattatatatgtaataaacgttcacgtaaatacaaaacagagaacaaagtctagatttttgacttacataaatgtctgggatagtaaaatctatcatattgagcgggccatctggtttaggaaagacagccatagccaaaagactatgggaatatatttggatttgtggtgtcccataccactagatttcctcgtcctatggaacgagaaggtgtcgattaccattacgttaacagagaggccatctggaagggaatagccgccggaaactttctagaacatactgagtttttaggaaatatttacggaacttctaaaactgctgtgaatacagcggctattaataatcgtatttgtgtgatggatctaaacatcgatggcgttagaagtcttaaaaatacgtacctaatgccttactcggtgtatataagacctacctctcttaaaatggttgagaccaagcttcgttgtagaaacactgaagcggatgatgagattcatcgtcgtgtgatgttggcaaaaactgacatggatgaggcaggtgaagccggtctattcgacactattatcattgaagatgatgtgaatttagcatatagtaagttaattcagatactacaggaccgtattagaatgtattttaacactaattagagacttaagacttaaaacttgataattaataatataactcgtttttatatgtgtctatttcaacgtctaatgtattagttaaatattaaaacttaccacgtaaaacttaaaatttaaaatgatatttcattgacagatagatcacacattatgaactttcaaggacttgtgttaactgacaattgcaaaaatcaatgggtcgttggaccattaataggaaaaggtggattcggtagtatttatactactaatgacaataattatgtagtaaaaatagagcccaaagctaacggatcattatttaccgaacaggcattttatactagagtacttaaaccatccgttatcgaagaatggaaaaaatctcacaatataaagcacgtaggtcttatcacgtgcaaggcatttggtctatacaaatccattaatgtggaatatcgattcttggtaattaatagattaggtgcagatctagatgcggtgatcagagccaataataatagactaccaaaaaggtcggtgatgttgatcggaatcgaaatcttaaataccatacaatttatgcacgagcaaggatattctcacggagatattaaagcgagtaatatagtcttagatcaaatagataagaataaattatatctagtggattacggattggtttctaaattcatgtctaatggcgaacatgttccatttataagaaatccaaataaaatggataacggtactctagaatttacacctatagattcgcataaaggatacgttgtatctagacgtggagatctagaaacacttggatattgtatgattagatggttgggaggtatcttaccatggactaagatatctgaaacaaagaattgtgcattagtaagtgccacaaaacagaaatatgttaacaatactgcgactttgttaatgaccagtttgcaatatgcacctagagaattgctgcaatatattaccatggtaaactctttgacatattttgaggaacccaattacgacaagtttcggcacatattaatgcagggtgtatattattaagtgtggtgtttggtcgataaaaattaaaaaataacttaatttattattgatctcgtgtgtacaaccgaaatcatggcgatgttttacgcacacgctctcggtgggtacgacgagaatcttcatgcctttcctggaatatcatcgactgttgccaatgatgtcaggaaatattctgttgtgtcagtttataataacaagtatgacattgtaaaagacaaatatatgtggtgttacagtcaggtgaacaagagatatattggagcactgctgcctatgtttgagtgcaatgaatatctacaaattggaaatccgatccatgatcaagaaggaaatcaaatctctatcatcacatatcgccacaaaaactactatgctctaagcggaatcgggtacgagagtctagacttgtgtttggaaggagtagggattcatcatcacgtacttgaaacaggaaacgctgtatatggaaaagttcaacatgattattctactatcaaagagaaggccaaagaaatgagtgcacttagtccaggacctatcatcgattaccacgtctggataggagattgtatctgtcaagttactgctgtggacgtacatggaaaggaaattatgaaaatgagattcaaaaagggtgcggtgcttccgatcccaaatctggtaaaagttaaacttggggagaatgatacagaaaatctttcttctactatatcggcggcaccatcgaggtaaccacctctctggaagacagcgtgaatcatgtactcatgaaacgtttggaaactatacgccatatgtggtctgttgtatatgatcattttgatattgtgaatggtaaagaatgctgttatgtgcatacgcattcatctaatcaaaatcctataccgagtactgtaaaaacaaatttgtacatgaagactatgggatcatgcattcaaatggattccatggaagctctagagtatcttagcgaactgaaggaatcaggtggatggagtcccagaccagaaatgcaggaatttgaatatccagatggagtggaagacactgaatcaattgagagattggcagaggagttcttcaatagatcagaacttcaggctggtgaatcagtcaaatttggtaattctattaattgttaaacatacatctgtttcagctaagcaactaagaacacgtatacggcagcagcttccttctatactctcatcttttaccaacacaaagggtggatatttgttcattggagttgataataatacacacaaagtatttggattcacggtgggttacgactacctcagactgatagagaatgatatagaaaagcatatcaaaagacttcgtgttgtgcatttctgtgagaagaaagaggacatcaagtacgcgtgtcgattcatcaaggtatataaacctggggatgagactacctcgacatacgtgtgcgctatcaaagtggaaagatgctgttgtgctgtgtttgcagattggccagaatcatggtatatggatactaatggtatcaagaagtattctccagatgaatgggtgtcacatataaaattttaattaatgtaactatagagaacaaataataaggttgtaatatcatatagacaataactaacaattaattagtaactgttatctcttttttaactaaccaactaactatatacctattaatacatcgtaattatagttcttaacatctattaatcattaattcgcttctttaattttttataaactaacattgttaattgaaaagggataacatgttacagaatataaattatatatggatttttttaaaaaggaaatacttgactggagtatatatttatctcttcattatatagcacgcgtgttttccaatttttccacatcccatataatacaggattataatctcgttcgaacatacgagaaagtggataaaacaatagttgattttttatctaggttgccaaatttattccatattttagaatatggggaaaatattctacatatttattctatggatgatgctaatacgaatattataattttttttctagatagagtattaaatattaataagaacgggtcatttatacacaatctcgggttatcatcatccattaatataaaagaatatgtatatcaattagttaataatgatcatccagataataggataagactaatgcttgaaaatggacgtagaacaagacattttttgtcctatatatcagatacagttaatatctatatatgtattttaataaatcatggattttatatagatgccgaagacagttacggttgtacattattacatagatgtatatatcactataagaaatcagaatcagaatcatacaatgaattaattaagatattgttaaataatggatcagatgtagataaaaaagatacgtacggaaacacaccttttatcctattatgtaaacacgatatcaacaacgtggaattgtttgagatatgtttagagaatgctaatatagactctgtagactttaatagatatacacctcttcattatgtctcatgtcgtaataaatatgattttgtaaagttattaatttctaaaggagcaaatgttaatgcgcgtaataaattcggaactactccattttattgtggaattatacacggtatctcgcttataaaactatatttggaatcagacacagagttagaaatagataatgaacatatagttcgtcatttaataatttttgatgctgttgaatctttagattatctattatccagaggagttattgatattaactatcgtactatatacaacgaaacatctatttacgacgctgtcagttataatgcgtataatacgttggtctatctattaaacaaaaatggtgattttgagacgattactactagtggatgtacatgtatttcggaagcagtcgcaaacaacaacaaaataataatggaagtactattgtctaaacgaccatctttgaaaattatgatacagtctatgatagcaattactaaacataaacagcataatgcagatttattgaaaatgtgtataaaatatactgcgtgtatgaccgattatgatactcttatagatgtacagtcgctacagcaatataaatggtatattttaagatgtttcgatgaaatagatatcatgaagagatgttatataaaaaataaaactgtattccaattagttttttgtatcaaagacattaatactttaatgagatacggtaaacatccttctttcgtgaaatgcactagtctcgacgtatacggaagtcgtgtacgtaatatcatagcatctattagatatcgtcagagattaattagtctattatccaagaagctggatcctggagataaatggtcgtgttttcctaacgaaataaaatataaaatattggaaaactttaacgataacgaactatccacatatctaaaaatcttataaacattattaaaatataaaatctaagtaggataaaatcacactacatcattgtttccttttagtgctcgacagtgtatactatttttaacgctcataaataaaaatgaaaacgatttccgttgttacgttgttatgcgtactacctgctgttgtttattcaacatgtactgtacccactatgaataacgctaaattaacgtctaccgaaacatcgtttaatgataaccagaaagttacgtttacatgtgatcagggatatcattctttggatccaaatgctgtctgtgaaacagataaatggaaatacgaaaatccatgcaaaaaaatgtgcacagtttctgattatgtctctgaactatataataaaccgctatacgaagtgaattccaccatgacactaagttgcaacggcgaaacaaaatattttcgttgcgaagaaaaaaatggaaatacttcttggaatgatactgttacgtgtcctaatgcggaatgtcaacctcttcaattagaacacggatcgtgtcaaccagttaaagaaaaatactcatttggggaatatatgactatcaactgtgatgttggatatgaggttattggtgcttcgtacataagttgtacagctaattcttggaatgttattccatcatgtcaacaaaaatgtgatatgccgtctctatctaacggattaatttccggatctacattttctatcggtggcgttatacatcttagttgtaaaagtggttttacactaacggggtctccatcatccacatgtatcgacggtaaatggaatcccatactcccaatatgtgtacgaactaacgaaaaatttgatccagtggatgatggtcccgacgatgagacagatttgagcaaactctcgaaagacgttgtacaatatgaacaagaaatagaatcgttagaagcaacttatcatataatcatagtggcgttgacaattatgggcgtcatatttttaatctccgttatagtattagtttgttcctgtgacaaaaataatgaccaatataagttccataaattgctaccgtaaatataaatccgttaaaataattaataatttaataacaaacaagtatcaaaagattaaagacttatagctagaatcaattgagatgtcttcttcagtggatgttgatatctacgatgccgttagagcatttttactcaggcactattataacaagagatttattgtgtatggaagaagtaacgccatattacataatatatacaggctatttacaagatgcgccgttataccgttcgatgatatagtacgtactatgccaaatgaatcacgtgttaaacaatgggtgatggatacacttaatggtataatgatgaatgaacgcgatgtttctgtaagcgttggcaccggaatactattcatggaaatgtttttcgattacaataaaaatagtatcaacaatcaactaatgtatgatataattaatagcgtatctataattctagctaatgagagatatagaagcgcttttaacgacgatggtatatacatccgtagaaatatgattaacaagttgtacggatacgcatctctaactactattggcacgatcgctggaggtgtttgttattatctgttgatgcatctagttagtttgtataaataattatttcaatatactagttaaaattttaagattttaaatgtataaaaaactaataacgtttttatttgtaataggtgcattagcatcctattcgaataatgagtacactccgtttaataaactgagtgtaaaactctatatagatggagtagataatatagaaaattcatatactgatgataataatgaattggtgttaaattttaaagagtacacaatttctattattacagagtcatgcgacgtcggatttgattccatagatatagatgttataaacgactataaaattattgatatgtataccattgactcgtctactattcaacgcagaggtcacacgtgtagaatatctaccaaattatcatgccattatgataagtacccttatattcacaaatatgatggtgatgagcgacaatattctattactgcagagggaaaatgctataaaggaataaaatatgaaataagtatgatcaacgatgatactctattgagaaaacatactcttaaaattggatctacttatatatttgatcgtcatggacatagtaatacatattattcaaaatatgatttttaaaaatttaaaatatattatcacttcagtgacagtagtcaaataacaaacaacaccatgagatatattataattctcgcagttttgttcattaatagtatacatgctaaaataactagttataagtttgaatccgtcaattttgattccaaaattgaatggactggggatggtctatacaatatatcccttaaaaattatggcatcaagacgtggcaaacaatgtatacaaatgtaccagaaggaacatacgacatatccgcatttccaaagaatgatttcgtatctttctgggttaaatttgaacaaggcgattataaagtggaagagtattgtacgggactatgcgtcgaagtaaaaattggaccaccgactgtaacattgactgaatacgacgaccatatcaatttgtacatcgagcatccgtatgctactagaggtagcaaaaagattcctatttacaaacgcggtgacatgtgtgatatctacttgttgtatacggctaacttcacattcggagattctaaagaaccagtaccatatgatatcgatgactacgattgcacgtctacaggttgcagcatagactttgtcacaacagaaaaagtgtgcgtgacagcacagggagccacagaagggtttctcgaaaaaattactccatggagttcgaaagtatgtctgacacctaaaaagagtgtatatacatgcgcaattagatccaaagaagatgttcccaatttcaaggacaaaatggccagagttatcaagagaaaatttaatacacagtctcaatcttatttaactaaatttctcggtagcacatcaaatgatgttaccacttttcttagcatgcttaacttgactaaatattcataactaatttttattaatgatacaaaaacgaaataaaactgcatattatacactggttaacgcccttataggctctaaccattttcaagatgaggtccctgattatagtccttctgttcccctctatcatctactccatgtctattagacgatgtgagaagactgaagaggaaacatggggattgaaaatagggttgtgtataattgccaaagatttctatcccgaaagaactgattgcagtgttcatctcccaactgcaagtgaaggattgataactgaaggcaatggattcagggatatacgaaacaccgataaattataaaaaaagcaatgtgtccgctgtttccgttaataatactattttcgtaactggcggattattcataaataactctaatagcacgatcgtggttaacaatatggaaaaacttgacatttataaagacaaacaatggtcgattatagaaatgcctatggctagggtatatcacggcattgactcgacatttggaatgttatattttgccggaggtctatccgttaccgaacaatatggtaatttagagaaaaacaacgagatatcttgttacaatcctagaacgaataagtggtttgatatttcatatactatttataagatatccatatcatcattgtgtaaactaaataacgtcttctatgtatttagtaaggacattggatatgtggaaaagtatgatggtgcatggaagttagtacatgatcgtctccccgctataaaggcattatcaacttctccttattgattgaaaatgaaaatataaatagtttttatgtatagcagtattaccctatagttttattgcttactactaacatggatacagatgttacaaatgtagaagatatcataaatgaaatagatagagagaaagaagaaatactaaaaaatgtagaaattgaaaataataaaaacattaacaagaatcatcccaatgaatatattagagaagcactcgttattaataccagtagtaatagtgattccattgataaagaagttatagaatgtatcagtcacgatgtaggaatatagatcatatctactaatttttataatcgatacaaaacataaaaaacaactcgttattacatagcaggcatggaatccttcaagtattgttttgataacgatggcaagaaatggattatcggaaatactttatattctggtaattcaatactctataaggtcagaaaaaatttcactagttcgttctacaattacgtaatgaagatagatcacaaatcacacaagccattgttgtctgaaatacgattctatatatctgtattggatcctttgactatcgacaactggacacgggaacgtggtataaagtatttggctattccagatctgtatggaattggagaaaccgatgattatatgttcttcgttataaagaattcgggaagagtattcgccccaaaggatactgaatcagtcttcgaagcatgcgtcactatgataaacacgttagagtttatacactctcgaggatttacccatggaaaaatagaaccgaggaatatactgattagaaataaacgtctttcactaattgactattctagaactaacaaactatacaagagtggaaactcacatatagattacaacgaggacatgataacttcaggaaatatcaattatatgtgtgtagacaatcatcttggagcaacagtttcaagacgaggagatttagaaatgttgggatattgcatgatagaatggttcggtggcaaacttccatggaaaaacgaaagtagtataaaagtaataaaacaaaaaaaagaatataaaaaatttatagctactttctttgaggactgttttcctgaaggaaatgaacctctggaattagttagatatatagaattagtatacacgttagattattctcaaactcctaattatgacagactacgtaaactgtttatacaagattgaaattatattcttttttttatagagtgtggtagtgttacggatatctaatattaatattagactatctctatcgcgctacacgaccaatatcgattactatggatatcttctatgaaaggagagaatgtatttatttctccagcgtcaatctcgtcagtattgacaatactgtattatggagctaatggatccactgctgaacagctatcaaaatatgtagaaacggaggagaacacggataaggttagcgctcagaatatctcattcaaatccatgaataaagtatatgggcgatattctgccgtgtttaaagattcctttttgagaaaaattggcgataagtttcaaactgttgacttcactgattgtcgcactatagatgcaatcaacaagtgtgtagatatctttactgaggggaaaatcaatccactattggatgaaccattgtctcctagcaattagtgccgtatactttaaagcaaaatggttgacgccattcgaaaaggaatttaccagtgattatcccttttacgtatctccgacggaaatggtagacgtaagtatgatgtctatgtacggcaaggcatttaatcacgcatctgtaaaagaatcattcggcaacttttcaatcatagaactgccatatgttggagatactagtatgatggtcattcttccagacaagattgatggattagaatccatagaacaaaatctaacagatacaaattttaagaaatggtgtgactttatggatgctatgtttatagatgttcacattcccaagtttaaggtaacaggctcgtataatctggtggatactctagtaaagtcaggactgacagaggtgttcggttcaactggagattatagcaatatgtgtaatttagatgtgagtgtcgacgctatgatccacaaaacgtatatagatgtcaatgaagagtatacagaagcagctgcagcaacttctgtactagtggcagactgtgcatcaacaattacaaatgagttctgtgcagatcatccgttcatctatgtgattaggcatgttgatggaaaaattcttttcgttggtagatattgctctccgacaactaattgttaaccattttttttaaaaaaaatagaaaaaacatgtggtattagtgcaggtcgttgttcttccaattgcaattggtaagatgacggccaactttagtacccacgtcttttcaccacagcactgtggatgtgacagactgaccagtattgatgacgtcaaacaatgtttgactgaatatatttattggtcgtcctatgcataccgcaacaggcaatgcgctggacaattgtattccacactcctctcttttagagatgatgcggaattagtgttcatcgacattcgcgagctggtaaaaaatatgccgtgggatgatgtcaaagattgtacagaaatcatccgttgttatataccggatgagcaaaaaaccatcagagagatttcggccatcatcggactttgtgcatatgctgctacttactggggaggtgaagaccatcccactagtaacagtctgaacgcattgtttgtgatgcttgagatgctaaattacgtggattataacatcatattccggcgtatgaattgatgagttgtacatcttgacattttctttcttctcttctccctttcttctcttctcccttcctccctcttctccctttcccagaaacaaacttttttacccactataaaataaaatgagtatactacctattatatttcttcctatatttttttattcttcattcgttcagacttttaacgcgtctgaatgtatcgacaaagggcaatattttgcatcattcatggagttagaaaacgagccagtaatcttaccatgtcctcaaataaatacgctatcatccggatataatatattagatattttatgggaaaaacgaggagcggataatgatagaattataccgatagataatggtagcaatatgctaattctgaacccgacacaatcagactctggtatttatatatgcattaccacgaacgaaacctactgtgacatgatgtcgttaaatttgacaatcgtgtctgtctcagaatcaaatatagatcttatctcgtatccacaaatagtaaatgagagatctactggcgaaatggtatgtcccaatattaatgcatttattgctagtaacgtaaacgcagatattatatggagcggacatcgacgccttagaaataagagacttaaacaacggacacctggaattattaccatagaagatgttagaaaaaatgatgctggttattatacatgtgttttagaatatatatacggtggcaaaacatataacgtaaccagaattgtaaaattagaggtacgggatagaataataccttctactatgcaattaccagatggcattgtaacttcaataggtagtaatttgactattgcatgcagagtatcgttgagacctcccacaacggacaccgacgtcttttggataagtaatggtatgtattacgaagaagatgatggggacggaaacggtagaataagtgtagcaaataaaatctatatgaccgataagagacgtgttattacatcccggttaaacattaatcctgtcaaggaagaagatgctacaacgtttacgtgtatggcgtttactattcctagcatcagcaaaacagttactgttagtataacgtgaatgtatgttgttacatttccatgtcaattgagtttataagaatttttatacattatcttccaacaaacaattgacgaacgtattgctatgattaactcccacgatactatgcatattattaatcattaacttgcagactatacctagtgctattttgacatactcgtgttcttgtgtaattgcggtatctatattattaaagtacgtaaatctagctatagttttattatttaattttagataatataccgtctccttatttttaaaaattgccacatcctttattaaatcatgaatgggaatttctatgtcatcgttagtatattgtgaacaacaagagcagatatctataggaaagggtggaatgcgatacattgatctatgtagttttaaaacacacgcgaactttgaagaatttatataaatcattccatcgatacatccttctatgttgacatgtatatatccaggaattcttttattaatgtcaggaaatgtataaactaaaacattgcccgaaagcggtgcctctatctgcgttatatccgttcttaacttacaaaatgtaaccaatacctttgcatgacttgttttgttcggcaacgttagtttaaacttgacgaatggattaattacaatagcatgatccgcgcatctattaagtttttttactttaacgcccttgtatgtttttacagagactttatctaaatttctagtgcttgtatgtgttataaatataacgggatatagaaccgaatcacctaccttagatacccaattacattttatcagatccagataataaacaaattttgtcgccctaactaattctatattgttatatattttacaattggttatgatatcatgtaataacttggagtctaacgcgcatcgtcgtacgtttatacaattgtgatttagtgtagtatatctacacatgtatttttccgcactatagtattctggactagtgataaaactatcgttatatctgtcttcaatgaactcatcgagatattgctctctgtcatattcatacacctgcataaactttctagacatcttacaatccgtgttattttaggatcatatttacatatttacgggtatatcaaagatgttagattagttaatgggaatcgtctataataatgaatattaaacaattatatgaggacttttaccacaaagcatcataaaaatgagtcgtcgtctgatttatgttttaaatatcaaccgcaaatcaactcataaaatacaagagaatgaaatatatacatattttagtcattgcaatatagaccatacttctacagaacttgattttgtagttaaaaactatgatctaaacagacgacaacctgtaactgggtatactgcactacactgctatttgtataataattactttacaaacgatgtactgaagatattattaaatcatgacgtaaatgtaacgatgaaaaccagtagcggacgtatgcctgtttatatattgcttactagatgttgtaatatttcacatgatgtagtgatagatatgatagacaaagataaaaaccacttattacatagagactattccaacctattactagagtatataaaatctcgttacatgttattgaaggaagaggatatcgatgagaacatagtatccactttattagataagggaatcgatcctaactttaaacaagacggatatacagcgttacattattattatttgtgtctcgcacacgtttataaactaggtgagtgtagaaaaccgataacgataaaaaaggccaagcgaattatttctttgtttatacaacatggagctaatctaaacgcgttagataattgtggtaatacaccattccatttgtatcttagtattgaaatgtgtaataatattcatatgactaaaatgctgttgacttttaatccgaatttcaaaatatgtaataatcatggattaacgcctatactatgttatataacttccgactacatacaacacgatattcttgttatgttaatacatcactatgaaacaaatgttggagaaatgccgatagatgagcgtcgtatgatcgtattcgagtttatcaaaacatattctacacgtccggcagattcgataacttatttgatgaataggtttaaaaatataaatatttatacccgctatgaaggaaagacattattacacgtagcatgtgaatataataatacacaagtaatagattatcttatacgtatcaacggagatataaatgcgttaaccgacaataacaaacacgctacacaactcattatagataacaaagaaaattccccatataccattaattgtttactgtatatacttagatatattgtagataagaatgtgataagatcgttggtggatcaacttccatctctacctatcttcgatataaaatcatttgagaaattcatatcctactgtatacttttagatgacacattttacgataggcacgttaagaatcgcgattctaaaacgtatcgatacgcattttcaaaatacatgtcgtttgataaatacgatggtataataactaaatgtcacgacgaaacaatgttactcaaactgtccactgttctagacactacactatatgcagttttaagatgtcataattcgagaaagttaagaagatacctcaacgagttaaaaaaatataataacgataagtcctttaaaatatattctaatattatgaatgagagataccttaatgtatattataaagatatgtacgtgtcaaaggtatatgataaactatttcctgttttcacagataaaaattgtctactaacattactaccttcagaaattatatacgaaatattatacatgctgacaattaacgatctttataatatatcgtatccacctaccaaagtatagttgtatttttctcatgcgatgtgtgtaaaaaaactgatattatataaatattttagtgccgtataataaagatgacgatgaaaatgatggtacatatatatttcgtatcattattgttattgctattccacagttacgccatagacatcgaaaatgaaatcacagaattcttcaataaaatgagagatactctaccagctaaagactctaaatggttgaatccagcatgtatgttcggaggcacaatgaatgatatagccgctctaggagagccattcagcgcaaagtgtcctcctattgaagacagtcttttatcgcacagatataaagactatgtggttaaatgggagaggctagaaaagaatagacggcgacaggtttctaataaacgtgttaaacatggtgatttatggatagccaactatacatctaaattcagtaaccgtaggtatttgtgcaccgtaactacaaagaatggtgactgtgttcagggtatagttagatctcatattaaaaaacctccttcatgcattccaaaaacatatgaactaggtactcatgataagtatggcatagacttatactgtggaattctttacgcaaaacattataataatataacttggtataaagataataaggaaattaatatcgacgacattaagtattcacaaacgggaaaggaattaattattcataatccagagttagaagatagcggaagatacgactgttacgttcattacgacgacgttagaatcaagaatgatatcgtagtatcaagatgtaaaatacttacggttataccgtcacaagaccacaggtttaaactaatactagatccgaaaatcaacgtaacgataggagaacctgccaatataacatgcactgctgtgtcaacgtcattattgatcgacgatgtactgattgaatgggaaaatccatccggatggcttataggattcgattttgatgtatactctgttttaactagtagaggcggtatcaccgaggcgaccttgtactttgaaaatgttactgaagaatatataggtaatacatataaatgtcgtggacacaactattattttgaaaaaacccttacaactacagtagtattggagtaaatatacaatgcatttttatatacattactgaattattattactgaattattattactgaattattattaattatatcgtatttgtgctatagaatggatgaagatacgcgactatctaggtatttgtatctcaccgatagagaacatataaatgtagactctattaaacagttgtgtaaaatatcagatcctaatgcatgttatagatgtggatgtacggctttacatgagtacttttataattatagatcagtcaacggaaaatacaagtatagatacaacggttactatcaatattattcatctagcgattatgaaaattataatgaatattattatgatagaactggtatgaacagtgagagtgataatatatcaatcaaaacagaatatgaattctatgatgaaacacaagatcaaagtacacaactagtaggttacgacattaaactcaaaaccaatgaggatgattttatggctatgatagatcagtgggtgtccatgattatatagatgaatcaattaataaagtagtatatggaagagagtctcacgtaagatggcgggatatatggcaagaacataatgatggcgtatacagtataggaaaggagtgcatagataatatatacgaagacaaccataccgtagacgaattctacaagatagacagcgtatcagatgtagatgacgcggaacacatatctccgataactaaaaaaccatagaatcagttgatgataatacctacatttctaatcttccgtataccatcaaatacaaaatattcgagcaacaataagtattttttatacctttaaaactgataaataaattttttctagtgatattttggcaagatgagaatcctatttctcatcgctttcatgtatgggtgtgttcactcatatgttaacgcggttgaaaccaaatgtccaaatctagacattgtaacatcttctggagaatttcattgttcaggatgtgtggaacatatgcctgagtttagctatatgtattggttggcaaaggatatgaaatcggacgaggataccaagtttatagaacatctgggtgatggcatcaaagaagatgaaaccgttcgtaccacagatagtggaatcgtcactctacgtaaagtccttcatgtgactgatactaataaatttgataattataggttcacttgtgtcctcgctacgctagatggcatttataaaaagaatgtttgctgaagtagttgtgtgctactatttttatttatgatataatctaatggaattaatttgaattgatatttatccaatactaaagattatattagaatcaaattaatcttttatacgagaaaaaataacgacatacgtcgtcaacaaattaaactttttatttattagttaactagcttatagaacttgctcattgttatgtttctaaaacgggtacggcatataggacaattatccgacgcaccggtttctcttcgtgttctatgccatatattgatgcatgttatgcaaaatatatgagtacacgaatccaataaaccaaagtatctatcgttttgagtaaacaacttcatagcaaattccacattctttttctttacttactctatacacgtcctcgtatttatttagtattttgatgatatccaactcagaaatggttgttgtattattgggtgtatttggagtataggtattattagctatgtaccaatttaccaaccctcttaatattgattgataatcacatcggttatccaattaataactaaattgtagtgtatatatagaccatatatgtttctatttttttgacagttacgtatagtttcagtaagttttgattgttgtattcctgtatctctagataagttagtcatatagtcccttccggcgatacgttttttccaagcccgaaattgattagccaaatgtgtatttatttttgtgatattgatataatatttcggataatgcatactgttagtcttatatcatttggttcatctatgtattgtaatattgttacatgatctatagatgatgtattgattttggcaggatcgaattccatatccgcgactaaacagtgaaaaaaatgtaaatactttttaaattttaaattagtaaaacttttttttattttttatgattccaaaaatactgaatacaaagtcctaaattataaatatggagatcatactaccacaacttattattatgtatacaaggccggtgtaatagatagatatatataattctattacaccggcagacaattaccgaccggtatttgtcgttaccaacataccgtataatatgtaatatacaattccataacccattgacagttgttatacatcaaaattgcaattcttttgattacgatgttataagaatgtagttaattgatgtatgatgttaatgtgtcctctttcctcttataacatcgtaatcaaaaacttttttataatatatacctaataatgtgtcttaatagttctcgtgattcgtcaaacaatcattcttataaaatataataaagcaacgtaaaaacacataaaaataagcgtaactaataagacaatggatatttacgacgataaaggtctacagactattaaactgtttaataatgaatttgattgtataaggaatgacatcagagaattatttaaacatgtaactgattccgatagtatacaacttccgatggaagacaattctgatattatagaaaatatcagaaaaatactatatagacgattaaaaaatgtagaatgtgttgacatcgataacacaataacttttatgaaatacgatccaaatgatgataataagcgtacgtgttctaattgggtacccttaactaataactatatggaatattgtctagtaatatatttggaaacaccgatatgtggaggcaaaataaaattataccaccctacaggaaatataaagtcggataaggatattatgtttgcaaagactctagactttaaatcaacgaaagtgttaactggacgtaaaacaattgccgttctagacatatccgtttcatataatagatcaatgactactattcactacaacgacgacgttgatatagatatacatactgataaaaatggaaaagagttatgttattgttatataacaatagatgatcattacttggttgatgtggaaactataggagttatagtcaatagatctggaaaatgtctgttagtaaataaccatctaggtataggtatcgttaaagataaacgtataagcgatagttttggagatgtatgtatggatacaatatttgacttttctgaagcacgagagttattttcattaactaatgatgataacaggaatatagcatgggacactgataaactagacgatgatacagatatatggactcccgtcacagaagatgattacaaatttctttctagactagtattgtatgcaaaatctcaatcggatactgtatttgactattatgttcttactggtgatacggaaccacccactgtattcattttcaaggtaactagattttactttaatatgccgaaataaaaaatttttgtataatatctagaggtagaggtattgtttagataaatacaaataacatagatacatcgcatacttagcatttttataaatatacataagacatacactttatacatttttgtaaaaatactcataaaaaaatttataaaaattatggcacaaccatatcttgtataggtagtttagttcgtcgagtgaacctataaacagataatagacaacacataataatgcctactaatacaagcataataccgggagatgggatatatgacgttgtagtgtttgggttttctgaacgttgatagtctactaatactacatgctgacatctaatgcctgtataaccatgagagcatctacaatacataccgtcaatatctctagcgtggatacagtcaccgtgtaaacaatatccatctccctctggaccgcataatctgatagctggaatatctgttgtagcgtttgtaatttctggcaatgtcgtttcgatagcgttaccactatcggcgaatgatctgattatcatagcagcgaacaacaacatcagataatttatcaacatttttgatggattctgtgtttatgctgtttctcagtgtgtgtttatgacaagattgggaattttatattattaattcagtaatataaactaataatatattgttaattgtgtaaataatataaaaataacaatacaatattgaatgtgttgctgttaaaaatgtatgtgttaatataatagaataaaataaatgagtatgatcattttagataacgattgattttatcattaccgcttcattcttatattctttgcttacggaacctatatttagaaacatctactaacaattttttatgcttgcattattaatggtatgtaatatgattgattgtgtacgcaataccaatttgttaagtatgaatacggggtacaaacataaattgaaatttaacattatttatttatgatatatatcgttatcgttaggtctataccatggatatctttaaagaactaatcttaaaacaccctgatgaaaatgttttgatttctccagtttccattttatctactttatctattctaaatcatggagcagctggttctacagctgaacaactatcaaaatatatagagaatatgaatgagaatacacccgatgacaataatgatgacatggaggtagatattccgtattgtgcgacactagctaccgcaaataaaatatacggtagcgatagtatcgagttccacgcctccttcctacaaaaaataaaagacgattttcaaactgtaaactttaataatgctaaccaaacaaaggaactaatcaacgaatgggttaagacaatgacaaatggtaaaattaattccttattgactagtccgctatccattaatactcgtatgacagttgttagcgccgtccattttaaagcaatgtggaaatatccattttctaaacatcttacatatacagacaagttttatatttctaagaatatagttaccagcgttgatatgatggtgggtaccgagaataacttgcaatatgtacatattaatgaattattcggaggattctctattatcgatattccatacgagggaaactctagtatggtaattatactaccggacgacatagaaggtatatataacatagaaaaaaatataacagatgaaaaatttaaaaaatggtgtggtatgttatctactaaaagtatagacttgtatatgccaaagtttaaagtggaaatgacagaaccgtataatctggtaccgattttagaaaatttaggacttactaatatattcggatattatgcagattttagcaagatgtgtaatgaaactatcactgtagaaaaatttctacatacgacgtttatagatgttaatgaggagtatacagaagcatcggccgttacaggagtatttacgattaacttttcgatggtatatcgtacgaaggtctacataaaccatccattcatgtacatgattaaagacaccacaggacgtatactttttatagggaaatactgctatccgcaataaatataaacaaatagacttttataaagagtcttcaacgataagtatatcgacatactacttatgctgcgaaagattctgaacgagaacgactatctcaccctcttggatcatatccgcactgctaaatactaaatctccactacactttttatcatcttatgaggaatgattgccttcgtgaaataggaataattagcaccagaatagctatggattattgtggtagagagtgcactattctatgtcgtctactggatgaagatgtgacgtacaaaaaaataaaactagaaattgaaacgtgtcacaacttatcaaaacatatagatagacgaggaaacaatgcgctacattgttacgtctccaataaatgcgatacagacattaagattgttctctcgcggagtcgagagactttgtagaaacaacgaaggattaactccgctaggagtatacagtaagcatagatacgtaaaatctcagattgtgcatctactgatatccagctattcaaattcctctaacgaactcaagtcgaatataaatgatttcgatctgtattcggataatatcgacttacgtctgctaaaatacctaattgtggataaacggatacgtccgtccaagaatacgaattatgcaatcaatggtctcggattggtggatatatacgtaacgacgcctaatccgagaccagaagtattgctatggcttcttaaatcagaatgttacagcaccggttacgtatttcgtacctgtatgtacgacagtgatatgtgtaagaactctcttcattactatatatcgtctcatagagaatctcaatctctatccaaggatgtaattaaatgtttgatcgataacaatgtttccatccatggcagagacgaaggaggatctttacccatccaatactactggtctttctcaaccatagatatagagattgttaaattattattaataaaggatgtggacacgtgtagagtatacgacgtcagccctatattagaggcgtattatctaaacaagcgatttagagtaaccccatataatgtagacatggaaatcgttaatcttcttattgagagacgtcatactcttgtcgacgtaatgcgtagtattacttcgtacgattccagagaatataaccactacatcatcgataacattctaaagagatttagacaacaggatgaatccatcgtacaagccatactgataaactacttacattacggcgatatggtcgttcgatgcatgttagataacggacaacaactatcctctacacgactactttgttaataataatctcgtcgatgtaaacgtcgtaaggtttatcgtggaaaatatggacacgcggctgtaaatcacgtatcgaacaatggccgtctatgtatgtacggtctgatattatcgagatttaataattgcgggtatcactgttatgaaaccatactgatagatgtatttgatatactaagcaagtacatggatgatatagatatgatcgataactctactatattacgcggtcgatgtcaataatatacaatttgcaaagcggttattggaatatggagcgagtatcacgctcgataatcaatacggccatccagaaaagcagttacagaagagaaaacaaaacgaaatcgttgttctacaagatgtctctccctacgacgattactacgtaaaaaagatactagcctactgcctattaagggacgagtcattcgcggaactacatagtaaattctgtttaaacgaggactataaaagtgtatttatgaaaaatatatcattcgataagatagattccatcatcgtgacataagtcgcctcaaagagattcgaatctccgacaccgacctgtatacggtatcacagctatcttaaagccatacattcagacagtcacatttcatttcccatgtacgacgatctcatagaacagtgccatctatcgatggagcgtaaaagtaaactcgtcgacaaagcactcaataaattagagtctaccatcggtcaatctagactatcgtatttgcctccggaaattatgcgcaatatcatctaaacagtatgttgtacggaaagaaccattacaaatattatccatgatagaaagaaaatatctatatgattggagaagtaggaaacaggaacaagacaacgattactacattattaaatcatgaagtccgtattatactcgtatatattgtttctctcatgtataataataaacggaagagatatagcaccgcatgcaccatccgatggaaagtgtaaagacaacgaatacaaacgccataatttgtgtccgggaacatacgcttccagattatgcgatagcaagactaacacacgatgtacgccgtgtggttcgggtaccttcacatctcgcaataatcatttacccgcttgtctaagttgtaacggaagacgcgatcgtgtaacacgactcacaatagaatctgtgaatgctctcccggatattattgtcttctcaaaggatcatccggatgcaaggcatgtgtttcccaaacaaaatgtggaataggatacggagtatccggagacgtcatctgttctccgtgtggtctcggaacatattctcacaccgtctcttccgcagataaatgcgaacccgtacccagaaatacgtttaactatatcgatgtggaaattaacctgtatccagttaacgacacgtcgtgtactcggacgaccactaccggtctcagcgaatccatctcaacgtcggaactaactattactatgaatcataaagactgtaatcccgtatttcgtgatggatacttctccgttcttaataaggtagcgacttcaggtttctttacaggagaaaggtgtgcactctgaatttcgagattaaatgcaataacaaagattcttcctccaaacagttaacgaaagcaaagaatgatactatcatgccgcattcggagacagtaactctagtgggcgacatctatatactatatagtaataccaatactcaagactacgaaactgatacaatctcttatcatgtgggtaatgttctcgatgtcgatagccatatgcccggtagttgcgatatacataaactgatcactaattccaaacccacccactttttatagtaagtttttcacccataaataataaatacaataattaatttctcgtaaaagtagaaaatatattctaatttattgcacggtaaggaagtagaatcataaagaacagtactcaatcaatagcaattatgaaacaatatatcgtcctggcatgcatgtgcctggcggcagctgctatgcctgccagtcttcagcaatcatcctcatcctcctcctcgtgtacggaagaagaaaacaaacatcatatgggaatcgatgttattatcaaagtcacaaagcaagaccaaacaccgaccaatgataagatttgccaatccgtaacggaaattacagagtccgagtcagatccagatcccgaggtggaatcagaagatgattccacatcagtcgaggatgtagatcctcctaccacttattactccatcatcggtggaggtctgagaatgaactttggattcaccaaatgtcctcagattaaatccatctcagaatccgctgatggaaacacagtgaatgctagattgtccagcgtgtccccaggacaaggtaaggactctcccgcgatcactcatgaagaagctcttgctatgatcaaagactgtgaagtgtctatcgacatcagatgtagcgaagaagagaaagacagcgacatcaagacccatccagtactcgggtctaacatctctcataagaaagtgagttacgaagatatcatcggttcaacgatcgtcgatacaaaatgcgtcaagaatctagagtttagcgttcgtatcggagacatgtgcaaggaatcatctgaacttgaggtcaaggatggattcaagtatgtcgacggatcggcatctgaaggtgcaaccgatgatacttcactcatcgattcaacaaaactcaaagcgtgtgtctgaatcgataactctattcatctgaaattggatgagtagggttaatcgaacgattcaggcacaccacgaattaaaaaagtgtaccggacactatattccggtttgcaaaacaaaaatgttcttaactacattcacaaaaagttacctctcgcgacttcttctttttctgtctcaatagtgtgatacgattatgacactattcctattcctattcctatttcctttcagagtatcacaaaaatattaaacctctttctgatggtctcataaaaaaagttttacaaaaatatttttattctctttctctctttgatggtctcataaaaaaagttttacaaaaatatttttattctctttctctctttgatggtctcataaaaaaagttttacaaaaatatttttattctctttctctctttgatggtctcataaaaaaagttttacaaaaatatttttattctctttctctctttgatggtctcataaaaaaagttttacaaaaatatttttattctctttctctctttgatggtctcataaaaaaagttttacaaaaatatttttattctctttctctctttgatggtctcataaaaaaagttttacaaaaatatttttattctctttctctctttgatggtctcataaaaaaagttttacaaaaatatttttattctctttctctctttgatggtctcataaaaaaagttttacaaaaatatttttattctctttctctctttgatggtctcataaaaaaagttttacaaaaatatttttattctctttctctctttgatggtctcataaaaaaagttttacaaaaatatttttattctctttctctctttgatggtctcataaaaaaagttttacaaaaatatttttattctctttctctctttgatggtctcataaaaaagttttacaaaaatatttttattctctttctctctttgatggtctcataaaaaagttttacaaaaatatttttattctctttctctctttgatggtctcataaaaaaagttttacaaaaatatttttattctctttctctctttgatggtctcataa

SEQ ID NO: 189 - DNA, 194908 bp, Artificial Sequence
  GLV-1h64
ttatgagaccatcaaagagagaaagagaataaaaatatttttgtaaaactttttttatgagaccatcaaagagagaaagagaataaaaatatttttgtaaaacttttttatgagaccatcaaagagagaaagagaataaaaatatttttgtaaaacttttttatgagaccatcaaagagagaaagagaataaaaatatttttgtaaaactttttttatgagaccatcaaagagagaaagagaataaaaatatttttgtaaaactttttttatgagaccatcaaagagagaaagagaataaaaatatttttgtaaaactttttttatgagaccatcaaagagagaaagagaataaaaatatttttgtaaaactttttttatgagaccatcaaagagagaaagagaataaaaatatttttgtaaaactttttttatgagaccatcaaagagagaaagagaataaaaatatttttgtaaaactttttttatgagaccatcaaagagagaaagagaataaaaatatttttgtaaaactttttttatgagaccatcaaagagagaaagagaataaaaatatttttgtaaaactttttttatgagaccatcaaagagagaaagagaataaaaatatttttgtaaaactttttttatgagaccatcaaagagagaaagagaataaaaatatttttgtaaaactttttttatgagaccatcaaagagagaaagagaataaaaatatttttgtaaaactttttttatgagaccatcaaagagagaaagagaataaaaatatttttgtaaaactttttttatgagaccatcagaaagaggtttaatatttttgtgatactctgaaaggaaataggaataggaataggaatagtgtcataatcgtatcacactattgagacagaaaaagaagaagtcgcgagaggtaactttttgtgaatgtagttaagaacatttttgttttgcaaaccggaatatagtgtccggtacacttttttaattcgtggtgtgcctgaatcgttcgattaaccctactcatccaatttcagatgaatagagttatcgattcagacacacgctttgagttttgttgaatcgatgagtgaagtatcatcggttgcaccttcagatgccgatccgtcgacatacttgaatccatccttgacctcaagttcagatgattccttgcacatgtctccgatacgaacgctaaactctagattcttgacgcattttgtatcgacgatcgttgaaccgatgatatcttcgtaactcactttcttatgagagatgttagacccgagtactggatgggtcttgatgtcgctgtctttctcttcttcgctacatctgatgtcgatagacacttcacagtctttgatcatagcaagagcttcttcatgagtgatcgcgggagagtccttaccttgtcctggggacacgctggacaatctagcattcactgtgtttccatcagcggattctgagatggatttaatctgaggacatttggtgaatccaaagttcattctcagacctccaccgatgatggagtaataagtggtaggaggatctacatcctcgactgatgtggaatcatcttctgattccacctcgggatctggatctgactcggactctgtaatttccgttacggattggcaaatcttatcattggtcggtgtttggtcttgctttgtgactttgataataacatcgattcccatatgatgtttgttttcttcttccgtacacgaggaggaggatgaggatgattgctgaagactggcaggcatagcagctgccgccaggcacatgcatgccaggacgatatattgtttcataattgctattgattgagtactgttctttatgattctacttccttaccgtgcaataaattagaatatattttctacttttacgagaaattaattattgtatttattatttatgggtgaaaaacttactataaaaagtgggtgggtttggaattagtgatcagtttatgtatatcgcaactaccgggcatatggctatcgacatcgagaacattacccacatgataagagattgtatcagtttcgtagtcttgagtattggtattactatatagtatatagatgtcgcccactagagttactgtctccgaatgcggcatgatagtatcattctttgctttcgttaactgtttggaggaagaatctttgttattgcatttaatctcgaaattcagagtgcacacctttctcctgtaaagaaacctgaagtcgctaccttattaagaacggagaagtatccatcacgaaatacgggattacagtctttatgattcatagtaatagttagttccgacgttgagatggattcgctgagaccggtagtggtcgtccgagtacacgacgtgtcgttaactggatacaggttaatttccacatcgatatagttaaacgtatttctgggtacgggttcgcatttatctgcggaagagacggtgtgagaatatgttccgagaccacacggagaacagatgacgtctccggatactccgtatcctattccacattttgtttgggaaacacatgccttgcatccggatgatcctttgagaagacaataatatccgggagagcattcacagattctattgtgagtcgtgttacacgatcgcgtcttccgttacaacttagacaagcgggtaaatgattattgcgagatgtgaaggtacccgaaccacacggcgtacatcgtgtgttagtcttgctatcgcataatctggaagcgtatgttcccggacacaaattatggcgtttgtattcgttgtctttacactttccatcggatggtgcatgcggtgctatatctcttccgtttattattatacatgagagaaacaatatatacgagtataatacggacttcatgatttaataatgtagtaatcgttgtcttgttcctgtttcctacttctccaatcatatagatattttctttctatcatggataatatttgtaatggttctttccgtacaacatactgtttagatgatattgcgcataatttccggaggcaaatacgatagtctagattgaccgatggtagactctaatttattgagtgctttgtcgacgagtttacttttacgctccatcgatagatggcactgttctatgagatcgtcgtacatgggaaatgaaatgtgactgtctgaatgtatggctttaagatagctgtgataccgtatacaggtcggtgtcggagattcgaatctctttgaggcgacttatgtcacgatgatggaatctatcttatcgaatgatatatttttcataaatacacttttatagtcctcgtttaaacagaatttactatgtagttccgcgaatgactcgtcccttaataggcagtaggctagtatcttttttacgtagtaatcgtcgtagggagagacatcttgtagaacaacgatttcgttttgttttctcttctgtaactgcttttctggatggccgtattgattatcgagcgtgatactcgctccatattccaataaccgctttgcaaattgtatattattgacatcgaccgcgtaatatagtagagttatcgatcatatctatatcatccatgtacttgcttagtatatcaaatacatctatcagtatggtttcataacagtgatacccgcaattattaaatctcgataatatcagaccgtacatacatagacggccattgttcgatacgtgatttacagccgcgtgtccatattttccacgataaaccttacgacgtttacatcgacgagattattattaacaaagtagtcgtgtagaggatagttgttgtccgttatctaacatgcatcgaacgaccatatcgccgtaatgtaagtagtttatcagtatggcttgtacgatggattcatcctgttgtctaaatctctttagaatgttatcgatgatgtagtggttatattctctggaatcgtacgaagtaatactacgcattacgtcgacaagagtatgacgtctctcaataagaagattaacgatttccatgtctacattatatggggttactctaaatcgcttgtttagataatacgcctctaatatagggctgacgtcgtatactctacacgtgtccacatcctttattaataataatttaacaatctctatatctatggttgagaaagaccagtagtattggatgggtaaagatcctccttcgtctctgccatggatggaaacattgttatcgatcaaacatttaattacatccttggatagagattgagattctctatgagacgatatatagtaatgaagagagttcttacacatatcactgtcgtacatacaggtacgaaatacgtaaccggtgctgtaacattctgatttaagaagccatagcaatacttctggtctcggattaggcgtcgttacgtatatatccaccaatccgagaccattgattgcataattcgtattcttggacggacgtatccgtttatccacaattaggtattttagcagacgtaagtcgatattatccgaatacagatcgaaatcatttatattcgacttgagttcgttagaggaatttgaatagctggatatcagtagatgcacaatctgagattttacgtatctatgcttactgtatactcctagcggagttaatccttcgttgtttctacaaagtctctcgactccgcgagagaacaatcttaatgtctgtatcgcatttattggagacgtaacaatgtagcgcattgtttcctcgtctatctatatgttttgataagttgtgacacgtttcaatttctagttttatttttttgtacgtcacatcttcatccagtagacgacatagaatagtgcactctctaccacaataatccatagctattctggtgctaattattcctatttcacgaaggcaatcattcctcataagatgataaaaagtgtagtggagatttagtatttagcagtgcggatatgatccaagagggtgagatagtcgttctcgttcagaatctttcgcagcataagtagtatgtcgatatacttatcgttgaagactctttataaaagtctatttgtttatatttattgcggatagcagtatttccctataaaaagtatacgtcctgtggtgtctttaatcatgtacatgaatggatggtttatgtagaccttcgtacgatataccatcgaaaagttaatcgtaaatactcctgtaacggccgatgcttctgtatactcctcattaacatctataaacgtcgtatgtagaaatttttctacagtgatagtttcattacacatcttgctaaaatctgcataatatccgaatatattagtaagtcctaaattttctaaaatcggtaccagattatacggttctgtcatttccactttaaactttggcatatacaagtctatacttttagtagataacataccacaccattttttaaatttttcatctgttatatttttttctatgttatatataccttctatgtcgtccggtagtataattaccatactagagtttccctcgtatggaatatcgataatagagaatcctccgaataattcattaatatgtacatattgcaagttattctcggtacccaccatcatatcaacgctggtaactatattcttagaaatataaaacttgtctgtatatgtaagatgtttagaaaatggatatttccacattgctttaaaatggacggcgctaacaactgtcatacgagtattaatggatagcggactagtcaataaggaattaattttaccatttgtcattgtcttaacccattcgttgattagttcctttgtttggttagcattattaaagtttacagtttgaaaatcgtcttttattttttgtaggaaggaggcgtggaactcgatactatcgctaccgtatattttatttgcggtagctagtgtcgcacaatacggaatatctacctccatgtcatcattattgtcatcgggtgtattctcattcatattctctatatattttgatagttgttcagctgtagaaccagctgctccatgatttagaatagataaagtagataaaatggaaactggagaaatcaaaacattttcatcagggtgttttaagattagttctttaaagatatccatggtatagacctaacgataacgatatatatcataaataaataatgttaaatttcaatttatgtttgtaccccgtattcatacttaacaaattggtattgcgtacacaatcaatcatattacataccattaataatgcaagcataaaaaattgttagtagatgtttctaaatataggttccgtaagcaaagaatataagaatgaagcggtaatgataaaatcaatcgttatctaaaatgatcatactcatttattttattctattatattaacacatacatttttaacagcaacacattcaatattgtattgttatttttatattatttacacaattaacaatatattattagtttatattactgaattaataatataaaattcccaatcttgtcataaacacacactgagaaacagcataaacacagaatccatcaaaaatgttgataaattatctgatgttgttgttcgctgctatgataatcagatcattcgccgatagtggtaacgctatcgaaacgacattgccagaaattacaaacgctacaacagatattccagctatcagattatgcggtccagagggagatggatattgtttacacggtgactgtatccacgctagagatattgacggtatgtattgtagatgctctcatggttatacaggcattagatgtcagcatgtagtattagtagactatcaacgttcagaaaacccaaacactacaacgtcatatatcccatctcccggtattatgcttgtattagtaggcattattatgtgttgtctattatctgtttataggttcactcgacgaactaaactacctatacaagatatggttgtgccataatttttataaatttttttatgagtatttttacaaaaatgtataaagtgtatgtcttatgtatatttataaaaatgctaagtatgcgatgtatctatgttatttgtatttatctaaacaatacctctacctctagatattatacaaaaattttttatttcggcatattaaagtaaaatctagttaccttgaaaatgaatacagtgggtggttccgtatcaccagtaagaacataatagtcaaatacagtatccgattgagattttgcatacaatactagtctagaaagaaatttgtaatcatcttctgtgacgggagtccatatatctgtatcatcgtctagtttatcagtgtcccatgctatattcctgttatcatcattagttaatgaaaataactctcgtgcttcagaaaagtcaaatattgtatccatacatacatctccaaaactatcgcttatacgtttatctttaacgatacctatacctagatggttatttactaacagacattttccagatctattgactataactcctatagtttccacatcaaccaagtaatgatcatctattgttatataacaataacataactcttttccatttttatcagtatgtatatctatatcaacgtcgtcgttgtagtgaatagtagtcattgatctattatatgaaacggatatgtctagaacggcaattgttttacgtccagttaacactttcgttgatttaaagtctagagtctttgcaaacataatatccttatccgactttatatttcctgtagggtggtataattttattttgcctccacatatcggtgtttccaaatatattactagacaatattccatatagttattagttaagggtacccaattagaacacgtacgcttattatcatcatttggatcgtatttcataaaagttattgtgttatcgatgtcaacacattctacattttttaatcgtctatatagtatttttctgatattttctataatatcagaattgtcttccatcggaagttgtatactatcggaatcagttacatgtttaaataattctctgatgtcattccttatacaatcaaattcattattaaacagtttaatagtctgtagacctttatcgtcgtaaatatccattgtcttattagttacgcttatttttatgtgtttttacgttgctttattatattttataagaatgattgtttgacgaatcacgagaactattaagacacattattaggtatatattataaaaaagtttttgattacgatgttataagaggaaagaggacacattaacatcatacatcaattaactacattcttataacatcgtaatcaaaagaattgcaattttgatgtataacaactgtcaatgggttatggaattgtatattacatattatacggtatgttggtaacgacaaataccggtcggtaattgtctgccggtgtaatagaattatatatatctatctattacaccggccttgtatacataataataagttgtggtagtatgatctccatatttataatttaggactttgtattcagtatttttggaatcataaaaaataaaaaaaagttttactaatttaaaatttaaaaagtatttacatttttttcactgtttagtcgcggatatggaattcgatcctgccaaaatcaatacatcatctatagatcatgtaacaatattacaatacatagatgaaccaaatgatataagactaacagtatgcattatccgaaatattatatcaatatcacaaaaataaatacacatttggctaatcaatttcgggcttggaaaaaacgtatcgccggaagggactatatgactaacttatctagagatacaggaatacaacaatcaaaacttactgaaactatacgtaactgtcaaaaaaatagaaacatatatggtctatatatacactacaatttagttattaattggataaccgatgtgattatcaatcaatattaagagggttggtaaattggtacatagctaataatacctatactccaaatacacccaataatacaacaaccatttctgagttggatatcatcaaaatactaaataaatacgaggacgtgtatagagtaagtaaagaaaaagaatgtggaatttgctatgaagttgtttactcaaaacgatagatactttggtttattggattcgtgtactcatatattttgcataacatgcatcaatatatggcatagaacacgaagagaaaccggtgcgtcggataattgtcctatatgccgtacccgttttagaaacataacaatgagcaagttctataagctagttaactaataaataaaaagtttaatttgttgacgacgtatgtcgttattttttctcgtataaaagattaatttgattctaatataatctttagtattggataaatatcaattcaaattaattccattagattatatcataaataaaaatagtagcacacaactacttcagcaaacattctttttataaatgccatctagcgtagcgaggacacaagtgaacctataattatcaaatttattagtatcagtcacatgaaggactttacgtagagtgacgattccactatctgtggtacgaacggtttcatcttctttgatgccatcacccagatgttctataaacttggtatcctcgtccgatttcatatcctttgccaaccaatacatatagctaaactcaggcatatgttccacacatcctgaacaatgaaattctccagaagatgttacaatgtctagatttggacatttggtttcaaccgcgttaacatatgagtgaacacacccatacatgaaagcgatgagaaataggattctcatcttgccaaaatatcactagaaaaaatttatttatcagttttaaaggtataaaaaatacttattgttgctcgaatattttgtatttgatggtatacggaagattagaaatgtaggtattatcatcaactgattctatggttttatgtattctatcatgtttcactattgcgttggaaataatatcatatgcttccacatatattttattttgttttaactcataatactcacgtaattctggattattggcatatctatgaataattttagctccatgatcagtaaatattaatgagaacatagtattaccacctaccattatttttttcatctcattcaattcttaattgcaaagatctatataatcattatagcgttgacttatggactctggaatcttagacgatgtacagtcatctataatcatggcatatttaatacattgttttatagcatagtcgttatctacgatgttagatatttctctcaatgaatcaatcacacaatctaatgtaggtttatgacataatagcattttcagcagttcaatgtttttagattcgttgatggcaatggctatacatgtatatccgttatttgatctaatgttgacatctgaaccggattctagcagtaaagatactagagattgtttattatatctaacagccttgtgaagaagtgtttctcctcgtttgtcaatcatgttaatgtctttaagataaggtaggcaaatgtttatagtactaagaattgggcaagcataagacatgtcacaaagacccttttttgtatgtataagtgtaaaaattataacatccatagttggatttacataggtgtccaatcgggatctctccatcatcgagataattgatggcatctcccttccttttttagtagatatttcatcgtgtaagaatcaatattaatatttctaaagtatccgtgtatagcctctttatttaccacagctccatattccactagagggatatcgccgaatgtcatatactcaattagtatatgttggaggacatccgagttcattgttttcaatatcaaagagatggtttccttatcatttctccatagtggtacaatactacacattattccgtgcggctttccattttccaaaaacaatttgaccaaatctaaatctacatctttattgtatctataatcactatttagataatcagccataattcctcgagtgcaacatgttagatcgtctatatatgaataagcagtgttatctattcctttcattaacaatttaacgatgtctatatctatatgagatgacttaatataatattgaagagctgtacaatagtttttatctataaaagacggcttgattccgtgattaattagacatttaacaacttccggacgcacatatgctctcgtatccgactctgaatacagatgagagatgatatacagatgcaatacggtaccgcaatttcgtagttgataatcatcatacgcgtatcagtactcgtcctcataaagaacactgcagccattttctatgaacaaatcaataattttagaaacaggatcattgtcattacataattttctataactgaacgatggttttcacatttaacactcaagtcaaatccatgttctaccaacacctttatcaagtcaacgtctacatttttggatttcatatagctgaatatattaaagttatttatgttgctaaatccagtggcttctagtagagccatcgctatatccttattaactttaacatgtctactatttgtgtattcttctaatggggtaagctgtctccaatttttgcgtaatggattagtgccactgtctagtagtagtttgacgacctcgacattattacaatgctcattaaaaaggtatgcgtgtaaagcattattcttgaattggttcctggtatcattaggatctctgtctttcaacatctgtttaagttcatcaagagccacctcctcattttccaaatagtcaaacattttgactgaatgagctactgtgaactctatacacccacacaactaatgtcattaaatatcatgtcaaaaacttgtacaattattaataaaaataatttagtgtttaaattttaccagttccagattttacacctccgttaatacctccattaaccccactggacgatcctcctccccacattccaccgccaccagatgtataagttttagatcctttattactaccatcatgtccatggataaagacactccacatgccgccactaccccctttagaagacatattaataagacttaaggacaagtttaacaataaaattaatcacgagtaccctactaccaacctacactattatatgattatagtttctatttttacagtaccttgactaaagtttctagtcacaagagcaatactaccaacctacactattatatgattatagtttctatttttataggaacgcgtacgagaaaatcaaatgtctaatttctaacggtagtgttgataaacgattgttatccgcggatacctcctctatcatgtcgtctattttcttactttgttctattaacttattagcattatatattatttgattataaaacttatattgcttattagcccaatctgtaaatatcggattattaacatatcgtttctttgtaggtttatttaacatgtacatcactgtaagcatgtccttaccatttattttaatttgacgcatatccgcaatttctttttcgcagtcggttataaattctatatatgatggatacatgctacatgtgtacttataatcgactaatatgaagtacttgatacatattttcagtaacgatttattattaccacctatgaataagtacctgtgatcgtctaggtaatcaactgttttcttaatacattcgatggttggtaatttactcagaataatttccaatatcttaatatataattctgctatttctgggatatatttatctgccagtataacacaaatagtaatacatgtaaacccatattttgttattatattaatgtctgcgccattatctattaaccattctactaggctgacactatgcgactcaatacaatgataaagtatactacatccatgtttatctattttgtttatatcatcaatatacggcttacaaagttttagtatcgataacacatccaactcacgcatagagaaggtagggaataatggcataatatttattaggttatcatcattgtcattatctacaactaagtttccattttttaaaatatactcgacaactttaggatctctattgccaaatttttgaaaatatttatttatatgcttaaatctatataatgtagctccttcatcaatcatacatttaataacattgatgtatactgtatgataagatacatattctaacaatagatcttgtatagaatctgtatatcttttaagaattgtggatattaggatattattacataaactattacacaattctaaaatataaaacgtatcacggtcgaataatagttgatcaactatataattatcgattttgtgatttttcttcctaaactgtttacgtaaatagttagatagaatattcattagttcatgaccactatagttactatcgaataacgcgtcaaatatttcccgtttaatatcgcatttgtcaagataataatagagtgtggtatgttcacgataagtataataacgcatctctttttcgtgtgaaattaaatagtttattacgtccaaagatgtagcataaccatcttgtgacctagtaataatataataatagagaactgttttacccattctatcatcataatcagtggtgtagtcgtaatcgtaatcgtctaattcatcatcccaattataatattcaccagcacgtctaatctgttctattttgatcttgtatccatactgtatgttgctacatgtaggtattcctttatccaataatagtttaaacacatctacattgggatttgatgttgtagcgtatttttctacaatattaataccatttttgatactatttatttctatacctttcgaaattagtaatttcaataagtctatattgatgttatcagaacatagatattcgaatatatcaaaatcattgatatttttatagtcgactgacgacaataacaaaatcacaacatcgtttttgatattattatttttcttggtaacgtatgcctttaatggagtttcaccatcatactcatataatggatttgcaccactttctatcaatgattgtgcactgctggcatcgatgttaaatgttttacaactatcatagagtatcttatcgttaaccatgattggttgttgatgctatcgcattttttggtttctttcatttcagttatgtatggatttagcacgtttgggaagcatgagctcatatgatttcagtactgtagtgtcagtactattagtttcaataagatcaatctctagatctatagaatcaaaacacgataggtcagaagataatgaatatctgtaggcttcttgttgtactgtaacttctggttttgttagatggttgcatcgtgctttaacgtcaatggtacaaattttatcctcgctttgtgtatcatattcgtccctactataaaattgtatattcagattatcatgcgatgtgtatacgctaacggtatcaataaacggagcacaccatttagtcataaccgtaatccaaaaatttttaaagtatatcttaacgaaagaagttgtgtcattgtctacggtgtatggtactagatcctcataagtgtatatatctagagtaatgtttaatttattaaatggttgataatatggatcctcgtgacaatttccgaagatggaaataagacataaacacgcaataaatctaattgcggacatggttactccttaaaaaaatacgaataatcaccttggctatttagtaagtgtcatttaacactatactcatattaatccatggactcataatctctatacgggattaacggatgttctatatacggggatgagtagttctcttctttaactttatactttttactaatcatatttagactgatgtatgggtaatagtgtttgaagagctcgttctcatcatcagaataaatcaatatctctgtttttttgttatacagatgtattacagcctcatatattacgtaatagaacgtgtcatctaccttattaactttcaccgcatagttgtttgcaaatacggttaatcctttgacctcgtcgatttccgaccaatctgggcgtataatgaatctaaactttaattgcttgtaatcattcgaaataatttttagtttgcatccgtagttatcccctttatgtaactgtaaatttctcaacgcgatatctccattaataatgatgtcgaattcgtgctgtatacccatactgaatggatgaacgaataccgacggcgttaatagtaatttactttttcatctttacatattgggtactagttttactatcataagtttataaattccacaagctactatggaataagccaaccatcttagtataccacacatgtcttaaagtttattaattaattacatgttgttttatatatatcgctacgaatttaaagagaaattagtttaggaagaaaaattatctatctacatcatcacgtctctgtattctacgatagagtgctactttaagatgcgacagatccgtgtcatcaaatatatactccattaaaatgattattccggcagcgaacttgatattggatatatcacaacctttgttaatatctacgacaatagacagcagtcccatggttccataaacagtgagtttatctttctttgaagagatattttgtagagatcttataaaactgtcgaatgacatcgcatttatatctttagctaaatcgtatatgttaccatcgtaatatctaaccgcgtctatcttaaacgtttccatcgctttaaagacgtttccgatagatggtctcatttcatcagtcatactgagccaacaaatataatcgtgtataacatctttgatagaatcagactctaaagaaaacgaatcggctttattatacgcattcatgataaacttaatgaaaaatgtttttcgttgtttaagttggatgaatagtatgtcttaataattgttattatttcattaattaatatttagtaacgagtacactctataaaaacgagaatgacataactaatcataactagttatcaaagtgtctaggacgcgtaattttcatatggtatagatcctgtaagcattgtctgtattctggagctattttctctatcgcattagtgagttcagaatatgttataaatttaaatcgaataacgaacataactttagtaaagtcgtctatattaactcttttattttctagccatcgtaataccatgtttaagatagtatattctctagttactacgatctcatcgttgtctagaatatcacatactgaatctacatccaattttagaaattggtctgtgttacatatctcttctatattattgttgatgtattgtcgtagaaaactattacgtagaccattttctttataaaacgaatatatagtactccaattatctttaccgatatatttgcacacataatccattctctcaatcactacatctttaagattttcgttgttaagatatttggctaaactatataattctattagatcatcaacagaatcagtatatatttttctagatccaaagacgaactctttggcgtcctctataatattcccagaaaagatattttcgtgttttagtttatcgagatctgatctgttcatatacgccatgattgtacggtacgttatgataaccgcataaaataaaaatccattttcatttttaaccaatactattcataattgagattgatgtaatactttgttactttgaacgtaaagacagtacacggatccgtatctccaacaagcacgtagtaatcaaatttggtgttgttaaacttcgcaatattcatcaatttagatagaaacttatactcatcatctgttttaggaatccatgtattattaccactttccaacttatcattatcccaggctatgtttcgtccatcatcgttgcgcagagtgaataattcttttgtattcggtagttcaaatatatgatccatgcatagatcggcaaagctattgtagatgtgatttttcctaaatctaatataaaactcgtttactagcaaacactttcctgatttatcgaccaagacacatatggtttctaaatctatcaagtggtggggatccatagttatgacgcagtaacatatattattacattcttgactgtcgctaatatctaaatatttattgttatcgtattggattctgcatatagatggcttgtatgtcaaagatatagaacacataaccaatttatagtcgcgctttacattctcgaatctaaagttaagagatttagaaaacattatatcctcggatgatgttatcactgtttctggagtaggatatattaaagtctttacagatttcgtccgattcaaataaatcactaaataatatcccacattatcatctgttagagtagtatcattaaatctattatattttatgaaagatatatcactgctcacctctatatttcgtacatttttaaactgtttgtataatatctctctgatacaatcagatatatctattgtgtcggtagacgataccgttacatttgaattaatggtgttccattttacaacttttaacaagttgaccaattcatttctaatagtatcaaactctccatgattaaatattttaatagtatccattttatatcactacggacacaaagtagctgacataaaccattgtataatttttatgttttatgtttattagcgtacacattttggaagttccggcttccatgtatttcctggagagcaagtagatgatgaggaaccagatagtttatatccgtacttgcacttaaagtctacattgtcgttgtatgagtatgatcttttaaacccgctagacaagtatccgtttgatattgtaggatgtggacatttaacaatctgacacgtgggtggatcggaccattctcctcctgaacacaggacactagagttaccaatcaacgaatatccactattgcaactataagttacaacgctcccatcggtataaaaatcctcgtatccgttatgtcttccgttggatatagatggaggggattggcatttaacagattcacaaataggtgcctcgggattccataccatagatccagtagatcctaattcacaatacgatttagattcaccgatcaactgatatccgctattacaagagtacgttatactagagccaaagtctactccaccaatatcaagttggccattatcgatatctcgaggcgatgggcatctccgtttaatacattgattaaagagtgtccatccagtacctgtacatttagcatatataggtcccattttttgctttctgtatccaggtagacatagatattctatagtgtctcctatgttgtaattagcattagcatcagtctccacactattcttaaatttcatattaatgggtcgtgacggaatagtacagcatgatagaacgcatcctattcccaacaatgtcaggaacgtcacgctctccaccttcatatttatttatccgtaaaaatgttatcctggacatcgtacaaataataaaaagcccatatatgttcgctattgtagaaattgtttttcacagttgctcaaaaacgatggcagtgacttatgagttacgttacactttggagtctcatctttagtaaacatatcataatattcgatattacgagttgacatatcgaacaaattccaagtatttgattttggataatattcgtattttgcatctgctataattaagatataatcaccgcaagaacacacgaacatctttcctacatggttaaagtacatgtacaattctatccatttgtcttccttaactatatatttgtatagataattacgagtctcgtgagtaattccagtaattacatagatgtcgccgtcgtactctacagcataaactatactatgatgtctaggcatgggagacttttttatccaacgatttttagtgaaacattccacatcgtttaatactacatatttctcatacgtggtataaactccacccattacatatatatcatcgtttacgaataccgacgcgcctgaatatctaggagtaattaagtttggaagtcttatccatttcgaagtgccgtgtttcaaatattctgccacacccgttgaaatagaaaattctaatcctcctattacatataactttccatcgttaacacaagtactaacttctgattttaacgacgacatattagtaaccgttttccattttttcgttttaagatctacccgcgatacggaataaacatgtctattgttaatcatgccgccaataatgtatagacaattatgtaaaacatttgcattatagaattgtctatctgtattaccgactatcgtccaatattctgttctaggagagtaatgggttattgtggatatataatcagagtttttaatgactactatattatgttttataccatttcgtgtcactggctttgtagatttggatatagttaatcccaacaatgatatagcattgcgcatagtattagtcataaacttgggatgtaaaatgttgatgatatctacatcgtttggatttttatgtatccactttaataatatcatagctgtaacatcctcatgatttacgttaacgtcttcgtgggataagatagttgtcagttcatcctttgataattttccaaattctggatcggatgtcaccgcagtaatattgttgattatttctgacatcgacgcattatatagttttttaattccatatcttttagaaaagttaaacatccttatacaatttgtgaaattaatattatgaatcatagtttttacacatagatctactacaggcggaacatcaattattatggcagcaactagtatcatttctacattgtttatggtgatgtttatcttcttccagcgcatatagtctaatagcgattcaaacgcgtgatagtttataccattcaatataatcgcttcatcctttagatggtgatcctgaatgcgtttaaaaaaattatacggagacgccgtaataatttccttattcacttgtataatttccccattgatagaaaatattacgctttccattcttaaagtactataagtaattatagtataatgtaaacgtttatatattcaatatttttataaaaatcattttgacattaattcctttttaaatttccgtctatcatctatagaaacgtattctatgaatttataaaatgcttttacgtgtcctatcgtaggcgatagaaccgctaaaaagcctatcgaatttctacaaaagaatctgttatatggtatagggagagtataaaacattaaatgtccgtacttattaaagtattcagtagccaatcctaactctttcgaatacttattaatggctcttgttctgtacgaatctatttttttgaacaacggacctagtggtatatcttgttctatgtatctaaaataatgtctgactagatccgttagtttaatatccgcagtcatcttgtctagaatggcaaatctaactgcgggtttaggctttagtttagtttctatatctacatctatgtctttatctaacaccaaaaatataatagctaatattttattacaatcatccggatattcttctacgatctcactaactaatgtttctttggttatactagtatagtcactatcggacaaataaagaaaatcagatgatcgatgaataatacatttaaattcatcatctgtaagatttttgagatgtctcattagaatattattagggttagtactcattatcattcggcagctattacttattttattatttttcaccatatagatcaatcattagatcatcaaaatatgtttcaatcatcctaaagagtatggtgaatgactcttcccatctaatttctgaacgttcaccaatgtctctagccactttggcactaatagcgatcattcgcttagcgtcttctatattattaactggttgatttaatctatctagcaatggaccgtcggacagcgtcattctcatgttcttaatcaatgtacatacatcgccgtcatctaccaattcatccaacaacataagctttttaaaatcatcattataataggtttgatcgttgtcatttctccaaagaatatatctaataagtagagtcctcatgcttagttaacaactattttttatgttaaatcaattagtacaccgctatgtttaatacttattcatattttagtttttaggattgagaatcaatacaaaaattaatgcatcattaattttagaaatacttagtttccacgtagtcaatgaaacatttgaactcatcgtacaggacgttctcgtacaggacgtaactataaaccggtttatatttgttcaagatagatacaaatccgataactttttttacgaattctacgggatccactttaaaagtgtcataccgggttctttttatttttttaaacagatcaatggtgtgatgttgattaggtcttttacgaatttgatatagaatagcgtttacatattctccataatggtcaatcgccatttgttcgtatgtcataaattctttaattatatgacactgtgtattatttagttcatccttgttcattgttaggaatctatccaaaatggcaattatactagaactataggtgcgttgtatacacatattgatgtgtctgtttatacaatccatgatatttggatccatgctactaccttcgggtaaaattgtagcatcatataccatttctagtactttaggttcattattatccattgcagaggacgtcatgatcgaatcataaaaaaatatattatttttatgttattttgttaaaaataatcatcgaatacttcgtaagatactccttcatgaacataatcagttacaaaacgtttatatgaagtaaagtatctacgatttttacaaaagtccggatgcataagtacaaagtacgcgataaacggaataataatagatttatctagtctatctttttctatagctttcatagttagatacatggtctcagaagtaggattatgtaacatcagcttcgataaaatgactgggttatttagtcttacacattcgctcatacatgtatgaccgttaactacagagtctacactaaaatgattgaacaatagatagtctaccattgtttcgtattcagatagtacagcgtagtacatggcatcttcacaaattatatcattgtctaatagatatttgacgcatcttatggatcccacttcaacagccatcttaaaatcatattgctttcctttatcattaataatttctagaacatcatctctatcataaaagatacaaatattaactgtttgatccgtaataacattgctagtcaatagcaatttgttaataagatgcgctgggctcaatgtcttaataagaagtgtaagaggactatctccgaatttgttttgtttattaacatccgttgatggaagtaaaagatctataatgtctacattcttgactgttttagagcatacaatatggagaggtgtatttccatcatgatctggttttgagggactaattcctagtttcatcatccatgagattgtagaagcttttggattgtctgacataagatgtctatgaatatgatttttgccaaatttatccactatcctggcttcgaatccgatggacattatttttttaaacactctttctgaaggatctgtacacgccaacaacggaccacatccttcttcatcaaccgagttgttaatcttggctccatactgtaccaataaatttattctctctatgacttcatcatctgttcccgagagataatatagaggtgttttatgctgtttatcacacgcgtttggatctgcgccgtgcgtcagcagcatcgcgactattctattattattaattttagaagctatatgcaatggataatttccatcatcatccgtctcatttggagagtatcctctatgaagaagttcttcgacaaatcgttcatctagtcctttaattccacaatacgcatgtagaatgtgataattatttccagaaggttcgatagcttgtagcatattcctaaatacatctaaatttttactattatatttggcataaagagatagataatactcggccgacataatgttgtccattgtagtataaaaattaatatttctatttctatttctgtatatttgcaacaatttactctctataacaaatatcataacttagtttttttatgtcaagaaggcactggtttagttcatctataaatgtcacgccataactaccacgcatgccatactcagaattatgataaagatatttatccttggggtgtaggtaatggggattaatctttgttggatcagtctctaagttaacacatgtcacacatgatccatttatagttatatcacacgatgatgatttatgaattgattccggaagatcgctatcgtattttgtggttccacaattcatttccatacatgttattgtcacactaatattatgatgaactttatctagccgctgagtggtaaacaacagaacagatagtttattatctttaccaacaccctcagccgctgccacaaatctctgatccgtatccatgatggtcatgtttatttctagtccgtatccagtcaacactatgttagcatttctgtcgatatagctttcactcatatgacactcaccaataatagtagaattaatgtcgtaatttacaccaatagtgagttcggcggcaaagtaccaataccggtaatcttgtcgaggaggacatatagtattcttgtattctaccgaatacccgagagatgcgatacaaaagagcaagactaatttgtaaaccatcttactcaaaatatgtaacaatagtacgatgcaatgagtaagacaataggaaatctatcttatatacacataattattctatcaattttaccaattagttagtgtaatgttaacaaaaatgtgggagaatctaattagtttttctttacacaattgacgtacatgagtctgagttccttgtttttgctaattatttcatccaatttattattcttgacgatatcgagatcttttgtataggagtcaaacttgtattcaacatgcttttctataatcattttagctatttcggcatcatccaatagtacattttccagattagcagaatagatattaatgtcgtatttgaacagagcctgtaacatctcaatgtctttattatctatagccaatttaatgtccggaatgaagagaagggaattattggtgtttgtcgacgtcatatagtcgagcaagagaatcatcatatccacgtgtccattttttatagtgatgtgaatacaactaaggagaatagccagatcaaaagtagatggtatctctgaaagaaagtaggaaacaatacttacatcattaagcatgacggcatgataaaatgaagttttccatccagttttcccatagaacatcagtctccaatttttcttaacaaacagttttaccgtttgcatgttaccactatcaaccgcataatacaatgcggtgtttcccttgtcatcaaattgtgaatcatccagtccactgaatagcaaaatctttactattttggtatcttccaatgtggctgcctgatgtaatggaaattcattctctagaagatttttcaatgctccagcgttcaacaacgtacatactagacgcacgttattatcagctattgcataatacaaggcactatgtccatggacatccgccttaaatgtatctttactagagagaaagcttttcagctgcttagacttccaagtattaattcgtgacagatccatgtctgaaacgagacgctaattagtgtatattttttcattttttataattttgtcatattgcaccagaattaataatatctttaatagatctgattagtagatacatggctatcgcaaaacaacatatacacatttaataaaaataatatttattaagaaaattcagatttcacgtacccatcaatataaataaaataatgattccttacaccgtacccatattaaggagattccaccttacccataaacaatataaatccagtaatatcatgtctgatgatgaacacaaatggtgtattaaattccagtttttcaggagatgatctcgccgtagctaccataatagtagatgcctctgctacagttccttgttcgtcgacatctatctttgcattctgaaacattttataaatatataatgggtccctagtcatatgtttaaacgacgcattatctggattaaacatactaggagccatcatttcggctatcgacttaatatccctcttattttcgatagaaaatttagggagtttaagattgtacactttattccctaattgagacgaccaatagtctaattttgcagccgtgatagaatctgtgaaatgggtcatattatcacctattgccaggtacatactaatattagcatccttatacggaaggcgtaccatgtcatattctttgtcatcgattgtgattgtatttccttgcaatttagtaactacgttcatcatgggaaccgttttcgtaccgtacttattagtaaaactagcattgcgtgttttagtgatatcaaacggatattgccatatacctttaaaatatatagtattaatgattgcccatagagtattattgtcgagcatattagaatctactacattagacataccggatctacgttctactatagaattaattttattaaccgcatctcgtctaaagtttaatctatataggccgaatctatgatattgttgataatacgacggtttaatgcacacagtattatctacgaaactttgataagttagatcagtgtacgtatatttagatgttttcagcttagctaatcctgatattaattctgtaaatgctggacccagatctctttttctcaaatccatagtcttcaataattctattctagtattacctgatgcaggcaatagcgacataaacatagaaaacgaataaccaaacggtgagaagacaatattatcatcttgaatatttttatacgctactataccggcattggtaaatccttgtagacgataggcggacgctgaacacgctaacgatagtatcaataacgcaatcatgattttatggtattaataattaaccttatttttatgttcggtataaaaaaattattgatgtctacacatccttttgtaattgacatctatatatccttttgtataatcaactctaatcactttaacttttacagttttccctaccagtttatccctatattcaacatatctatccatatgcatcttaacactctctgccaagatagcttcagagtgaggatagtcaaaaagataaatatatagagcataatcattctcgtatactctgccctttattacatcacccgcattgggcaacgaataacaaaatgcaagcatcttgttaacgggctcgtaaattgggataaaaattatgtttttattgtcttatatctattttattcaagagaatattcaggaatttctttttccggttgtatctcgtcgcagtatatatcatttgtacattgtttcatattttttaatagtttacaccttttagtaggactagtatcgtacaattcatagctgtattttgaattccaatcacgcataaaaatatcttccaattgttgacgaagacctaatccatcatccggtgtaatattaatagatgctccacatgtatccgtaaagtaatttcctgtccaatttgaggtacctatataggccgttttatcggttaccatatatttggcatggtttaccctagaatacggaatgggaggatcagcatctggtacaataaatagctttacttctatatttatgtttttagattttagcatagcgatagatcttaaaaagtttctcatgataaacgaagatcgttgccagcaactaatcaatagcttaacggatacttgtctgtctatagcggatcttcttaattcatcttctatataaggccaaaacaaaattttacccgccttcgaataaataatagggataaagttcataacagatacataaacgaatttactcgcatttctaatacatgacaataaagcggttaaatcattggttctttccatagtacatagttgttgcggtgcagaagcaataaatacagagtgtggaacgccgcttacgttaatactaagaggatgatctgtattataatacgacggataaaagtttttccaattatatggtagattgttaactccaagataccagtatacctcaaaaatttgagtgagatccgctgccaagttcctattattgaagatcgcaatacccaattccttgacctgagttagtgatctccaatccatgttagcgcttcctaaataaatatgtgtattatcagatatccaaaattttgtatgaagaactcctcctaggatatttgtaatatctatgtatcgtacttcaactccggccatttgtagtctttcaacatcctttaatggtttgttagatttattaacggctactctaactcgtactcctcttttgggtaattgtacaatctcgtttaatattatcgtgccgaaattcgtacccacttcatccgataaactccaataaaaagatgatatatctagtgtttttgtggtattggatagaatttccctccacatgttaaatgtagacaaatatactttatcaaattgcatacctataggaatagtttctgtaatcactgcgattgtattatccggattcattttatttgttaaaagaataatcctatatcacttcactctattaaaaatccaagtttctatttctttcatgactgattttttaacttcatccgtttccttatgaagatgatgtttggcaccttcataaatttttatttctctattacaatttgcatgttgcatgaaataatatgcacctaaaacatcgctaatcttattgtttgttccctggagtatgagagtcggggggtgttaatcttggaaattatttttctaaccttgttggtagccttcaagacctgactagcaaatccagccttaattttttcatgattgactaatgggtcgtattggtatttataaactttatccatatctctagatactgattctggacatagctttccgactggcgcatttggtgtgatggttcccataagtttggcagctagcagattcagtcttgaaacagcatctgcattaactagaggagacattagaatcattgctgtaaacaagtttggattatcgtaagaggctagctcccatggaatgacccaataagtagatttaatagttaccacgtgctgtaccaaagtcatcaatcatcattttttcaccattacttcttccatgtccaatatgatcatgtgagaatactaaaattcctaacgatgatatgttttcagctagttcgtcataacgtccagaatgtttaccagctccatgacttatgaatactaatgccttaggatatgtaataggtttccaatatttacaatatatgtaatcattgtccagattgaacatacagtttgcactcatgattcacgttatataactatcaatattaacagttcgtttgatgatcatattatttttatgttttattgataattgtaaaaacatacaattaaatcaatatagaggaaggagacggctactgtcttttgtaagatagtcatggcgactaaattagattatgaggatgctgttttttactttgtggatgatgataaaatatgtagtcgcgactccatcatcgatctaatagatgaatatattacgtggagaaatcatgttatagtgtttaacaaagatattaccagttgtggaagactgtacaaggaattgatgaagttcgatgatgtcgctatacggtactatggtattgataaaattaatgagattgtcgaagctatgagcgaaggagaccactacatcaattttacaaaagtccatgatcaggaaagtttattcgctaccataggaatatgtgctaaaatcactgaacattggggatacaaaaagatttcagaatctagattccaatcattgggaaacattacagatttgatgaccgacgataatataaacatcttgatactttttctagaaaaaaaattgaattgatgatataggggtcttcataacgcataattattacgttagcattctatatccgtgttaaaaaaaattatcctatcatgtatttgagagttttatatgtagcaaacatgatagctgtgatgccaataagctttagatattcacgcgtgctagtgttagggatggtattatctggtggtgaaatgtccgttatataatctacaaaacaatcatcgcatatagtatgcgatagtagagtaaacatttttatagtttttactggattcatacatcgtctacccaattcggttataaatgaaattgtcgccaatcttacacccaaccccttgttatccattagcatagtattaacttcgttatttatgtcataaactgtaaatgattttgtagatgccatatcatacatgatattcatgtccctattataatcattactaactttatcacaatatatgttgataatatctatatatgatctagtctttgtgggcaactgtctatacaagtcgtctaaacgttgtttactcatatagtatcgaacagccatcattacatggtcccgttccgttgatagataatcgagtatgttagtggacttgtcaaatctatataccatattttctggaagtggatatacatagtcgtgatcaacattattgctagcctcatcttctatatcctgtactataccattatctatatcatctacataatctatgatattattacacataaacatcgacaacatactattgtttattatctaagtcctgttgatccaaacccttgatctcctctatttgtactatctagagattgtacttcttccagttctggataatatatacgttgatagattagctgagctattctatctccagtatttacattaaacgtacattttccattattaataagaatgactcctatgtttcccctataatcttcgtctattacaccacctcctatatcaatgccttttagtgacagaccagacctaggagctattctaccatagcagaacttaggcatggacatactaatatctgtcttaattaactgtctttctcctggagggatagtataatcgtaagcgctatacaaatcatatccggcagcacccggcgattgcctagtaggagatttagctctgttagtttccttaacaaatctaactggtgagttaatattcatgttgaacataaaactaatattttatttcaaaattatttaccatcccatatattccatgaataagtgtgatgattgtacacttctatagtatctatatacgatccacgataaaatcctcctatcaatagcagtttattatccactatgatcaattctggattatccctcggataaataggatcatctatcagagtccatgtattgctggattcacaataaaattccgcatttctaccaaccaagaataaccttctaccgaacactaacgcgcatgatttataatgaggataataagtggatggtccaaactgccactgatcatgattgggtagcaaatattctgtagttgtatcagtttcagaatgtcctcccattacgtatataacattgtttatggatgccactgctggattacatctaggtttcagaagactcggcatattaacccaagcagcatccccgtggaaccaacgctcaacagatgtgggatttggtagacctcctactacgtataatttattgttagcgggtatcccgctagcatacagtctggggctattcatcggaggaattggaatccaattgtttgatatataatttacagctatagcattgttatgtatttcattgttcatccatccaccgatgagatatactacttctccaacatgagtacttgtacacatatggaatatatctataatttgatccatgttcataggatactctatgaatggatacttgtatgatttgcgtggttgtttatcacaatgaaatattttggtacagtctagtatccattttacattatttatacctctgggagaaagataatttgacctgattacatttttgataaggagtagcagatttcctaatttatttcttcgcctcatataccacttaatgacaaaatcaactacataatcctcatctggaacatttagttcatcgctttctagaataagtttcatagatagataatcaaaattgtctatgatgtcatcttccagttccaaaaagtgtttggcaataaagtttttagtatgacataagagattggatagtccgtattctatacccatcatgtaacactcgacacaatattcctttctaaaatctcgtaagataaagtttatacaagtgtagatgataaattctacagaggttaatatagaagcacgtaataaattgacgacgttatgactatctatatatacctttccagtatatgagtaaataactatagaagttaaactgtgaatgtcaaggtctagacaaacccttgtaactggatctttatttttcgtgtatttttgacgtaaatgtgtgcgaaagtaaggagataactttttcaatatcgtagaattgactattatattgcctcctatggcatcaataattgttttgaatttcttagtcatagacaatgctaatatattcttacagtacacagtattgacaaatatcggcatttatgtttctttaaaagtcaacatctagagaaaaatgattatctttttgagacataactcccattttttggtattcacccacacgtttttcgaaaaaattagtttttccttccaatgatatattttccatgaaatcaaacggattggtaacattataaatttttttaaatcccaattcagaaatcaatctatccgcgacgaattctatatatgttttcatcatttcacaattcattcctataagtttaactggaagagccgcagtaagaaattcttgttcaatggatactgcatctgttataatagatctaacggtttcttcactcggtggatgcaataaatgtttaaacatcaaacatgcgaaatcgcagtgcagaccctcgtctctactaattagttcgttggaaaacgtgagtccgggcattaggccacgctttttaagccaaaatatggaagcgaatgatccagaaaagaaaattccttctactgcagcaaaggcaataagtctctctccataaccggcgctgtcatgtatccacttttgagcccaatcggccttcttttttacacaaggcatcgtttctatggcattaaagagatagtttttttcattactatctttaacataagtatcgatcaaaagactatacatttccgaatgaatgttttcaatggccatctgaaatccgtagaaacatctagcctcggtaatctgtacttctgtacaaaatcgttccgccaaattttcattcactattccgtcactggctgcaaaaaacgccaatacatgttttataaaatatttttcgtctggtgttagtttattccaatcattgatatctttagatatatctacttcttccactgtccaaaatgatgcctctgcctttttatacatgttccagatgtcatgatattggattgggaaaataacaaatctatttggatttggtgcaaggatgggttccataactaaattaacaataacaataaattttttttcagttatctatatgcctgtacttggattttttgtacatcgatatcgccgcaatcactacaataattacaagtattattgatagcattgttattagtactatcataattaaattatctacattcatgggtgctgaataatcgttattatcatcattatcattttgtaattgtgacatcatactagataaatcgtttgcgagattgttgtgggaagcgggcatggaggatgcattatcattattatttaacgccttccatttggattcacaaatgttacgcacattcaacattttatggaaactataattttgtgaaaacaaataacaagaaaactcgtcatcgttcaaatttttaacgatagtaaaccgattaaacgtcgagctaatttctaacgctagcgactctgttggatatgggtttccagatatatatcttttcagttcccctacgtatctataatcatctgtaggaaatggaagatatttccatttatctactgttcctaatatcatatgtggtggtgtagtagaaccattaagcgcgaaagatgttatttcgcatcgtattttaacttcgcaataatttctggttagataacgcactctaccagtcaagtcaatgatattagcctttacagatatattcatagtagtcgtaacgatgactccatcttttagatgcgatactcctttgtatgtaccagaatcttcgtacctcaaactcgatatatttaaacaagttaatgagatattaacgcgttttatgaatgatgatatataaccagaagttttatcctcggtggctagcgctataaccttatcattataataccaactagtgtgattaatatgtgacacgtcagtgtgggtacaaatatgtacattatcgtctacgtcgtattcgatacatccgcatacagccaacaaatataaaatgacaaatactctaacgccgttcgtacccatcttgatgcggtttaataaatgttttgatttcaatttattgtaaaaaaagattcggttttatactgttcgatattctcattgcttatattttcatctatcatctccacacagtcaaatccgtggttagcatgcacctcatcaaccggtaaaagactatcggactcttctatcattataactctagaatatttaatttggtcattattaatcaagtcaattatcttatttttaacaaacgtgagtattttactcattttttataaaaacttttagaaatatacagactctatcgtgtgtctatatcttctttttatatccaatgtatttatgtctgatttttcttcatttatcatatataatggtccaaattctacacgtgcttcggattcatccagatcattaaggttcttataattgtaacatccttctcttccctcttctacatcttccttcttattcttattcttagcgtcacagaatctaccacagcaggatcccatgacgagcgtcatattaaactaatccattttcaattataatatatgattagtaatgaccattaaaataaaaaatattcttcataaccggcaagaaagtgaaaagttcacattgaaactatgtcagtagtatacatcatgaaatgatgatatatatatactctattttggtggaggattatatgatataattcgtggataatcatttttaagacacatttctttattcgtaaatcttttcacgttaaatgagtgtccatattttgcaatttcttcatatgatggcggtgtacgtggacgaggctgctcctgttcttgttgtggtcgccgactgtcgtgtctgcgtttagatccctccattatcgcgattgcgtagatggagtactattttataccttgtaattaaatttttttattaattaaacgtataaaaacgttccgtatctgtatttaagagccagatttcgtctaatagaacaaatagctacagtaaaaataactagaataattgctacacccactagaaaccacggatcgtaatacggcaatcggttttcgataataggtggaacgtatattttatttaaggacttaacaattgtctgtaaaccacaatttgcttccgcggatcctgtattaactatctgtaaaagcatatgttgaccgggcggagccgaacattctccgatatctaatttctgtatatctataatattattaacctccgcatacgcattacagttcttttctagcttggataccgcactaggtacatcgtctagatctattcctatttcctcagcgatagctcttctatccttttccggaagcaatgaaatcacttcaataaatgattcaaccatgagtgtgaaactaagtcgagaattactcatgcatttgttagttattcggagcgcgcaatttttaaactgtcctataacctctcctatatgaatagcacaagtgacattagtagggatagaatgttgagctaatttttgtaaataactatctataaaaagattatacaaagttttaaactctttagtttccgccatttatccagtctgagaaaatgtctctcataataaatttttccaagaaactaattgggtgaagaatggaaacctttaatctatatttatcacagtctgttttggtacacatgatgaattcttccaatgccgtactaaattcgatatctttttcgatttctggatatgtttttaataaagtatgaacaaagaaatggaaatcgtaataccagttatgtttaactttgaaattgttttttattttcttgttaatgattccagccacttgggaaaagtcaaagtcgtttaatgccgatttaatacgttcattaaaaacaaactttttatcctttagatgaattattattggttcattggaatcaaaaagtaagatattatcgggtttaagatctgcgtgtaaaaagttgtcgcaacagggtagttcgtagattttaatgtataacagagccatctgtaaaaagataaactttatgtattgtaccaaagatttaaatcctaatttgatagctaactcggtatctactttatctgccgaatacagtgctaggggaaaaattataatgtttcctctttcatattcgtagttagttctcttttcatgttcgaaaaagtgaaacatgcggttaaaatagtttataacattaatattactgttaataactgccggataaaagtgggatagtaatttcacgaatttgatactgtcctttctctcgttaaacgcctttaaaaaaactttagaagaatatctcaatgagagttcctgaccatccatagtttgtatcaataatagcaacatatgaagaacacgtttatacagagtatgtaaaaatgttaatttatagtttaatcccatggcccacgcacacacgattaattttttttcatctccctttagattgttgtatagaaatttgggtactgtgaactccgccgtagtttccatgggactatataattttgtggcctcgaatacaaattttactacatagttatctatcttaaagactataccatatcctcctgtagatatgtgataaaaatcgtcgtttataggataaaatcgtttatccttttgttggaaaaaggatgaattaatgtaatcattctcttctatctttagtagtgtttccttattaaaattcttaaaataatttaacaatctaactgacggagcccaattttggtgtaaatctaattgggacattatattgttaaaatacaaacagtctcctaatataacagtatctgataatctatggggagacatccattgatattcaggggatgaatcattggcaacacccatttattgtacaaaaagccccaatttacaaacgaaagtccaggtttgatagagacaaacaattaactattttgtctctgtttttaacacctccacagtttttaatttctttagtaatgaaattattcacaatatcagtatcttctttatctaccagagattttactaacttgataaccttggctgtctcattcaatagggtagtaatatttgtatgtgtgatattgatatctttttgaattgtttcttttagaagtgattctttgatggtgccagcatacgaattacaataatgcagaaactcggttaacatgcaggaattatagtaagccaattccaattgttgcctgtgttgtattagagtgtcaatatgagcaatggtgtccttgcgtttctctgatagaatgcgagcagcgattttggcgttatcatttgacgatatttctggaatgacgaatcctgtttctactaactttttggtaggacaaagtgaaacaatcaagaagatagcttctcctcctatttgtggaagaaattgaactcctctagatgatctactgacgatagtatctccttgacagatattggaccgaattacagaagtacctggaatgtaaagccctgaaaccccctcattttttaagcagattgttgccgtaaatcctgcactatgcccaagatagagagctcctttggtgaatccatctctatgtttcagtttaaccaagaaacagtcagctggtctaaaatttccatctctatctaatacagcatctaacttgatgtcaggaactatgaccggtttaatgttatatgtaacattgagtaaatccttaagttcataatcatcactgtcatcagttatgtacgatccaaacaatgtttctaccggcatagtggatacgaagatgctatccatcagaatgtttccctgattagtattttctatatagctattcttctttaaacgattttccaaatcagtaactatgttcatttttttaggagtaggacgcctagccagtatggaagaggattttctagatcctctcttcaacatctttgatctcgatggaatgcaaaaccccatagtgaaacaaccaacgataaaaataatattgtttttcactttttataattttaccatctgactcatggattcattaatatctttataagagctactaacgtataattctttataactgaactgagatatatacaccggatctatggtttccataattgagtaaatgaatgctcggcaataactaatggcaaatgtatagaacaacgaaattatactagagttgttaaagttaatattttctatgagctgttccaataaattatttgttgtgactgcgttcaagtcataaatcatcttgatactatccagtaaaccgtttttaagttctggaatattatcatcccattgtaaagcccctaattcgactatcgaatatcctgctctgatagcagtttcaatatcgacggacgtcaatactgtaataaaggtggtagtattgtcatcatcgtgataaactacgggaatatggtcgttagtaggtacggtaactttacacaacgcgatatataactttccttttgtaccatttttaacgtagttgggacgtcctgcagggtattgttttgaagaaatgatatcgagaacagatttgatacgatatttgttggattcctgattattcactataatataatctagacagatagatgattcgataaatagagaaggtatatcgttggtaggataatacatccccattccagtattctcggatactctattgatgacactagttaagaacatgtcttctattctagaaaacgaaaacatcctacatggactcattaaaacttctaacgctcctgattgtgtctcgaatgcctcgtacaaggatttcaaggatgccatagattctttgaccaacgatttagaattgcgtttagcatctgatttttttattaaatcgaatggtcggctctctggtttgctaccccaatgataacaatagtcttgtaaagataaaccgcaagaaaatttatacgcatccatccaaataaccctagcaccatcggatgatattaatgtattattatagattttccatccacaattattgggccagtatactgttagcaacggtatatcgaatagattactcatgtaacctactagaatgatagttcgtgtactagtcataatatctttaatccaatctaaaaaatttaaaattagattttttacactgttaaagttaacaaaagtattacccgggtacgtggatatcatatatggcattggtccattatcagtaatagctccataaactgatacggcgatggtttttatatgtgtttgatctaacgaggaagaaattcgcgcccacaattcatctctagatatgtatttaatatcaaacggtaacacatcaatttcgggacgcgtatatgtttctaaatttttaatccaaatataatgatgacctatatgccctattatcatactgtcaactatagtacacctagggaacttacgatacatctgtttcctataatcgttaaattttacaaatctataacatgctaaaccttttgacgacagccattcattaatttctgatatggaatctgtattctcgataccgtatcgttctaaagccagtgctatatctccctgttcgtgggaacgctttcgtataatatcgatcaacggataatctgaagtttttggagaataatatgactcatgatctatttcgtccataaacaatctagacataggaattggaggcgatgatcttaattttgtgcaatgagtcgtcaatcctataacttctaatcttgtaatattcatcatcgacataatactatctatgttatcatcgtatattagtataccatgaccttcttcatttcgtgccaaaatgatatacagtcttaaatagttacgcaatatctcaatagtttcataattgttagctgttttcatcaaggtttgtatcctgtttaacatgatggcgttctataacgtctctattttctatttttaattttttaaatttttaacgatttactgtggctagatacccaatctctctcaaatatttttttagcctcgcttacaagctgtttatctatactattaaaactgacgaatccgtgattttggtaatgggttccgtcgaaatttgccgaagtgatatgaacatattcgtcgtcgactatcaacaattttgtattattctgaatagtgaaaaccttcacagatagatcattttgaacacacaacgcatctagacttttggcggttgccatagaatatacgtcgttcttatcccaattaccaactagaagtctgatcttaactcctctattaatggctgcttctataatggagttgtaaatgtcgggccaatagtagctattaccgtcgacacgtgtagtgggaactatggccaaatgttcaatatctatactagtcttagctgacctgagtttatcaataactacatcggtatctagatctctagaatatcccaataggtgttccggagaatcagtaaagaacactccacctataggattcttaatatgatacgcagtgctaactggcaaacaacaagccgcagagcataaattcaaccatgaattttttgcgctattaaaggctttaaaagtatcaaatcttctacgaagatctgtggccagcgggggataatcagaatatacacctaacgttttaatcgtatgtatagatcctccagtaaatgacgcgtttcctacataacatctttcatcatctgacacccaaaaacaaccgagtagtagtcccacattattttttttatctatattaacggttataaaatttatatccgggcagtgactttgtagctctcccagatttcttttccctcgttcatctagcaaaactattattttaatccctttttcagatgcctcttttagtttatcaaaaataagcgctcccctagtcgtactcagaggattacaacaaaaagatgctatgtatatatatttcttagctagagtgataatttcgttaaaacattcaaatgttgttaaatgatcggatctaaaatccatattttctggtagtgtttctaccagcctacattttgctcccgcaggtaccgatgcaaatggccacatttagttaacataaaaacttatacatcctgttctatcaacgattctagaatatcatcggctatatcgctaaaattttcatcaaagtcgacatcacaacctaactcagtcaatatattaagaagttccatgatgtcatcttcgtctatttctatatccgtatccattgtagattgttgaccgattatcgagtttaaatcattactaatactcaatccttcagaatacaatctgtgtttcattgtaaatttataggcggtgtatttaagttggtagattttcaattatgtattaatatagcaacagtagttcttgctcctccttgattctagcatcctcttcattattttcttctacgtacataaacatgtccaatacgttagacaacacaccgacgatggcggccgcagatctcgagttatgatctacttccttaccgtgcaataaattagaatatattttctacttttacgagaaattaattattgtatttattatttatgggtgaaaaacttactataaaaagcgggtgggtttggaattagtgaaagcttaaaaattgaaattttattttttttttttggaatataaataagctcgaagtcgacagatctaggcctggtaccaggaggaggaattcagcttaaagatgacttcgaaagtttatgatccagaacaaaggaaacggatgataactggtccgcagtggtgggccagatgtaaacaaatgaatgttcttgattcatttattaattattatgattcagaaaaacatgcagaaaatgctgttatttttttacatggtaacgcggcctcttcttatttatggcgacatgttgtgccacatattgagccagtagcgcggtgtattataccagatcttattggtatgggcaaatcaggcaaatctggtaatggttcttataggttacttgatcattacaaatatcttactgcatggtttgaacttcttaatttaccaaagaagatcatttttgtcggccatgattggggtgcttgtttggcatttcattatagctatgagcatcaagataagatcaaagcaatagttcacgctgaaagtgtagtagatgtgattgaatcatgggatgaatggcctgatattgaagaagatattgcgttgatcaaatctgaagaaggagaaaaaatggttttggagaataacttcttcgtggaaaccatgttgccatcaaaaatcatgagaaagttagaaccagaagaatttgcagcatatcttgaaccattcaaagagaaaggtgaagttcgtcgtccaacattatcatggcctcgtgaaatcccgttagtaaaaggtggtaaacctgacgttgtacaaattgttaggaattataatgcttatctacgtgcaagtgatgatttaccaaaaatgtttattgaatcggatccaggattcttttccaatgctattgttgaaggcgccaagaagtttcctaatactgaatttgtcaaagtaaaaggtcttcatttttcgcaagaagatgcacctgatgaaatgggaaaatatatcaaatcgttcgttgagcgagttctcaaaaatgaacaagcggccgccgccaccatgagcaagggcgaggaactgttcactggcgtggtcccaattctcgtggaactggatggcgatgtgaatgggcacaaattttctgtcagcggagagggtgaaggtgatgccacatacggaaagctcaccctgaaattcatctgcaccactggaaagctccctgtgccatggccaacactggtcactaccttcacctatggcgtgcagtgcttttccagatacccagaccatatgaagcagcatgactttttcaagagcgccatgcccgagggctatgtgcaggagagaaccatctttttcaaagatgacgggaactacaagacccgcgctgaagtcaagttcgaaggtgacaccctggtgaatagaatcgagctgaagggcattgactttaaggaggatggaaacattctcggccacaagctggaatacaactataactcccacaatgtgtacatcatggccgacaagcaaaagaatggcatcaaggtcaacttcaagatcagacacaacattgaggatggatccgtgcagctggccgaccattatcaacagaacactccaatcggcgacggccctgtgctcctcccagacaaccattacctgtccacccagtctgccctgtctaaagatcccaacgaaaagagagaccacatggtcctgctggagtttgtgaccgctgctgggatcacacatggcatggacgagctgtacaagtgagcggccgccctgctagcaagcttgctagcggccgctcgagatctgcggccgctacagacacgaatatgactaaaccgatgaccatttaaaaacccctctctagctttcacttaaactgtatcgatcattcttttagcacatgtataatataaaaacattattctatttcgaatttaggcttccaaaaatttttcatccgtaaaccgataataatatatatagacttgttaatagtcggaataaatagattaatgcttaaactatcatcatctccacgattagagatacaatatttacattctttttgctgtttcgaaactttatcaatacacgttaatacaaacccaggaaggagatattgaaactgaggctgttgaaaatgaaacggtgaatacaataattcagataatgtaaaatcatgattccgtattctgatgatattagaactgctaatggatgtcgatggtatgtatctaggagtatctattttaacaaagcatcgatttgctaatatacaattatccttttgattaattgttattttattcatattcttaaaaggtttcatatttatcaattcttctacattaaaaatttccatttttaatttatgtagccccgcaatactcctcattacgtttcattttttgtctataatatccattttgttcatctcggtacatagattatccaattgagaagcgcatttagtagttttgtacattttaagtttattgacgaatcgtcgaaaactagttatagttaacattttattatttgataccctgatattaatacccctgccgttactattatttataactgatgtaatccacgtaacattggaattaactatcgatagtaatgcatcgacgcttccaaaattgtctattataaactcaccgataatttttttattgcatgttttcatattcattaggattatcaaatctttaatcttattacgattgtatgcgttgatattacaagacgtcattctaaaagacggaggatctccatcaaatgccagacaatcacgtacaaagtacatggaaataggttttgttctattgcgcatcatagatttatatagaacacccgtagaaatactaatttgttttactctataaaatactaatgcatctatttcatcgttttgtataacgtctttccaagtgtcaaattccaaatttttttcattgatagtaccaaattcttctatctctttaactacttgcatagataggtaattacagtgatgcctacatgccgttttttgaaactgaatagatgcgtctagaagcgatgctacgctagtcacaatcaccactttcatatttagaatatatatatgtaaaaatatagtagaatttcattttgtttttttctatgctataaatgaattctcattttgcatctgctcatactccgttttatattaataccaaagaaggaagatatctggttctaaaagccgttaaagtatgcgatgttagaactgtagaatgcgaaggaagtaaagcttcctgcgtactcaaagtagataaaccctcatcgcccgcgtgtgagagaagaccttcgtccccgtccagatgcgagagaatgaataaccctggaaaacaagttccgtttatgaggacggacatgctacaaaatatgttcgcggctaatcgcgataatgtagcttctagacttttgtcctaaaatactattatatccttttcgatattaataaatccgtgtcgtccaggttttttatctctttcagtatgtgaatagataggtattttatctctattcatcatcgaatttaagagatccgataaacattgtttgtattctccagatgtcagcatctgatacaacaatatatgtgcacataaacctctggcacttatttcatgtaccttccccttatcactaaggagaatagtatttgagaaatatgtatacatgatattatcatgaattagatatacagaatttgtaacactctcgaaatcacacgatgtgtcggcgttaagatctaatatatcactcgataacacattttcatctagatacactagacattttttaaagctaaaatagtctttagtagtaacagtaactatgcgattattttcatcgatgatacatttcatcggcatattattacgcttaccatcaaagactataccatgtgtatatctaacgtattctagcatggttgccatacgcgcattaaacttttcaggatctttggatagatcttccaatctatctatttgagaaaacatttttatcatgttcaatagttgaaacgtcggatccactatatagatattatctataaagattttaggaactacgttcatggtatcctggcgaatattaaaactatcaatgatatgattatcgttttcatcttttatcaccatatagtttctaagatatgggattttacttaatataatattatttcccgtgataaattttattagaaaggccaaatctataagaaaagtcctagaattagtctgaagaatatctatatcgccgtatagtatatttggattaattagatatagagaatatgatccgtaacatatacaacttttattatggcgtctaagatattcttccatcaacttattaacatttttgactagggaagatacattatgacgtcccattacttttgccttgtctattactgcgacgttcatagaatttagcatatctcttgccaattcttccattgatgttacattataagaaattttagatgaaattacatttggagctttaatagtaagaactcctaatatgtccgtgtatgtggtcactaatacagattgtagttctataatcgtaaataatttacctatattatatgtttgagtctgtttagaaaagtagctaagtatacgatcttttatttctgatgcagatgtattaacatcggaaaaaaatctttttttattcttttttactaaagatacaaatatgtctttgttaaaaacagttattttctgaatatttctagcttgtaattttaacatatgatattcgttcacactaggtactctgcctaaataggtttctataatctttaatgtaatattaggaaaagtattctgatcaggattcctattcattttgaggatttaaaactctgattattgtctaatatggtctctacgcaaactttttcacagagcgatagagtttttgataactcgtttttcttaagaaatataaaactactgtctccagagctcgctctatcttttattttatctaattcgatacaaactcctgatactggttcagaaagtaattcattaattttcagtcctttatagaagatatttaatatagataatacaaaatcttcagtttttgatatcgatctgattgatcctagaactagatatattaataacgtgctcattaggcagtttatggcagcttgataattagatatagtatattccagttcatatttattagataccgcattgcccagattttgatattctatgaattcctctgaaaataaatccaaaataactagacattctattttttgtggattagtgtactctcttccctctatcatgttcactactggtgtccacgatgataaatatctagagggaatataatatagtccataggatgccaatctagcaatgtcgaataactgtaattttattcttcgctcttcattatgaattgattcttgaggtataaacctaacacaaattatattattagacttttcgtatgtaatgtctttcatgttataagtttttaatcctggaatagaatctattttaatgaggcttttaaacgcagagttctccaacgagtcaaagcataatactctgttgtttttcttatatacgatgttacgattttcttctttgaatggaataggtttttgaattagtttataattacaacataatagataaggaagtgtgcaaatagtacgcggaaaaaacataatagctcccctgttttcatccatggttttaagtaaatgatcactggcttctttagtcaatggatattcgaacattaaccgtttcatcatcattggacagaatccatatttcttaatgtaaagagtgatcaaatcattgtgtttattgtaccatcttgttgtaaatgtgtattcggttatcggatctgctcctttttctattaaagtatcgatgtcaatctcgtctaagaattcaactatatcgacatatttcatttgtatacacataaccattactaacgtagaatgtataggaagagatgtaacgggaacagggtttgttgattcgcaaactattctaatacataattcttctgttaatacgtcttgcacgtaatctattatagatgccaagatatctatataattattttgtaagatgatgttaactatgtgatctatataagtagtgtaataattcatgtattttgatatatgttccaactctgtctttgtgatgtctagtttcgtaatatctatagcatcctcaaaaaatatattcgcatatattcccaagtcttcagttctatcttctaaaaaatcttcaacgtatggaatataataatctattttacctcttctgatatcattaatgatatagtttttgacactatcttctgtcaattgattcttattcactatatctaagaaacggatagcgtccctaggacgaactactgccattaatatctctattatagcttctggacataattcatctattataccagaattaatgggaactattccgtatctatctaacatagttttaagaaagtcagaatctaagacttgatgttcatatattggttcatacatgaaatgatctctattgatgatagtgactatttcattctctgaaaattggtaactcattctatatatgctttccttgttgatgaaggatagaatatactcaatagaatttgtaccaacaaactgttctcttatgaatcgtatatcatcatctgaaataatcatgtaaggcatacatttaacaattagagacttgtctcctgttatcaatatactattcttgtgataatttatgtgtgaggcaaatttgtccacgttctttaattttgttatagtagatatcaaatccaatggagctacagttcttggcttaaacagatatagtttttctggaacaaattctacaacattattataaaggactttgggtagataagtgggatgaaatcctattttaattaatgcgatagccttgtcctcgtgcagatatccaaacgcttttgtgatagtatggcattcattgtctagaaacgctctacgaatatctgtgacagatatcatctttagagaatatactagtcgcgttaatagtactacaatttgtattttttaatctatctcaataaaaaaattaatatgtatgattcaatgtataactaaactactaactgttattgataactagaatcagaatctaatgatgacgtaaccaagaagtttatctactgccaatttagctgcattatttttagcatctcgtttagattttccatcggccttatcgaatactcttccgtcgatgtctacacaggcataaaatgtaggagagttactaggcccaactgattcaatacgaaaagaccaatctctcctagtaatttggcagtactcattaataacggtgacagggttagcatctttccaatcaataatttttttagccggaataacatcatcaaaagacttatgatcctctctcattgatttttcgcgggatacatcatctattatgacgtcagccatagcatcagcatccggcttatccgcctccgttgtcataaaccaacgaggaggaatatcgtcggagctgtacaccatagcactacgttgaagatcgtacagagctttattaacttctcgcttctccatattaagttgtctagttagttgtgcagcagtagctccttcgattccaatgtttttaatagccgcacacacaatctctgcgtcagaacgctcgtcaatatagatcttagacatttttagagagaactaacgcaaccagcaataaaactgaacctactttatcatttttttattcatcatcctctggtggttcgtcgttcctatcaaatgtagctctgattaacccgtcatctataggtgatgctggttctggagattctggaggagatggattattatctggaagaatctctgttatttccttgttttcatgtatcgattgcgttgtaacattaagattgcgaaatgctctaaatttgggaggcttaaagtgttgtttgcaatctctacacgcgtgtctaactagtggaggttcgtcagctgctctagtttgaatcatcatcggcgtagtattcctacttttacagttaggacacggtgtattgtatttctcgtcgagaacgttaaaataatcgttgtaactcacatcctttattttatctatattgtattctactcctttcttaatgcattttataccgaataagagatagcgaaggaattctttttcggtgccgctagtacccttaatcatatcacatagtgttttatattccaaatttgtggcaatagacggtttatttctatacgatagtttgtttctggaatcctttgagtattctataccaatattattctttgattcgaatttagtttcttcgatattagattttgtattacctatattcttgatgtagtactttgatgatttttccatggcccattctattaagtcttccaagttggcatcatccacatattgtgatagtaattctcggatatcagtagcggctaccgccattgatgtttgttcattggatgagtaactactaatgtatacattttccatttataacacttatgtattaactttgttcatttatattttttcattattatgttgatattaacaaaagtgaatatatatatgttaataattgtattgtggttatacggctacaattttataatgagtgaaagtcagtgtccgatgatcaatgacgatagctttactctgaaaagaaagtatcaaatcgatagtgcggagtcaacaataaaaatggataagaagaggataaagtttcagaatagagccaaaatggtaaaagaaataaatcagacaataagagcagcacaaactcattacgagacattgaaactaggatacataaaatttaagagaatgattatgactactactctagaagatatagcaccatctattccaaataatcagaaaacttataaactattctcggacatttcagccatcggcaaagcatcacagaatccgagtaagatggtatatgctctgctgctttacatgtttcccaatttgtttggagatgatcatagattcattcgttatagaatgcatccaatgagtaaaatcaaacacaagatcttctctcctttcaaacttaatcttattagaatattagtggaagaaagattctataataatgaatgcagatctaataaatggagaataattggaacacaagttgataaaatgttgatagctgaatctgataaatatacaatagatgcaaggtataacctaaaacccatgtatagaatcaagggagaatctgaagaagataccctctttatcaaacagatggtagaacaatgtgtgacatcccaggaattggtggaaaaagtgttgaagatactgtttagagatttgttcaagagtggagaatacaaagcgtacagatacgatgatgatgtagaaaatggatttattggattggatacactaaaattaaacattgttcatgatatagttgaaccatgtatgcctgttcgtaggccagtggctaagatactgtgtaaagaaatggtaaataaatactttgagaatccgctacatattattggtaaaaatcttcaagagtgcattgactttgttagtgaataggcatttcatctttctccaatactaattcaaattgttaaattaataatggatagtataaatagttattagttataagatagtaaaaataattattagaataagagtgtagtatcatagataactctcttctataaaaatggattttattcgtagaaagtatcttatatacacagtagaaaataatatagattttttaaaggatgatacattaagtaaagtaaacaattttaccctcaatcatgtactagctctcaagtatctagttagcaattttcctcaacacgttattactaaggatgtattagctaataccaatttttttgttttcatacatatggtacgatgttgtaaagtgtacgaagcggttttacgacacgcatttgatgcacccacgttgtacgttaaagcattgactaagaattatttatcgtttagtaacgcaatacaatcgtacaaggaaaccgtgcataaactaacacaagatgaaaaatttttagaggttgccgaatacatggacgaattaggagaacttataggcgtaaattatgacttagttcttaatccattatttcacggaggggaacccatcaaagatatggaaatcatttttttaaaactgtttaagaaaacagacttcaaagttgttaaaaaattaagtgttataagattacttatttgggcatacctaagcaagaaagatacaggcatagagtttgcggataatgatagacaaaatatatacactctatttcaacaaactggtagaatcgtccatagcaatctaacagaaacgtttagagattatatctttcccggagataagactagctattgggtgtggttaaacgaaagtatagctaatgatgcggatatcgttcttaatagacacgccattaccatgtatgataaaattcttagttatatatactctgagataaaacaaggacgcgttaataaaaacatgcttaagttagtttatatctttgagcctgaaaaagatatcagagaacttctgctagaaatcatatatgatattcctggagatatcctatctattattgatgcaaaaaacgacgattggaaaaaatattttattagtttttataaagctaattttattaacggtaatacatttattagtgatagaacgtttaacgaggacttattcagagttgttgttcaaatagatcccgaatatttcgataatgaacgaattatgtctttattctctacgagtgctgcggacattaaacgatttgatgagttagatattaataacagttatatatctaatataatttatgaggtgaacgatatcacattagatacaatggatgatatgaagaagtgtcaaatctttaacgaggatacgtcgtattatgttaaggaatacaatacatacctgtttttgcacgagtcggatcccatggtcatagagaacggaatactaaagaaactgtcatctataaaatccaagagtagacggctgaacttgtttagcaaaaacattttaaaatattatttagacggacaattggctcgtctaggtcttgtgttagatgattataaaggagacttgttagttaaaatgataaaccatcttaagtctgtggaggatgtatccgcattcgttcgattttctacagataaaaaccctagtattcttccatcgctaatcaaaactattttagctagttataatatttccatcatcgtcttatttcaaaggtttttgagagataatctatatcatgtagaagaattcttggataaaagcatccatctaaccaagacggataagaaatatatacttcaattgataagacacggtagatcatagaacagaccaaatatattattaataatttgtatatacatagatataattatcacacatttttgataaatgggaactgctgcaacaattcagactcccaccaaattaatgaataaagaaaatgcagaaatgattttggaaaaaattgttgatcatatagttatgtatattagtgacgaatcaagtgattcagaaaataatcctgaatatattgattttcgtaacagatacgaagactatagatctctcattataaaaagtgatcacgagtttgtaaagctatgtaaaaatcatgcggagaaaagttctccagaaacgcaacaaatgattatcaaacacatatacgaacaatatcttattccagtatctgaagtactattaaaacctataatgtccatgggtgacataattacatataacggatgtaaagacaatgaatggatgctagaacaactctctaccctaaactttaacaatctccgcacatggaactcatgtagcataggcaatgtaacgcgtctgttttatacattttttagttatctgatgaaagataaactaaatatataagtataatcccattctaatactttaacctgatgtattagcatcttattagaatattaacctaactaaaagacataacataaaaactcattacatagttgataaaaagcggtaggatataaatattatggctgccaccgttccgcgttttgacgacgtgtacaaaaatgcacaaagaagaattctagatcaagaaacattttttagtagaggtctaagtagaccgttaatgaaaaacacatatctatttgataattacgcgtatggatggataccagaaactgcaatttggagtagtagatacgcaaacctagatgctagtgactattatcccatttcgttgggattacttaaaaagttcgagtttctcatgtctctatataaaggtcctattcccgtatatgaagaaaaagtaaatactgaattcatagccaatggatcgttctctggtagatacgtatcatatcttcgaaagttttctgcccttccaacaaacgagtttattagttttttgttactgacttccattccaatctataatatcttgttctggtttaaaaacacacagtttgatattactaaacacacattattcagatacgtctatacagataatgccaaacacctggcgttggctaggtatatgcatcaaacaggagactataagcctttgtttagtcgtctcaaagagaattatatatttaccggtcccgttccaataagtatcaaagatatagatcaccctaatcttagtagagcaagaagtccatccgattatgagacattagctaatattagtactatattgtactttaccaagtatgatccggtattaatgtttttattgttttacgtacctgggtattcaattactacaaaaattactccagccgtagaatatctaatggataaactgaatctaacaaagagcgacgtacaactgttgtaaattattttatgcttcgtaaaatgtaggttttgaaccaaacattctttcaaagaatgagatgcataaaactttattatccaatagattgactatttcggacgtcaatcgtttaaagtaaacttcgtaaaatattctttgatcactgccgagtttaaaacttctatcgataattgtctcatatgttttaatatttacaagttttttggtccatggtacattagccggacaaatatatgcaaaataatatcgttctccaagttctatagtttctggattatttttattatattcagtaactaaatacatattagggttatctgcggatttataatttgagtgatgcattctactcaacataaataattctagaggagacgatctactatcaaattcggatcgtaaatctgtttctaaagaacggagaatatctatacatacctgattagaattcatccgtccttcagacaacatctcagacagtctggttttgtacatcttaatcatattcttatgaaacttggaaacatctcttctagtttcactagtacctttattaattctctcaggtacagattttgaattcgacgatgctgagtatttcatcgttgtatatttcttcttcgattgcataatcagattcttatataccgcctcaaactctattttaaaattattaaacaatactctattattaatcagtcgttctaactctttcgctatttctatagacttatctacatcttgactgtctatctctgtaaacacggagtcggtatctccatacacgctacgaaaacgaaatctgtaatctataggcaacgatgttttcacaatcggattaatatctctatcgtccatataaaatggattacttaatggattggcaaaccgtaacataccgttagataactctgctccatttagtaccgattctagatacaagatcattctacgtcctatggatgtgcaactcttagccgaagcgtatgagtatagagcactatttctaaatcccatcagaccatatactgagttggctactatcttgtacgtatattgcatggaatcatagatggccttttcagttgaactggtagcctgttttagcatctttttatatctggctctctctgccaaaaatgttcttaatagtctaggaatggttccttctatcgatctatcgaaaattgctatttcagagatgaggttcggtagtctaggttcacaatgaaccgtaatatatctaggaggtggatatttctgaagcaatagctgattatttatttcttcttccaatctattggtactaacaacgacaccgactaatgtttccggagatagatttccaaagatacacacattaggatacagactgttataatcaaagattaatacattattactaaacattttttgttttggagcaaataccttaccgccttcataaggaaacttttgttttgtttctgatctaactaagatagttttagtttccaacaatagctttaacagtggacccttgatgactgtactcgctctatattcgaataccatggattgaggaagcacatatgttgacgcacccgcgtctgtttttgtttctactccataatactcccacaaatactgacacaaacaagcatcatgaatacagtatctagccatatctaaagctatgtttagattataatccttatacatctgagctaaatcaacgtcatcctttccgaaagataatttatatgtatcattaggtaaagtaggacataatagtacgactttaaatccattttcccaaatatctttacgaattactttacatataatatcctcatcaacagtcacataattacctgtggttaaaacctttgcaaatgcagcggctttgcctttcgcgtctgtagtatcgtcaccgatgaacgtcatttctctaactcctctatttaatactttacccatgcaactgaacgcgttcttggatatagaatccaatttgtacgaatccaatttttcaaatttttgaatgaatgaatatagatcgaaaaatatagttccattattgttattaacgtgaaacgtagtattggccatgccgcctactcccttatgactagactgatttctctcataaatacagagatgtacagcttcctttttgtccggagatctaaagataattttctctcctgttaataactctagacgattagtaatatatctcagatcaaagttatgtccgttaaaggtaacgacgtagtcgaacgttagttccaacaattgtttagctattcgtaacaaaactatttcagaacatagaactagttctcgttcgtaatccatttccattagtgactgtatcctcaaacatcctctatcgacggcttcttgtatttcctgttccgttaacatctcttcattaatgagcgtaaacaataatcgtttaccacttaaatcgatataacagtaacttgtatgcgagattgggttaataaatacagaaggaaacttcttatcgaagtgacactctatatctagaaataagtacgatcttgggatatcgaatctaggtatttttttagcgaaacagttacgtggatcgtcacaatgataacatccattgttaatctttgtcaaatattgctcgtccaacgagtaacatccgtctggagatatcccgttagaaatataaaaccaactaatattgagaaattcatccatggtggcattttgtatgctgcgtttctttggctcttctatcaaccacatatctgcgacggagcattttctatctttaatatctagattataacttattgtctcgtcaatgtctatagttctcatctttcccaacggcctcgcattaaatggaggaggagacaatgactgatatatttcgtccgtcactacgtaataaaagtaatgaggaaatcgtataaatacggtctcgccatttcgacatctggatttcagatataaaaatctgttttcaccgtgactttcaaaccaattaatgcaccgaacatccatttatagaatttagaaatatattttcatttaaatgaatcccaaacattggggaagagccgtatggaccattatttttatagtactttcgcaagcgggtttagacggcaacatagaagcgtgtaaacgaaaactatatactatagttagcactcttccatgtcctgcatgtagacggcacgcgactatcgctatagaggacaataatgtcatgtctagcgatgatctgaattatatttattattttttcatcagattatttaacaatttggcatctgatcccaaatacgcgatcgatgtgacaaaggttaaccctttataaacttaacccattataaaacttatgattagtcacaactgaaataaccgcgtgattattttttggtataattctacacggcatggtttctgtgactatgaattcaacccccgttacattagtgaaatctttaacaaacagcaagggttcgtcaaagacataaaactcattgtttacaatcgaaatagaccccctatcacacttaaaataaaaaatatccttatcctttaccaccaaataaaattctgattggtcaatgtgaatgtattcacttaacagttccacaaatttatttattaactccgaggcacatacatcgtcggtattttttatggcaaactttactcttccagcatccgtttctaaaaaaatattaacgagttccatttatatcatccaatattattgaaatgacgttgatggacagatgatacaaataagaaggtacggtacctttgtccaccatctcctccaattcatgctctattttgtcattaactttaatgtatgaaaacagtacgccacatgcttccatgacagtgtgtaacactttggatacaaaatgtttgacattagtataattgtccaagactgtcaatctataatagatagtagctataatatattctatgatggtattgaagaagatgacaaccttggcatattgatcatttaacacagacatggtatcaacagatagcttgaatgaaagagaatcagtaattggaataagcgtcttctcgatagagtgtccgtataccaacatgtctgatattttgatgtattccattaaattatttagttttttctttttattctcgttaaacagcatttctgtcaacggaccccaacatcgttgaccgattaagttttgattgatttttccgtgtaaggcgtatctagtcagatcgtatagcctatccaataatccatcgtctgtgtgtagatcacatcgtacactttttaattctctatagaagagcgacagacatctggagcaattacagacagcaatttctttattctctacagatgtaagatacttgaagacattcctatgatgatgcagaattttggataacacggtattgatggtatctgttaccataattcctttgatggctgatagtgtcagagcacaagatttccaatctttgacaatttttagcaccattatctttgttttgatatctatatcagacagcatggtgcgtctgacaacacagggattaagacggaaagatgaaatgattctctcaacatcttcaatagataccttgctattttttctggcattatctatatgtgcgagaatatcctctagagaatcagtatcctttttgatgatagtggatctcaatgacatgggacgtttaaaccttcttattctatcaccagattgcatggtgatttgtcttctttcttttatcataatgtaatctctaaattcatcggcaaattgtctatatctaaaatcataatatgagatgtttacctctacaaatatctgttcgtccaatgttagagtatttacatcagttttgtattccaaattaaacatggcaacggatttaattttatattcctctattaagtcctcgtcgataataacagaatgtagataatcatttaatccgtcgtacatggttggaagatgcttgttgacaaaatctttaattgtcttgatgaaggtgggactatatctaacatcttgattaataaaatttataacattgtccataggatactttgtaactagttttatacacatctcttcatcggtaagtttagacagaatatcgtgaacaggtggtatattatattcatcagatatacgaagaacaatgtccaaatctatattgtttaatatattatatagatgtagcgtagctcctacaggaatatctttaactaagtcaatgatttcatcaaccgttagatctattttaaagttaatcatataggcattgatttttaaaaggtatgtagccttgactacattctcattaattaaccattccaagtcattgtgtgtaagaagattatattctatcataagcttgactacatttggtcccgataccattaaagaattcttatgatataaggaaacagattttaggtactcatctactctacaagaattttggagagccttaacgatatcagtgacgtttattatttcaggaggaaagaatctaacattgagaatatcggaattaatagcttccagatacagtgattttggcaatagtccgtgtaatccataatccagtaacacgagctggtgcttgctagacaccttttcaatgtttaatttttttgaaataagctttgataaagccttcctcgcaaattccggatacatgaacatgtcggcgacatgattaagtattgttttttcattatttttatattttctcaacaagttctcaataccccaatagatgatagaatatcacccaatgcgtccatgttgtctatttccaacaggtcgctatatccaccaatagaagtttttccaaaaaagattctaggaacagttctaccaccagtaatttgttcaaaataatcccgcaattcattttcgggtttaaattctttaatatcgacaatttcatacgctcctcttttgaaactaaacttatttagaatatccagtgcatttctacaaaaaggacatgtatacttgacaaaaattgtcactttgttattggccaacctttgttgtacaaattcctcggccattttaatatttaagtgatataaaactatctcgacttatttaactctttagtcgagatatatggacgcagatagctatatgatagccaactacagaaggcaaacgctataaaaaacataattacgacgagcatatttataaatatttttattcagcattacttgatatagtaatattaggcacagtcaaacattcaaccactctcgatacattaactctctcattttctttaacaaattctgcaatatcttcgtaaaaagattcttgaaactttttagaatatctatcgactctagatgaaatagcgttcgtcaacatactatgttttgtatacataaaggcgcccattttaacagtttctagtgacaaaatgctagcgatcctaggatcctttagaatcacatagattgacgattcgtctctcttagtaactctagtaaaataatcatacaatctagtacgcgaaataatattatccttgacttgaggagatctaaacaatctagttttgagaacatcgataagttcatcgggaatgacatacatactatctttaatagaactcttttcatccagttgaatggattcgtccttaaccaactgattaatgagatcttctattttatcattttccagatgatatgtatgtccattaaagttaaattgtgtagcgcttctttttagtctagcagccaatactttaacatcactaatatcgatatacaaaggagatgatttatctatggcattaagaattcgtttttcgacatccgtcaaaaccaattcctttttgcctgtatcatccagttttccatcctttgtaaagaaattattttctactagactattaataagactgataaggattcctccataattgcacaatccaaactttttaacaaaactagactttacgagatctacaggaatgcgtacttcaggttttttagcttgtgattttttcttttgcggacattttctagtaaccaactcatctaccatttcattgattttagcagtgaaataagctttcaatgcacgggcactgatactattgaaaacgagttgatcttcaaattccgccatttaagttcaccaaacaacttttaaatacaaatatatcaatagtagtagaataagaactataaaaaaaataataattaaccaaccccaacaaccggtattattagttgatgtggtagttttctcatcacttagaacagatttaacaatttctataaagtctgtcaaatcatcttccggagaccccataaatacaccaaatatagcggcgtacaacttatccatttatacattgaatattggcttttctttatcgctatcttcatcatattcatcatcaatatcaacaagtcccagattacgagccagatcttcttctacattttcagtcattgatacacgttcactatctccagagagtccgataacgttagccaccacttctctatcaatgattagtttcttgagcgcgaaagtaatttttgtttccgttccggatctatagaagacgataggtgtgataattgccttggccaattgtctttctcttttactgagtgattctagttcaccttctatagatctgagaatggatgattctccagtcgaaacatattctaccatggatccgtttaatttgttgatgaagatggattcatccttaaatgttttctctgtaatagtttccaccgaaagactatgcaaagaatttggaatgcgttccttgtgcttaatgtttccatagacggcttctagaagttgatacaacataggactagccgcggtaacttttatttttagaaagtatccatcgcttctatcttgtttagatttatttttataaagtttagtctctccttccaacataataaaagtggaagtcatttgactagataaactatcagtaagttttatagagatagacgaacaattagcgtattgagaagcatttagtgtaacgtattcgatacattttgcattagatttactaatcgattttgcatactctataacacccgcacaagtctgtagagaatcgctagatgcagtaggtcttggtgaagtttcaactctcttcttgattaccttactcatgattaaacctaaataattgtactttgtaatataatgatatatattttcactttatctcatttgagaataaaaatgtttttgtttaaccactgcatgatgtacagatttcggaatcgcaaaccaccagtggttttattttatccttgtccaatgtgaattgaatgggagcggatgcgggtttcgtacgtagatagtacattcccgtttttagaccgagactccatccgtaaaaatgcatactcgttagtttggaataactcggatctgctatatggatattcatagattgactttgatcgatgaaggctcccctgtctgcagccatttttatgatcgtcttttgtggaatttcccaaatagttttataaactcgcttaatatcttctggaaggtttgtattctgaatggatccaccatctgccataatcctattcttgatctcatcattccataattttctctcggttaaaactctaaggagatgcggattaactacttgaaattctccagacaatactctccgagtgtaaatattactggtatacggttccaccgactcattatttcccaaaatttgagcagttgatgcagtcggcataggtgccaccaataaactatttctaagaccgtatgttctgattttatcttttagaggttcccaattccaaagatccgacggtacaacattccaaagatcatattgtagaataccgttactggcgtacgatcctacatatgtatcgtatggtccttccttctcagctagttcacaactcgcctctaatgcaccgtaataaatggtttcgaagatcttcttatttagatcttgtgcttccaggctatcaaatggataatttaagagaataaacgcgtccgctaatccttgaacaccaataccgataggtctatgtctcttattagagatttcagcttctggaataggataataattaatatctataattttattgagatttctgacaattactttgaccacatccttcagtttgagaaaatcaaatcgcccatctattacaaacatgttcaaggcaacagatgccagattacaaacggctacctcattagcatccgcatattgtattatctcagtgcaaagattactacacttgatagttcctaaattttgttgattactctttttgttacacgcatccttataaagaatgaatggagtaccagtttcaatctgagattctataatcgctttccagacgactcgagcctttattatagatttgtatctcctttctctttcgtatagtgtatacaatcgttcgaactcgtctccccaaacattgtccaatccaggacattcatccggacacatcaacgaccactctccgtcatccttcactcgtttcataaagagatcaggaatccaaagagctataaatagatctctggttctatgttcctcgtttcctgtattctttttaagatcgaggaacgccataatatcagaatgccacggttccaagtatatggccataactccaggccgtttgtttcctccctgatctatgtatctagcggtgttattataaactctcaacattggaataataccgtttgatataccattggtaccggagatatagcttccactggcacgaatattactaattgatagacctattccccctgccattttagagattaatgcgcatcgttttaacgtgtcatagataccctctatgctatcatcgatcatgttaagtagaaaacagctagacatttggtgacgactagttcccgcattaaataaggtaggagaagcgtgcgtaaaccatttttcagaaagtagattgtacgtctcaatagctgagtctatatcccattgatgaattcctactgcgacacgcattaacatgtgctgaggtctttcaacgatcttgttgtttattttcaacaagtaggatttttccaaagttttaaaaccaaaatagttgtatgaaaagtctcgttcgtaaataataaccgagttgagtttatccttatatttgttaactatatccatggtgatacttgaaataatcggagaatgtttcccatttttaggattaacatagttgaataaatcctccatcacttcactaaatagtttttttgtttccttgtgtagatttgatacggctattctggcggctagaatggcataatccggatgttgtgtagtacaagtggctgctatttcggctgccagagtgtccaattctaccgttgttactccattatatattccttgaataaccttcatagctattttaataggatctatatgatccgtgtttaagccataacataattttctaatacgagacgtgattttatcaaacatgacattttccttgtatccatttcgtttaatgacaaacatttttgttggtgtaataaaaaaattatttaacttttcattaatagggatttgacgtatgtagcgtacaaaatgattgttcctggtatatagataaagagtcctatatatttgaaaatcgttacggctcgattaaactttaatgattgcatagtgaatatatcattaggatttaactccttgactatcatggcggcgccagaaattaccatcaaaagcattaatacagttataccgatcgcagttagaacggttatagcatccaccatttatatctaaaaattagatcaaagaatatgtgacaaagtcctagttgtatactgagaattgacgaaacaatgtttcttacatatttttttcttattagtaaccgacttaatagtaggaactggaaaactagacttgattattctataagtatagatacccttccaaataatattctctttgataaaagttccagaaaatgtagaattttttaaaaagttatcttttgctattaccaagattgtgtttagacgcttattattaatatgagtgatgaaatccacaccgcctctagatatcgcctttatttccacattagatggtaaatccaatagtgaaactatctttttaggaatgtatggactcgcgtttagaggagtaaacgtcttaggcgtcggaaaggatgattcatcaaacgaataaacaatttcacaaatggatgttaatgtattagtaggaaattttttgacgctattggaattgaagattctaatggatgatgttctacctatttcatccgataacatgttaatttccgacaccaacggttttaatatttcgatgatatacggtagtctctctttcggacttatatagcttattccacaatacgagtcattatatactccaaaaaacaaaataactagtataaaatctgtatcgaatgggaaaaacgaaattatcgacataggtatagaatccggaacattgaacgtattaatacttaattctttttctgtggtaagtaccgataggttattgacattgtatggttttaaatattctataacttgagacttgatagatattagtgatgaattgaaaattatttttatcaccacgtgtgtttcaggatcatcgtcgacgcccgtcaaccaaccgaacggagtaaaataaatatcattaatatatgctctagatattagtatttttatcaatcctttgattatcatcttctcgtaggcgaatgattccatgatcaagagtgatttaagaacatcctccggagtattaatgggcttagtaaacagtccatcgttgcaataataaaagttatccaagttaaaggatattatgcattcgtttaaagatatcacctcatctgacggagacaattttttggtaggttttagagactttgaagctacttgtttaacaaagttattcatcgtcgtctactattctatttaattttgtagttaatttatcacatatcacattaattgactttttggtccacttttccatacgtttatattcttttaatcctgcgttatccgtttccgttatatccagggatagatcttgcaagttaaatagaatgctcttaaataatgtcattttcttatccgctaaaaatttaaagaatgtataaacctttttcagagatttgaaactcttaggtggtgtcctagtacacaatatcataaacaaactaataaacattccacattcagattccaacagctgattaacttccacattaatacagcctattttcgctccaaatgtacattcgaaaaatctgaataaaacatcgatgtcacaatttgtattatccaatacagaatgtttgtgattcgtgttaaaaccatcggagaaggaatagaaataaaaattattatagtggtggaattcagttggaatattgcctccggagtcataaaaggatactaaacattgttttttatcataaattacacatttccaatgagacaaataacaaaatccaaacattacaaatctagaggtagaacttttaattttgtctttaagtatatacgataagatatgtttattcataaacgcgtcaaatttttcatgaatcgctaaggagtttaagaatctcatgtcaaattgtcctatataatccacttcggatccataagcaaactgagagactaagttcttaatacttcgattgctcatccaggctcctctctcaggctctattttcatcttgacgacctttggattttcaccagtatgtattcctttacgtgataaatcatcgattttcaaatccatttgtgagaagtctatcgccttagatactttttcccgtagtcgaggtttaaaaaaatacgctaacggtatactagtaggtaactcaaagacatcatatatagaatggtaacgcgtctttaactcgtcggttaactctttcttttgatcgagttcgtcgctactattgggtctgctcaggtgccccgactctactagttccaacatcataccgataggaatacaagacactttgccggcggttgtagatttatcatatttttccactacatatccgttacaatttgttaaaaatttagatacatctatattgctacataatccagctagtgaatatatatgacataataaattggtaaatcctagttctggtattttactaattactaaatctgtatatctttccatttatcatggaaaagaatttaccagatatcttcttttttccaaactgcgttaatgtattctcttacaaatattcacaagatgaattcagtaatatgagtaaaacggaacgtgatagtttctcattggccgtgtttccagttataaaacatagatggcataacgcacacgttgtaaaacataaaggaatatacaaagttagtacagaagcacgtggaaaaaaagtatctcctccatcactaggaaaacccgcacacataaacctaaccgcgaagcaatatatatacagtgaacacacaataagctttgaatgttatagttttctaaaatgtataacaaatacagaaatcaattcgttcgatgagtatatattaagaggactattagaagctggtaatagtttacagatattttccaattccgtaggtaaacgaacagatactataggtgtactagggaataagtatccatttagcaaaattccattggcctcattaactcctaaagcacaacgagagatattttcagcgtggatttctcatagacctgtagttttaactggaggaactggagtgggtaagacgtcacaggtacccaagttattgctttggtttaattatttatttggtggattctctactctagataaaatcactgactttcacgaaagaccagtcattctatctcttcctaggatagctttagttagattgcatagcaataccattttaaaatcattgggatttaaggtactagatggatctcctatttctttacggtacggatctataccggaagaattaataaacaaacaaccaaaaaaatatggaattgtattttctacccataagttatctctaacaaaactatttagttatggcactcttattatagacgaagttcatgagcatgatcaaataggagatattattatagcagtagcgagaaagcatcatacgaaaatagattctatgtttttaatgactgccacgttagaggatgacagggaacggctaaaagtatttttacctaatcccgcatttatacatattcctggagatacactgtttaaaattagcgaggtatttattcataataagataaatccatcttccagaatggcatacatagaagaagaaaagagaaatttagttactgctatacagatgtatactcctcctgatggatcatccggtatagtctttgtggcatccgttgcacagtgtcacgaatataaatcatatttagaaaaaagattaccgtatgatatgtatattattcatggtaaggtcttagatatagacgaaatattagaaaaagtgtattcatcacctaatgtatcgataattatttctactccttatttggaatccagcgttactatacgcaatgttacacacatttatgatatgggtagagtttttgtccccgctccttttggaggatcgcaacaatttatttctaaatctatgagagatcaacgaaaaggaagagtaggaagagttaatcctggtacatacgtctatttctatgatctgtcttatatgaagtctatacagcgaatagattcagaatttctacataattatatattgtacgctaataagtttaatctaacactccccgaagatttgtttataatccctacaaatttggatattctatggcgtacaaaggaatatatagactcgttcgatattagtacagaaacatggaataaattattatccaattattatatgaagatgatagagtatgctaaactttatgtactaagtcctattctcgctgaggagttggataactttgagaggacgggagaattaactagtattgtacgagaagccattttatctctaaatttacaaattaagattttaaattttaaacataaagatgatgatacgtatatacacttttgtaaaatattattcggtgtctataacggaacaaacgctactatatattatcatagacctctaacgggatatatgaatatgatttcagatactatatttgttcctgtagataataactaaaaatcaaactctaatgaccacatctttttttagagatgaaaaattttccacatctccttttgtagacacgactaaacattttgcagaaaaaagtttattagtgtttagataatcgtatacttcatcagtgtagatagtaaatgtgaacagataaaaggtattcttgctcaatagattggtaaattccatagaatatattaatcctttcttcttgagatcccacatcatttcaaccagagacgttttatccaatgatttacctcgtactataccacatacaaaactagattttgcagtgacgtcgtacctggtattcctaccaaacaaaattttacttttagttcttttagaaaattctaaggtagaatctctatttgccaatatgtcatctatggaattaccactagcaaaaaatgatagaaatatatattgatacatcgcagctggttttgatctactatactttaaaaacgaatcagattccataattgcctgtatatcatcagctgaaaaactatgttttacacgtattccttcggcatttctttttaatgatatatcttgtttagacaatgataaagttatcatgtccatgagagacgcgtctccgtatcgtataaatatttcattagatgttagacgcttcattaggggtatacttctataaggtttcttaatcagtccatcattggttgcgtcaagaactactatcggatgttgttgggtatctctagtgttacacatggccttactaaagtttgggtaaataactatgatatctctattaattatagatgcatatatttcattcgtcaaggatattagtatcgacttgctatcgtcattaatacgtgtaatgtaatcatataaatcatgcgatagccaaggaaaatttaaatagatgttcatcatataatcgtcgctataattcatattaatacgttgacattgactaatttgtaatatagcctcgccacgaagaaagctctcgtattcagtttcatcgataaaggataccgttaaatataactggttgccgatagtctcatagtctattaagtggtaagtttcgtacaaatacagaatccctaaaatattatctaatgttggattaatctttaccataactgtataaaatggagacggagtcataactattttaccgtttgtacttactggaatagatgaaggaataatctccggacatgctggtaaagacccaaatgtctgtttgaagaaatccaatgttccaggtcctaatctcttaacaaaaattacgatattcgatcccgatatcctttgcattctatttaccagcatatcacgaactatattaagattatctatcatgtctattctcccaccgttatataaatcgcctccgctaagaaacgttagtatatccatacaatggaatacttcatttctaaaatagtattcgttttctaattctttaatgtgaaatcgtatactagaaagggaaaaattatctttgagttttccgttagaaaagaaccacgaaactaatgttctgattgcgtccgattccgttgctgaattaatggatttacaccaaaaactcatataacttctagatgtagaagcattcgctaaaaaattagtagaatcaaaggatataagtagatgttccaacaagtgagcaattcccaagatttcatctatatcattctcgaatccgaaattagaaattcccaagtagatatcctttttcatccgatcgttgatgaaaatacgaactttattcggtaagacaatcatttactaaggagtaaaataggaagtaatgttcgtatgtcgttatcatcgtataaattaaaggtgtgttttttaccattaagtgacattataattttaccaatattggaattataatataggtgtatttgcgcactcgcgacggttgatgcatcggtaaatatagctgtatctaatgttctagtcggtatttcatcatttcgctgtctaataatagcgttttctctatctgtttccattacagctgcctgaagtttattggtcggataatatgtaaaataataagaaatacatacgaataacaaaaataaaataagatataataaagatgccatttagagatctaattttgtttaacttgtccaaattcctacttacagaagatgaggaatcgttggagatagtgtcttccttatgtagaggatttgaaatatcttataatgacttgataacttactttccagataggaaataccataaatatatttataaagtatttgaacatgtagatttatcggaggaattaagtatggaattccatgatacaactctgagagatttagtctatcttagattgtacaagtattccaagtgtatacggccgtgttataaattaggagataatctaaaaggcatagttgttataaaggacaggaatatttatattagggaagcaaatgatgacttgatagaatatctcctcaaggaatacactcctcagatttatacatattctaatgagcgcgtccccataactggttcaaaattaattctttgtggattttctcaagttacatttatggcgtatacaacgtcgcatataacaacaaataaaaaggtagatgttctcgtttccaaaaaatgtatagatgaactagtcgatccaataaattatcaaatacttcaaaatttatttgataaaggaagcggaacaataaacaaaatactcaggaagatattttattcggtaacaggtggccaaactccataggtagctttttctatttcggattttagaatttccaaattcaccagcgatttatcggttttggtgaaatccaaggatttattaatgtccacaaatgccatttgttttgtctgtggattgtatttgaaaatggaaacgatgtagttagatagatgcgctgcgaagtttcctattagggttccgcgcttcacgtcacccagcatacttgaatcaccatcctttaaaaaaaatgataagatatcaacatggagtatatcatactcgaattttaattcttctactgactcactgacattttcacaaatactacaatacggtttaccgaaaataatcagtacgttcttcatttatgggtatcaaaaacttaaaatcgttactgctggaaaataaatcactgacgatattagatgataatttatacaaagtatacaatggaatatttgtggatacaatgagtatttatatagccgtcgccaattgtgtcagaaacttagaagagttaactacggtattcataaaatacgtaaacggatgggtaaaaaagggagggcatgtaaccctttttatcgatagaggaagtataaaaattaaacaagacgttagagacaagagacgtaaatattctaaattaaccaaggacagaaaaatgttagaattagaaaagtgtacatccgaaatacaaaatgttaccggatttatggaagaagaaataaaggcagaaatgcaattaaaaatcgataaactcacatttcaaatatatttatctgattctgataacataaaaatatcattgaatgagatactaacacatttcaacaataatgagaatgttacattattttattgtgatgaacgagacgcagaattcgttatgtgtctcgaggctaaaacacatttctctaccacaggagaatggccgttgataataagtaccgatcaggatactatgctatttgcatctgctgataatcatcctaagatgataaaaaacttaactcaactgtttaaatttgttccctcggcagaggataactatttagcaaaattaacggcgttagtgaatggatgtgatttctttcctggactctatggggcatctataacacccaccaacttaaacaaaatacaattgtttagtgattttacaatcgataatatagtcactagtttggcaattaaaaattattatagaaagactaactctaccgtagacgtgcgtaatattgttacgtttataaacgattacgctaatttagacgatgtctactcgtatattcctccttgtcaatgcactgttcaagaatttatattttccgcattagatgaaaaatggaatgaatttaaatcatcttatttagaaagcgtgccgttaccctgccaattaatgtacgcgttagaaccacgcaaggagattgatgtttcagaagttaaaactttatcatcttatatagatttcgaaaatactaaatcagatatcgatgttataaaatctatatcctcgatcttcggatattctaacgaaaactgtaacacgatagtattcggcatctataaggataatttactactgagtataaataattcattttactttaacgatagtctgttaataaccaatactaaaagtgataatataataaatataggttactagattaaaaatggtgttccaactcgtgtgctctacatgcggtaaagatatttctcacgaacgatataaattgattatacgaaaaaaatcattaaaggatgtactcgtcagtgtaaagaacgaatgttgtaggttaaaattatctacacaaatagaacctcaacgtaacttaacagtgcaacctctattggatataaactaatatggatccggttaattttatcaagacatatgcgcctagaggttctattatttttattaattataccatgtcattaacaagtcatttgaatccatcgatagaaaaacatgtgggtatttattatggtacgttattatcggaacacttggtagttgaatctacctatagaaaaggagttcgaatagtcccattggatagtttttttgaaggatatcttagtgcaaaagtatacatgttagagaatattcaagttatgaaaatagcagctgatacgtcattaactttattgggtattccgtatggatttggtcatgatagaatgtattgttttaaattggtagctgactgttataaaaatgccggtattgatacatcgtctaaacgaatattgggcaaagatatttttctgagccaaaacttcacagacgataatagatggataaagatatatgattctaataatttaacattttggcaaattgattaccttaaagggtgagttaatatgcataactactcctccgttgttttttccctcgttctttttcttaacgttgtttgccatcactctcataatgtaaagatattctaaaatggtaaacttttgcatatcggacgcagaaattggtataaatgttgtaattgtattatttcccgtcaatggactagtcacagctccatcagttttatatcctttagagtatttctcactcgtgtctaacattctagagcattccatgatctgtttatcgttgatattggccggaaagatagattttttattttttattatattactattggcaattgtagatataacttctggtaaatatttttctaccttttcaatctcttctattttcaagccggctatatattctgctatattgttgctagtatcaataccttttctggctaagaagtcatatgtggtattcactatatcagttttaactggtagttccattagcctttccacttctgcagaataatcagaaattggttctttaccagaaaatccagctactataataggctcaccgatgatcattggcaaaatcctatattgtaccagattaatgagagcatatttcatttccaataattctgctagttcttgagacattgatttatttgatgaatctagttggttctctagatactctaccatttctgccgcatacaataacttgttagataaaatcagggttatcaaagtgtttagcgtggctagaatagtgggcttgcatgtattaaagaatgcggtagtatgagtaaaccgttttaacgaattatatagtctccagaaatctgtggcgttacatacatgagccgaatgacatcgaagattgtccaatatttttaatagctgctctttgtccattatttctatatttgactcgcaacaattgtagataccattaatcaccgattcctttttcgatgccggacaatagcacaattgtttagctttggactctatgtattcagaattaatagatatatctctcaatacagattgcactatacattttgaaactatgtcaaaaattgtagaacgacgctgttctgcagccatttaactttaaataatttacaaaaatttaaaatgagcatccgtataaaaatcgataaactgcgccaaattgtggcatatttttcagagttcagtgaagaagtgtctataaatgtagactcgacggatgagttaatgtatatttttgccgccttgggcggatctgtaaacatttgggcaattatacctctaagtgcatcagtgttttaccgaggagccgaaaatattgtgtttaatcttcctgtgtccaaggtaaaatcgtgtttgtgtagttttcacaatgatgccatcatagatatagaacctgatctggaaaataatctagtaaaactttctagttatcatgtagtaagtgtcgattgtaacaaggaactgatgcctattaggacagatactactatttgtctaagtatagatcaaaagaaatcttacgtgtttaattttcacaagtatgaagaaaaatgttgtggtagaaccgtcattcatctagaatggttgttgggctttatcaagtgtattagtcagcatcagcatctggctattatgtttaaagatgacaatattattatgaagactcctggtaatactgatgcgttttccagggaatattctatgactgaatgttctcaagaactacaaaagttttctttcaaaatagctatctcgtctctcaacaaactacgaggattcaaaaagagagtcaatgtttttgaaactagaatcgtaatggataatgacgataacattttaggaatgttgttttcggatagagttcaatcctttaagatcaacatctttatggcgtttttagattaatactttcaatgagataaatatgggtggcggagtaagtgttgagctccctaaacgggatccgcctccgggagtacccactgatgagatgttattaaacgtggataaaatgcatgacgtgatagctcccgctaagcttttagaatatgtgcatataggaccactagcaaaagataaagaggataaagtaaagaaaagatatccagagtttagattagtcaacacaggacccggtggtctttcggcattgttaagacaatcgtataatggaaccgcacccaattgctgtcgcacttttaatcgtactcattattggaagaaggatggaaagatatcagataagtatgaagagggtgcagtattagaatcgtgttggccagacgttcacgacactggaaaatgcgatgttgatttattcgactggtgtcagggggatacgttcgatagaaacatatgccatcagtggatcggttcagcctttaataggagtaatagaactgtagagggtcaacaatcgttaataaatctgtataataagatgcaaacattatgtagtaaagatgctagtgtaccaatatgcgaatcatttttgcattatttacgcgcacacaatacagaagatagcaaagagatgatcgattatattctaagacaacagtctgcggactttaaacagaaatatatgagatgtagttatcccactagagataagttagaagagtcattaaaatatgcggaacctcgagaatgttgggatccagagtgttcgaatgccaatgttaatttcttactaacacgtaattataataatttaggactttgcaatattgtacgatgtaataccagcgtgaacaacttacagatggataaaacttcctcattaagattgtcatgtggattaagcaatagtgatagattttctactgttcccgtcaatagagcaaaagtagttcaacataatattaaacactcgttcgacctaaaattgcatttgatcagtttattatctctcttggtaatatggatactaattgtagctatttaaatgggtgccgcggcaagcatacagacgacggtgaatacactcagcgaacgtatctcgtctaaattagaacaagaagcgaacgctagtgctcaaacaaaatgtgatatagaaatcggaaatttttatatccgacaaaaccatggatgtaacctcactgttaaaaatatgtgctctgcggacgcggatgctcagttggatgctgtgttatcagccgctacagaaacatatagtggattaacaccggaacaaaaagcatacgtgccagctatgtttactgctgcgttaaacattcagacgagtgtaaacactgttgttagagattttgaaaattatgtgaaacagacttgtaattctagcgcggtcgtcgataacaaattaaagatacaaaacgtaatcatagatgaatgttacggagccccaggatctccaacaaatttggaatttattaatacaggatctagcaaaggaaattgtgccattaaagcgttgatgcaattgacgactaaggccactactcaaatagcacctagacaagttgctggtacaggagttcagttttatatgattgttatcggtgttataatattggcagcgttgtttatgtactatgccaagcgtatgttgttcacatccaccaatgataaaatcaaacttattttagccaataaggaaaacgtccattggactacttacatggacacattctttagaacttctccgatggttattgctaccacggatatgcaaaactgaaaatatattgataatattttaatagattaacatggaagttatcgctgatcgtctagacgatatagtgaaacaaaatatagcggatgaaaaatttgtagattttgttatacacggtctagagcatcaatgtcctgctatacttcgaccattaattaggttgtttattgatatactattatttgttatagtaatttatatttttacggtacgtctagtaagtagaaattatcaaatgttgttggtggtgctagtcatcacattaactattttttattactttatactataatagtactagactgacttctaacaaacatctcacctgccataaataaatgcttgatattaaagtcttctatttctaacactattccatctgtggaaaataatactctgacattatcgctaattgacacatcggtgagtgatatgcctataaagtaataatcttctttgggcacatataccagtgtaccaggttctaacaacctatttactggtgctcctgtagcatactttttctttaccttgagaatatccatcgtttgcttggtcaatagcgatatgtgattttttatcaaccactcaaaaaagtaattggagtgttcatatcctctacgggctattgtctcatggccgtgtatgaaatttaagtaacacgactgtggtagatttgttctatagagccgattgccgcaaatagatagaactaccaatatgtctgtacaaatgttaaacattaattgattaacagaaaaaacaatgttcgttctgggaatagaaaccagatcaaaacaaaattcgttagaatatatgccacgtttatacatggaatataaaataactacagtttgaaaaataacagtatcatttaaacatttaacttgcggggttaatctcacaactttactgtttttgaactgttcaaaatatagcatcgatccgtgagaaatacgtttagccgcctttaatagaggaaatcccaccgcctttctggatctcaccaacgacgatagttctgaccagcaactcatttcttcatcatccacctgttttaacatataataggcaggagatagatatccgtcattgcaatattccttctcgtaggcacacaatctaatattgataaaatctccattctcttctctgcatttattatcttgtctcggtggctgattaggctgtggtcttggtttaggccttggtctatcgttgttgaatctattttggtcattaaatctttcatttcttcctggtatatttctatcacctcgtttggttggatttttgtctatattatcgtttgtaacatcggtacgggtattcatttatcacaaaaaaaacttctctaaatgagtctactgctagaaaacctcatcgaagaagataccatattttttgcaggaagtatatctgagtatgatgatttacaaatggttattgccggcgcaaaatccaaatttccaagatctatgctttctatttttaatatagtacctagaacgatgtcaaaatatgagttggagttgattcataacgaaaatatcacaggagcaatgtttaccacaatgtataatataagaaacaatttgggtctaggagatgataaactaactattgaagccattgaaaactatttcttggatcctaacaatgaagttatgcctcttattattaataatacggatatgactgccgtcattcctaaaaaaagtggtaggagaaagaataagaacatggttatcttccgtcaaggatcatcacctatcttgtgcattttcgaaactcgtaaaaagattaatatttataaagaaaatatggaatccgcgtcgactgagtatacacctatcggagacaacaaggctttgatatctaaatatgcgggaattaatgtcctgaatgtgtattctccttccacatccataagattgaatgccatttacggattcaccaataaaaataaactagagaaacttagtactaataaggaactagaatcgtatagttctagccctcttcaagaacccattaggttaaatgattttctgggactattggaatgtgttaaaaagaatattcctctaacagatattccgacaaaggattgattactataaatggagaatgttcctaatgtatactttaatcctgtgtttatagagcccacgtttaaacattctttattaagtgtttataaacacagattaatagttttatttgaagtattcgttgtattcattctaatatatgtattttttagatctgaattaaatatgttcttcatgcctaaacgaaaaatacccgatcctattgatagattacgacgtgctaatctagcgtgtgaagacgataaattaatgatctatggattaccatggatgacaactcaaacatctgcgttatcaataaatagtaaaccgatagtgtataaagattgtgcaaagcttttgcgatcaataaatggatcacaaccagtatctcttaacgatgttcttcgcagatgatgattcattttttaagtatttggctagtcaagatgatgaatcttcattatctgatatattgcaaatcactcaatatctagactttctgttattattattgatccaatcaaaaaataaattagaagctgtgggtcattgttatgaatctctttcagaggaatacagacaattgacaaaattcacagactttcaagattttaaaaaactgtttaacaaggtccctattgttacagatggaagggtcaaacttaataaaggatatttgttcgactttgtgattagtttgatgcgattcaaaaaagaatcctctctagctaccaccgcaatagatcctgttagatacatagatcctcgtcgtgatatcgcattttctaacgtgatggatatattaaagtcgaataaagtgaacaataattaattctttattgtcatcatgaacggcggacatattcagttgataatcggccccatgttttcaggtaaaagtacagaattaattagacgagttagacgttatcaaatagctcaatataaatgcgtgactataaaatattctaacgataatagatacggaacgggactatggacgcatgataagaataattttgaagcattggaagcaactaaactatgtgatgtcttggaatcaattacagatttctccgtgataggtatcgatgaaggacagttctttccagacattgtttaattctgtgagcgtatggcaaacggtaccgagctcaaaaattgaaaaactagcgtctttttttgctcgaagtcgacgccaccatgcttctggcgcggatgaacccgcaggtgcagcccgagaacaacggggcggacacgggtccagagcagccccttcgggcgcgcaaaactgcggagctgctggtggtgaaggagcgcaacggcgtccagtgcctgctggcgccccgcgacggcgacgcgcagccccgggagacctggggcaagaagatcgacttcctgctgtccgtagtcggcttcgcagtggacctggccaacgtgtggcgcttcccctacctctgctacaagaacggcggcggtgccttcttgatcccgtacacactgttccttatcatcgcggggatgcccctgttctacatggagctggctctgggacagtacaaccgggagggggctgccaccgtttggaaaatctgcccattcttcaaaggcgttggctatgctgtcatcctgatcgccctgtacgttggcttctactacaacgtcatcatcgcctggtcactctactacctcttctcctccttcaccctcaacctgccctggaccgactgtggccacacctggaacagccccaactgtaccgaccccaagctcctcaatggctccgtgcttggcaaccacaccaagtactccaagtacaagttcacgccggcagccgagttttatgagcgtggtgtcctgcaccttcacgagagcagcgggattcatgacatcggcctgccccagtggcagctcttgctctgtctgatggtcgtcgtcatcgtcttgtattttagcctctggaaaggggtgaagacatcaggaaaggtggtgtggatcacagccacgctgccttacttcgtgctgttcgtgctcctggtccatggcgtcacgctgcccggagcctccaatggcatcaatgcctacctgcacatcgacttctaccgcttgaaagaggccacggtatggattgatgccgcaactcagatatttttttccttgggggctggatttggagtattgattgcatttgccagttacaacaaatttgacaacaactgttacagggatgccctgctgaccagcagcatcaactgtatcaccagcttcgtctctgggttcgccatcttctccatccttggttacatggcccatgaacacaaggtcaacattgaggatgtggccacagaaggagctggcctagtgttcatcctgtatccagaggccatttctaccctgtctggatctacattctgggctgttgtgtttttcgtcatgctcctggcgctgggccttgacagctcaatgggaggcatggaggctgtcatcacgggcctggcagatgacttccaggtcctgaagcgacaccggaaactcttcacatttggcgtcaccttcagcactttccttctcgccctgttctgcataaccaagggtggaatttacgtcttgaccctcctggacacctttgctgcgggcacctccatcctttttgctgtcctcatggaagccatcggagtttcctggttttatggagtggacaggttcagcaacgacatccagcagatgatggggttcaggccgggtctatactggagactgtgctggaagttcgtcagtcctgccttcctcctgttcgtggttgtggtcagcatcatcaacttcaagccactcacctacgacgactacatcttcccgccctgggccaactgggtggggtggggcatcgccctgtcctccatggtcctggtgcccatctacgtcatctataagttcctcagcacgcagggctctctttgggagagactggcctatggcatcacgccagagaacgagcaccacctggtggctcagagggacatcagacagttccagttgcaacactggctggccatctgagatgggtaattaattaatttttatcgatctaattcaacaatgtctggagagctcggatccttctgtgagcgtatggcaaacgaaggaaaaatagttatagtagccgcactcgatgggacatttcaacgtaaaccgtttaataatattttgaatcttattccattatctgaaatggtggtaaaactaactgctgtgtgtatgaaatgctttaaggaggcttccttttctaaacgattgggtgaggaaaccgagatagagataataggaggtaatgatatgtatcaatcggtgtgtagaaagtgttacgtcggctcataatattatattttttatctaaaaaactaaaaataaacattgattaaattttaatataatacttaaaaatggatgttgtgtcgttagataaaccgtttatgtattttgaggaaattgataatgagttagattacgaaccagaaagtgcaaatgaggtcgcaaaaaaactgccgtatcaaggacagttaaaactattactaggagaattattttttcttagtaagttacagcgacacggtatattagatggtgccaccgtagtgtatataggatctgctcccggtacacatatacgttatttgagagatcatttctataatttaggagtgatcatcaaatggatgctaattgacggccgccatcatgatcctattttaaatggattgcgtgatgtgactctagtgactcggttcgttgatgaggaatatctacgatccatcaaaaaacaactgcatccttctaagattattttaatttctgatgtgagatccaaacgaggaggaaatgaacctagtacggcggatttactaagtaattacgctctacaaaatgtcatgattagtattttaaaccccgtggcgtctagtcttaaatggagatgcccgtttccagatcaatggatcaaggacttttatatcccacacggtaataaaatgttacaaccttttgctccttcatattcagctgaaatgagattattaagtatttataccggtgagaacatgagactgactcgagttaccaaattagacgctgtaaattatgaaaaaaagatgtactaccttaataagatcgtccgtaacaaagtagttgttaactttgattatcctaatcaggaatatgactattttcacatgtactttatgctgaggaccgtgtactgcaataaaacatttcctactactaaagcaaaggtactatttctacaacaatctatatttcgtttcttaaatattccaacaacatcaactgaaaaagttagtcatgaaccaatacaacgtaaaatatctagcaaaaattctatgtctaaaaacagaaatagcaagagatccgtacgcggtaataaatagaaacgtactactgagatatactaccgatatagagtataatgatttagttactttaataaccgttagacataaaattgattctatgaaaactgtgtttcaggtatttaacgaatcatccataaattatactccggttgatgatgattatggagaaccaatcattataacatcgtatcttcaaaaaggtcataacaagtttcctgtaaattttctatacatagatgtggtaatatctgacttatttcctagctttgttagactagatactacagaaactaatatagttaatagtgtactacaaacaggcgatggtaaaaagactcttcgtcttcccaaaatgttagagacggaaatagttgtcaagattctctatcgccctaatataccattaaaaattgttagatttttccgcaataacatggtaactggagtagagatagccgatagatctgttatttcagtcgctgattaatcaattagtagagatgagataagaacattataataatcaataatatatcttatatcttatatcttatatcttatatcttgtttagaaaaatgctaatattaaaatagctaacgctagtaatccaatcggaagccatttgatatctataatagggtatctaatttcctgatttaaatagcggacagctatattctcggtagctactcgtttggaatcacaaacattatttacatctaatttactatctgtaatggaaacgtttcccaatgaaatggtacaatccgatacattgcattttgttatatttttttttaaagaggctggtaacaacgcatcgcttcgtttacatggctcgtaccaacaataatagggtaatcttgtatctattcctatccgtactatgcttttatcaggataaatacatttacatcgtatatcgtctttgttagcatcacagaatgcataaatttgttcgtccgtcatgataaaaatttaaagtgtaaatataactattatttttatagttgtaataaaaagggaaatttgattgtatactttcggttctttaaaagaaactgacttgataaaaatggctgtaatctctaaggttacgtatagtctatatgatcaaaaagagattaatgctacagatattatcattagtcatgttaaaaatgacgacgatatcggtaccgttaaagatggtagactaggtgctatggatggggcattatgtaagacttgtgggaaaacggaattggaatgtttcggtcactggggtaaagtaagtatttataaaactcatatagttaagcctgaatttatttcagaaattattcgtttactgaatcatatatgtattcactgcggattattgcgttcacgagaaccgtattccgacgatattaacctaaaagagttatcgggacacgctcttaggagattaaaggataaaatattatccaagaaaaagtcatgttggaacagtgaatgtatgcaaccgtatcaaaaaattactttttcaaagaaaaaggtttgtttcgtcaacaagttggatgatattaacgttcctaattctctcatctatcaaaagttaatttctattcatgaaaagttttggccattattagaaattcatcaatatccagctaacttattttatacagactactttcccatccctccgttgattattagaccggctattagtttttggatagatagtatacccaaagagaccaatgaattaacttacttattaggtatgatcgttaagaattgtaacttgaatgctgatgaacaggttatccagaaggcggtaatagaatacgatgatattaaaattatttctaataacactaccagtatcaatttatcatatattacatccggcaaaaataatatgattagaagttatatcgtcgcccgacgaaaagatcagaccgctagatctgtaattggtcccagtacatctatcaccgttaatgaggtaggaatgcccgcatatattagaaatacacttacagaaaagatatttgttaatgcctttacagtggataaagttaaacaactattagcgtcaaaccaagttaaattttactttaataaacgattaaaccaattaacaagaatacgccaaggaaagtttattaaaaataaaatacatttattgcctggtgattgggtagaagtagctgttcaagaatatacaagtattatttttggaagacagccgtctctacatagatacaacgtcatcgcttcatctatcagagctaccgaaggagatactatcaaaatatctcccggaattgccaactctcaaaatgctgatttcgacggggatgaggaatggatgatattagaacaaaatcctaaagctgtaattgaacaaagtattcttatgtatccgacgacgttactcaaacacgatattcatggagcccccgtttatggatctattcaagatgaaatcgtagcagcgtattcattgtttaggatacaagatctttgtttagatgaagtattgaacatcttggggaaatatggaagagagttcgatcctaaaggtaaatgtaaattcagcggtaaagatatctatacttacttgataggtgaaaagattaattatccgggtctcttaaaggatggtgaaattattgcaaacgacgtagatagtaattttgttgtggctatgaggcatctgtcattggctggactcttatccgatcataagtcgaacgtggaaggtatcaactttattatcaagtcatcttatgtttttaagagatatctatctatttacggttttggggtgacattcaaagatctgagaccaaattcgacgttcactaataaattggaggccatcaacgtagaaaaaatagaacttatcaaagaagcatacgccaaatatctcaacgatgtaagagacgggaaaatagttccattatctaaagctttagaggcggactatgtggaatccatgttatccaacttgacaaatcttaatatccgagagatagaagaacatatgagacaaacgctgatagatgatccagataataacctcctgaaaatggccaaagcgggttataaagtaaatcccacagaactaatgtatattctaggtacgtatggacaacaaaggattgatggtgaaccagcagagactcgagtattgggtagagttttaccttactatcttccagactctaaggatccagaaggaagaggttacattcttaattctttaacaaaaggattaacgggttctcaatattacttttcgatgctggttgccagatctcaatctactgatatcgtctgtgaaacatcacgtaccggaacactggctagaaaaatcattaaaaagatggaggatatggtggtcgacggatacggacaagtagttataggtaatacgctcatcaagtacgccgccaattataccaaaattctaggctcagtatgtaaacctgtagatcttatctatccagatgagtccatgacttggtatttggaaattagtgctctgtggaataaaataaaacagggattcgtttactctcagaaacagaaacttgcaaagaagacattggcgccgtttaatttcctagtattcgtcaaacccaccactgaggataatgctattaaggttaaggatctgtacgatatgattcataacgtcattgatgatgtgagagagaaatacttctttacggtatctaatatagattttatggagtatatattcttgacgcatcttaatccttctagaattagaattacaaaagaaacggctatcactatctttgaaaagttctatgaaaaactcaattatactctaggtggtggaactcctattggaattatttctgcacaggtattgtctgagaagtttacacaacaagccctgtccagttttcacactactgaaaaaagtggtgccgtcaaacaaaaacttggtttcaacgagtttaataacttgactaatttgagtaagaataagaccgaaattatcactctggtatccgatgatatctctaaacttcaatctgttaagattaatttcgaatttgtatgtttgggagaattaaatccaaacatcactcttcgaaaagaaacagataaatatgtagtagatataatagtcaatagattatacatcaagagagcagaaataaccgaattagtcgtcgaatatatgattgaacgatttatctcctttagcgtcattgtaaaggaatggggtatggagacattcattgaggacgaggataatattagatttactgtctacctaaatttcgttgaaccggaagaattgaatcttagtaagtttatgatggttcttccgggggcagccaacaagggaaagattagtaaattcaagattcctatctctgattatacgggatatgacgacttcaatcaaacaaaaaagctcaataagatgactgtagaactcatgaatctaaaagaattgggttctttcgatttggaaaacgtcaacgtgtatcctggagtatggaatacatacgatatcttcggtatcgaggccgctcgtgaatacttgtgcgaagccatgttaaacacctatggagaagggttcgattatctgtatcagccttgtgatcttctcgctagtttactatgtgctagttacgaaccagaatcagtgaataaattcaagttcggcgcagctagtactcttaagagagctacgttcggagacaataaagcattgttaaacgcggctcttcataaaaagtcagaacctattaacgataatagtagctgccacttttttagcaaggtccctaatataggaactggatattacaaatactttatcgacttgggtcttctcatgagaatggaaaggaaactatctgataagatatcttctcaaaagatcaaggaaatggaagaaacagaagacttttaattcttatcaataacatatttttctatgatctgtcttttaaacgatggattttccacaaatgcgcctctcaagtccctcatagaatgatacacgtataaaaaatatagcataggcaatgactccttatttttagacattagatatgccaaaatcatagccccgcttctatttactcccgcagcacaatgaaccaacacgggctcgtttcgttgatcacatttagataaaaaggcggttacgtcgtcaaaatatttactaatatcggtagttgtatcatctaccaacggtatatgaataatattaatattagagttaggtaatgtatatttatccatcgtcaaatttaaaacatatttgaacttaacttcagatgatggtgcatccatagcatttttataatttcccaaatacacattattggttacccttgtcattatagtgggagatttggctttgtgcatatctccagttgaacgtagtagtaagtatttatacaaacttttcttatccatttataacgtacaaatggataaaactactttatcggtaaacgcgtgtaatttagaatacgttagagaaaaggctatagtaggcgtacaagcagccaaaacatcaacacttatattctttgttattatattggcaattagtgcgctattactctggtttcagacgtctgataatccagtctttaatgaattaacgagatatatgcgaattaaaaatacggttaacgattggaaatcattaacggatagcaaaacaaaattagaaagtgatagaggtagacttctagccgctggtaaggatgatatatttgaattcaaatgtgtggatttcggcgcctattttatagctatgcgattggataagaaaacatatctgccgcaagctattaggcgaggtactggagacgcgtggatggttaaaaaggcggcaaaggtcgatccatctgctcaacaattttgtcagtatttgataaaacacaagtctaataatgttattacttgtggtaatgagatgttaaatgaattaggttatagcggttattttatgtcaccgcattggtgttccgattttagtaatatggaatagtgttagataaatgcggtaacgaatgttcctgtaaggaaccataacagcttagatttaacgttaaagatgagcataaacataataaacaaaattacaatcaaacttataacattaatatcaaacaatccaaaaaatgaaatcagtggagtagtaaacgcgtacataactcctggataacgtttagcagctgccgttcctattctagaccaaaaattcggtttcatgttttcgaaacggtattctgcaacaagtcgaggatcgtgttctacatatttggcggcattatccagtatctgcctattgatcttcatttcgttttcgattctggctatttcaaaataaaatcccgatgatagacctccagactttataatttcatctacgatgttcagcgccgtagtaactctaataatataggctgataagctaacatcataccctcctgtatatgtgaatatggcatgatttttgtccattacaagctcggttttaactttattgcctgtaataatttctctcatctgtaggatatctatttttttgtcatgcattgccttcaagacgggacgaagaaacgtaatatcctcaataacgttatcgttttctacaataactacatattctacctttttattttctaactcggtaaaaaaattagaatcccatagggctaaatgtctagcgatatttcttttcgtttcctctgtacacatagtgttacaaaaccctgaaaagaagtgagtatacttgtcatcatttctaatgtttcctccagtccactgtataaacgcataatccttgtaatgatctggatcatccttgactaccacaacatttcttttttctggcataacttcgttgtcctttacatcatcgaacttctgatcattaatatgctcatgaacattaggaaatgtttctgatggaggtctatcaataactggcacaacaataacaggagttttcaccgccgccatttagttattgaaattaatcatatacaactctttaatacgagttatattttcgtctatccattgtttcacattgacatatttcgacaaaaagatataaaatgcgtattccaatgcttctctgtttaatgaattactaaaatatacaaacacgtcactgtctggcaataaatgatatcttagaatattgtaacaatttattttgtattgcacatgttcgtgatctatgagttcttcttcgaatggcataggatctccgaatctgaaaacgtataaataggagttagaataataatatttgagagtattggtaatatataaactctttagcggtataattagtttttttctctcaatttctatttttagatgtgatggaaaaatgactaattttgtagcattagtatcatgaactctaatcaaaatcttaatatcttcgtcacacgttagctctttgaagtttttaagagatgcatcagttggttctacagatggagtaggtgcaacaattttttgttctacacatgtatgtactggagccattgttttaactataatggtgcttgtatcgaaaaactttaatgcagatagcggaagctcttcgccgcgactttctacgtcgtaattgggttctaacgccgatctctgaatggatactagttttctaagttctaatgtgattctctgaaaatgtaaatccaattcctccggcattatagatgtgtatacatcggtaaataaaactatagtatccaacgatcccttctcgcaaattctagtcttaaccaaaaaatcgtatataaccacggagatggcgtatttaagagtggattcttctaccgttttgttcttggatgtcatataggaaactataaagtccgcactactgttaagaatgattactaacgcaactatatagtttaaattaagcattttggaaacataaaataactctgtagacgatacttgactttcgaataagtttgcagacaaacgaagaaagaacagacctctcttaatttcagaagaaaactttttttcgtattcctgacgtctagagtttatatcaataagaaagttaagaattagtcggttaatgttgtatttcattacccaagtttgagatttcataatattatcaaaagacatgataatattaaagataaagcgctgactatgaacgaaatagctatatggttcgctcaagaatatagtcttgttaaacgtggaaacgataactgtatttttaatcacgtcagcggcatctaaattaaatataggtatatttattccacacactctacaatatgccacaccatcttcataataaataaattcgttagcaaaattattaattttagtgaaatagttagcgtcaactttcatagcttccttcaatctaatttgatgctcacacggtgcgaattccactctaacatcccttttccatgcctcaggttcatcgatctctataatatctagttttttgcgtttcacaaacacaggctcgtctctcgcgatgagatctgtatagtaactatgtaaatgataactagatagaaagatgtagctatatagatgacgatcctttaagagaggtataataactttaccccaatcagatagactgttgttatggtcttcggaaaaagaatttttataaatttttccagtattttccaaatatacgtacttaacatctaaaaaatccttaatgataataggaatggataatccgtctattttataaagaaatacatatcgcacattatacttttttttggaaatgggaataccgatgtgtctacataaatatgcaaagtctaaatattttttagagaatcttagttggtccaaattcttttccaagtacggtaatagatttttcatattgaacggtatcttcttaatctctggttctagttccgcattaaatgatgaaactaagtcactatttttataactaacgattacatcacctctaacatcatcatttaccagaatactgatcttcttttgtcgtaaatacatgtctaatgtgttaaaaaaaagatcatacaagttatacgtcatttcatctgtggtattcttgtcattgaaggataaactcgtactaatctcttctttaacagcctgttcaaatttatatcctatatacgaaaaaatagcaaccagtgtttgatcatccgcgtcaatattctgttctatcgtagtgtataacaatcgtatatcttcttctgtgatagtcgatacgttataaaggttgataacgaaaatatttttatttcgtgaaataaagtcatcgtaggattttggacttatattcgcgtctagtagatatgcttttatttttggaatgatctcaattagaatagtctctttagagtccatttaaagttacaaacaactaggaaattggtttatgatgtataatttttttagtttttatagattctttattctatacttaaaaaatgaaaataaatacaaaggttcttgagggttgtgttaaattgaaagcgagaaataatcataaattatttcattatcgcgatatccgttaagtttgtatcgtaatggcgtggtcaattacgaataaagcggatactagtagcttcacaaagatggctgaaatcagagctcatctaaaaaatagcgctgaaaataaagataaaaacgaggatattttcccggaagatgtaataattccatctactaagcccaaaaccaaacgagccactactcctcgtaaaccagcggctactaaaagatcaaccaaaaaggaggaagtggaagaagaagtagttatagaggaatatcatcaaacaactgaaaaaaattctccatctcctggagtcagcgacattgtagaaagcgtggccgctgtagagctcgatgatagcgacggggatgatgaacctatggtacaagttgaagctggtaaagtaaatcatagtgctagaagcgatctctctgacctaaaggtggctaccgacaatatcgttaaagatcttaagaaaattattactagaatctctgcagtatcgacggttctagaggatgttcaagcagctggtatctctagacaatttacttctatgactaaagctattacaacactatctgatctagtcaccgagggaaaatctaaagttgttcgtaaaaaagttaaaacttgtaagaagtaaatgcgtgcacttttttataaagatggtaaactctttaccgataataattttttaaatcctgtatcagacgataatccagcgtatgaggttttgcaacatgttaaaattcctactcatttaacagatgtagtagtatatgaacaaacgtgggaggaggcgttaactagattaatttttgtgggaagtgattcaaaaggacgtagacaatacttttacggaaaaatgcatgtacagaatcgcaacgctaaaagagatcgtatttttgttagagtatataacgttatgaaacgaattaattgttttataaacaaaaatataaagaaatcgtccacagattccaattatcagttggcggtttttatgttaatggaaactatgttttttattagatttggtaaaatgaaatatcttaaggagaatgaaacagtagggttattaacactaaaaaataaacacatagaaataagtcccgatgaaatagttatcaagtttgtaggaaaggacaaagtttcacatgaatttgttgttcataagtctaatagactatataaaccgctattgaaactgacggatgattctagtcccgaagaatttctgttcaacaaactaagtgaacgaaaggtatacgaatgtatcaaacagtttggtattagaatcaaggatctccgaacgtatggagtcaattatacgtttttatataatttttggacaaatgtaaagtccatatctcctcttccgtcaccaaaaaagttaatagcattaactatcaaacaaactgctgaagtggtaggtcatactccatcaatttcaaaaagagcttatatggcaacgactattttagaaatggtaaaggataaaaattttttagatgtagtatctaaaactacgttcgatgaattcctatctatagtcgtagatcacgttaaatcatctacggatggatgatatagatctttacacaaataattacaagaccgataaatggaaatggataagcgtatgaaatctctcgcaatgacagctttcttcggagagctaagcacattagatattatggcattgataatgtctatatttaaacgccatccaaacaataccattttttcagtggataaggatggtcagtttatgattgatttcgaatacgataattataaggcttctcaatatttggatctgaccctcactccgatatctggagatgaatgcaagactcacgcatcgagtatagccgaacaattggcgtgtgcggatattattaaagaggatattagcgaatatatcaaaactactccccgtcttaaacgatttataaaaaaataccgcaatagatcagatactcgtatcagtcgagatacagaaaagcttaaaatagctctagctaaaggcatagattacgaatatataaaagacgcttgttaataagtaaatgaaaaaaaactagtcgtttataataaaacacgatatggatgccaacgtagtatcattttctactattgcgacgtatatagacgctttagcgaagaatgcttcggaattagaacagaggtctaccgcatacgaaataaataatgaattggaactagtatttattaagccgccattgattactttgacaaatgtagtgaatatctctacgattcaggaatcgtttattcgatttaccgttactaataaggaaggtgttaaaattagaactaagattccattatctaaggtacatggtctagatgtaaaaaatgtacagttagtagatgctatagataacatagtttgggaaaagaaatcattagtgacggaaaatcgtcttcacaaagaatgcttgttgagactatcgacagaggaacgtcatatatttttggattacaagaaatatggatcctctatccgactagaattagtcaatcttattcaagcaaaaacaaaaaactttacgatagactttaagctaaaatattttctaggatccggtgcccagtctaaaagttctttgttgcacgctattaatcatccaaagtcaaggcctaatacatctctggaaatagaattcacacctagagacaatgaaacagttccatatgatgaactaataaaggaattgacgactctctcgcgtcatatatttatggcttctccagagaatgtaattctttctccgcctattaacgcgcctataaaaacctttatgttgcctaaacaagatatagtaggtttggatctggaaaatctatatgccgtaactaagactgacggcattcctataactatcagagttacatcaaacgggttgtattgttattttacacatcttggttatattattagatatcctgttaagagaataatagattccgaagtagtagtctttggtgaggcagttaaggataagaactggaccgtatatctcattaagctaatagagcctgtgaatgcaatcaatgatagactagaagaaagtaagtatgttgaatctaaactagtggatatttgtgatcggatagtattcaagtcaaagaaatacgaaggtccgtttactacaactagtgaagtcgtcgatatgttatctacatatttaccaaagcaaccagaaggtgttattctgttctattcaaagggacctaaatctaacattgattttaaaattaaaaaggaaaatactatagaccaaactgcaaatgtagtatttaggtacatgtccagtgaaccaattatctttggagaatcgtctatctttgtagagtataagaaatttagcaacgataaaggctttcctaaagaatatggttctggtaagattgtgttatataacggcgttaattatctaaataatatctattgtttggaatatattaatacacataatgaagtgggtattaagtccgtggttgtacctattaagtttatagcagaattcttagttaatggagaaatacttaaacctagaattgataaaaccatgaaatatattaactcagaagattattatggaaatcaacataatatcatagtcgaacatttaagagatcaaagcatcaaaataggagatatctttaacgaggataaactatcggatgtgggacatcaatacgccaataatgataaatttagattaaatccagaagttagttattttacgaataaacgaactagaggaccgttgggaattttatcaaactacgtcaagactcttcttatttctatgtattgttccaaaacatttttagacgattccaacaaacgaaaggtattggcgattgattttggaaacggtgctgacctggaaaaatacttttatggagagattgcgttattggtagcgacggatccggatgctgatgctatagctagaggaaatgaaagatacaacaaattaaactctggaattaaaaccaagtactacaaatttgactacattcaggaaactattcgatccgatacatttgtctctagtgtcagagaagtattctattttggaaagtttaatatcatcgactggcagtttgctatccattattcttttcatccgagacattatgctaccgtcatgaataacttatccgaactaactgcttctggaggcaaggtattaatcactaccatggacggagacaaattatcaaaattaacagataaaaagacttttataattcataagaatttacctagtagcgaaaactatatgtctgtagaaaaaatagctgatgatagaatagtggtatataatccatcaacaatgtctactccaatgactgaatacattatcaaaaagaacgatatagtcagagtgtttaacgaatacggatttgttcttgtagataacgttgatttcgctacaattatagaacgaagtaaaaagtttattaatggcgcatctacaatggaagatagaccgtctacaaaaaactttttcgaactaaatagaggagccattaaatgtgaaggtttagatgtcgaagacttacttagttactatgttgtttatgtcttttctaagcggtaaataataatatggtatgggttctgatctcccagttctaaatgcattaaataattccaatagagcgatttttgttcctataggaccttccaactgtggatactctgtattgttaatagatatattaatacttttgtcgggtaacagaggttctacgtcttctaaaaataaaagttttataacatctggcctgttcataaataaaaacttggcgattctatatatactcttattatcaaatctagccattgtcttatagatgtgagctactgtaggtgtaccatttgattttctttctaatactatatatttctctcgaagaagttcttgcacatcatctgggaataaaatactactgttgagtaaatcagttattttttttatatcgatattgatggacatttttatagttaaggataataagtatcccaaagtcgataacgacgataacgaagtatttatacttttaggaaatcacaatgactttatcagattaaaattaacaaaattaaaggagcatgtatttttttctgaatatattgtgactccagatacatatggatctttatgcgtcgaattaaatgggtctagttttcagcacggcggtagatatatagaggtggaggaatttatagatgctggaagacaagttagatggtgttctacatccaatcatatatctaaagatatacccgaagatatgcacactgataaatttgtcatttatgatatttatacgtttgattcgttcaagaataaacgattggtattcgtacaggtacctccgtcgttaggagatgatagtcatttgactaatccgttattgtcaccgtattatcgtaattcagtagccagacaaatggtcaatgatatgatttttaatcaagattcatttttaaaatatttattagaacatctgattagaagccactatagagtttctaaacatataacaatagttagatacaaggataccgaagaattaaatctaacgagaatatgttataatagagataagtttaaggcgtttgtattcgcttggtttaacggcgtttcggaaaatgaaaaggtactagatacgtataaaaaggtatctaatttgatataatgaattcagtgactgtatcacacgcgccatatactattacttatcacgatgattgggaaccagtaatgagtcaattggtagagttttataacgaagtagccagttggctgctacgagacgagacgtcgcctattcctgataagttctttatacagttgaaacaaccgcttagaaataaacgagtatgtgtgtgtggtatagatccgtatccgaaagatggaactggtgtaccgttcgaatcaccaaattttacaaaaaaatcaattaaggagatagcttcatctatatctagattaaccggagtaattgattataaaggttataaccttaatataatagacggggttataccctggaattattacttaagttgtaaattaggagaaacaaaaagtcacgcgatttactgggataagatttccaagttactgctgcagcatataactaaacacgttagtgttctttattgtttgggtaaaacagatttctcgaatatacgggccaagttagaatccccggtaactaccatagtcggatatcatccagcggctagagaccgccaattcgagaaagatagatcatttgaaattatcaacgttttactggaattagacaacaaggcacctataaattgggctcaagggtttatttattaatgctttagtgaaattttaacttgtgttctaaatggatgcggctattagaggtaatgatgttatctttgttcttaagactataggtgtcccgtcagcgtgcagacaaaatgaagatccaagatttgtagaagcatttaaatgcgacgagttagaaagatatattgagaataatccagaatgtacactattcgaaagtcttagggatgaggaagcatactctatagtcagaattttcatggatgtagatttagacgcgtgtctagacgaaatagattatttaacggccattcaagattttattatcgaggtgtcaaactgtgtagctagattcgcgtttacagaatgcggcgccattcatgaaaatgtaataaaatccatgagatctaatttttcattgactaagtctacaaatagagataaaacaagttttcatattatctttttagatacgtataccactatggatacattgatagctatgaaacgaacactattagaattaagtagatcatctgaaaatccactaaccagatcgatagacactgccgtatataggagaaaaacaactcttcgggttgtaggtactaggaaaaatccaaattgcgacactattcatgtaatgcaaccaccgcatgataatatagaagattacctattcacttacgtggatatgaacaacaatagttattacttttctctacaacaacgattggaggatttagttcctgataagttatgggaaccagggtttatttcattcgaagacgctataaaaagagtttcaaaaatattcattaattctataataaactttaatgatctcgatgaaaataattttacaacggtaccactggtcatagattacgtaacaccttgtgcattatgtaaaaaacgatcgcataaacatccgcatcaactatcgttggaaaatggtgctattagaatttacaaaactggtaatccacatagttgtaaagttaaaattgttccgttggatggtaataaactgtttaatattgcacaaagaattttagacactaactctgttttattaaccgaacgaggagaccatatagtttggattaataattcatggaaatttaacagcgaagaacccttgataacaaaactaattttgtcaataagacatcaactacctaaggaatattcaagcgaattactctgtccaagaaaacgaaagactgtagaagctaacatacgagacatgttagtagattcagtggagaccgatacctatccggataaacttccgtttaaaaatggtgtattggacctggtagacggaatgttttactctggagatgatgctaaaaaatatacgtgtactgtatcaaccggatttaaatttgacgatacaaagttcgtcgaagacagtccagaaatggaagagttaatgaatatcattaacgatatccaaccattaacggatgaaaataagaaaaatagagagctatatgaaaaaacattatctagttgtttatgcggtgctaccaaaggatgtttaacattcttttttggagaaactgcaactggaaagtcgacaaccaaacgtttgttaaagtctgctatcggtgacctgtttgttgagacgggtcaaacaattttaacagatgtattggataaaggacctaatccatttatcgctaacatgcatttgaaaagatctgtattctgtagcgaactacctgattttgcctgtagtggatcaaagaaaattagatctgacaatattaaaaagttgacagaaccttgtgtcattggaagaccgtgtttctccaataaaattaataatagaaaccatgcgacaatcattatcgatactaattacaaacctgtttttgataggatagataacgcattaatgagaagaattgccgtcgtgcgattcagaacacacttttctcaaccttctggtagagaggctgctgaaaataatgacgcgtacgataaagtcaaactattagacgaggggttagatggtaaaatacaaaataatatatatagatttgcatttctatacttgttggtgaaatggtacaaaaaatatcatgttcctattatgaaactatatcctacacccgaagagattcctgactttgcattctatctcaaaataggtactctgttggtatctagctctgtaaagcatattccattaatgacggacctctccaaaaagggatatatattgtacgataatgtggtcactcttccgttgactactttccaacagaaaatatccaagtattttaattctagactatttggacacgatatagagagcttcatcaatagacataagaaatttgccaatgttagtgatgaatatctgcaatatatattcatagaggatatttcatctccgtaaatatatgctcatatatttatagaagatatcacatatctaaatgaataccggaatcatagatttatttgataatcatgttgatagtataccaactatattacctcatcagttagctactctagattatctagttagaactatcatagatgagaacagaagcgtgttattgttccatattatgggatcaggtaaaacaataatcgctttgttgttcgccttggtagcttccagatttaaaaaggtttacattctagtgccgaacatcaacatcttaaaaattttcaattataatatgggtgtagctatgaacttgtttaatgacgaattcatagctgagaatatctttattcattccacaacaagtttttattctcttaattataacgataacgtcattaattataacggattatctcgctacaataactctatttttatcgttgatgaggcacataatatctttgggaataatactggagaacttatgaccgtgataaaaaataaaaacaagattccttttttactattgtctggatctcccattactaacacacctaatactctgggtcatattatagatttaatgtccgaagagacgatagattttggtgaaattattagtcgtggtaagaaagtaattcagacacttcttaacgaacgcggtgtgaatgtacttaaggatttgcttaaaggaagaatatcatattacgaaatgcctgataaagatctaccaacgataagatatcacggacgtaagtttctagatactagagtagtatattgtcacatgtctaaacttcaagagagagattatatgattactagacgacagctatgttatcatgaaatgtttgataaaaatatgtataacgtgtcaatggcagtattgggacaacttaatctgatgaataatttagatactttatttcaggaacaggataaggaattgtacccaaatctgaaaataaataatggcgtgttatacggagaagaattggtaacgttaaacattagttccaaatttaaatactttattaatcggatacagacactcaacggaaaacattttatatacttttctaattctacatatggcggattggtaattaaatatatcatgctcagtaatggatattctgaatataatggttctcagggaactaatccacatatgataaacggcaaaccaaaaacatttgctatcgttactagtaaaatgaaatcgtctttagaggatctattagatgtgtataattctcctgaaaacgatgatggtagtcaattgatgtttttgttttcatcaaacattatgtccgaatcctatactctaaaagaggtaaggcatatttggtttatgactatcccagatactttttctcaatacaaccaaattcttggacgatctattagaaaattctcttacgccgatatttctgaaccagttaatgtatatcttttagccgccgtatattccgatttcaatgacgaagtgacgtcattaaacgattacacacaggatgaattaattaatgttttaccatttgacatcaaaaagctgttgtatctaaaatttaagacgaaagaaacgaatagaatatactctattcttcaagagatgtctgaaacgtattctcttccaccacatccatcaattgtaaaagttttattgggagaattggtcagacaatttttttataataattctcgtattaagtataacgataccaagttacttaaaatggttacatcagttataaaaaataaagaagacgctaggaattacatagatgatattgtaaacggtcacttctttgtatcgaataaagtatttgataaatctcttttatacaaatacgaaaacgatattattacagtaccgtttagactttcctacgaaccatttgtttggggagttaactttcgtaaagaatataacgtggtatcttctccataaaactgatgagatatataaagaaataaatgtcgagctttgttaccaatggatacctttccgttacattggaaccacacgagctgacgttagacataaaaactaatattaggaatgccgtatataagacgtatctccatagagaaattagtggtaaaatggccaagaaaatagaaattcgtgaagacgtggaattacctctcggcgaaatagttaataattctgtagttataaacgttccgtgtgtaataacctacgcgtattatcacgttggggatatagtcagaggaacattaaacatcgaagatgaatcaaatgtaactattcaatgtggagatttaatctgtaaactaagtagagattcgggtactgtatcatttagcgattcaaagtactgcttttttcgaaatggtaatgcgtatgacaatggcagcgaagtcactgccgttctaatggaggctcaacaaggtatcgaatctagttttgtttttctcgcgaatatcgtcgactcataaaaaagagaatagcggtaagtataaacacgaatactatggcaataattgcgaatgttttattctcttcgatatatttttgataatatgaaaaacatgtctctctcaaatcggacaaccatctcataaaatagttctcgcgcgctggagaggtagttgccgctcgtataatctctccagaataatatacttgcgtgtcgtcgttcaatttatacggatttctatagttctctgttatataatgcggtttgccctcatgattagacgacgacaatagtgttctaaatttagatagttgatcagaatgaatgtttattggcgttggaaaaattatccatacagcgtctgcagagtggttgatagttgttcctagatatgtaaaataatccaacttactaggcagcaaattgtctagataaaatactgaatcaaacggtgcagacgtattggcggatctaatggaatccaattgattaactatcttttgaaaatatacatttttatgatccaatacttgtaagaatatagaaataatgataagtccatcatcgtgtttttttgcctcttcataagaactatattttttcttattccaatgaacaagattaatctctccagagtatttgtacacatctatcaagtgattggatccataatcgtcttcctttccccaatatatatgtagtgatgataacacatattcattggggagaaaccctccacttatatatcctcctttaaaattaatccttactagttttccagtgttctggatagtggttggtttcgactcattataatgtatgtctaacggcttcaatcgcgcgttagaaattgcttttttagtttctatattaataggagatagttgttgcggcatagtaaaaatgaaatgataactgtttaaaaatagctcttagtatgggaattacaatggatgaggaagtgatatttgaaactcctagagaattaatatctattaaacgaataaaagatattccaagatcaaaagacacgcatgtgtttgctgcgtgtataacaagtgacggatatccgttaataggagctagaagaacttcattcgcgttccaggcgatattatctcaacaaaattcagattctatctttagagtatccactaaactattacggtttatgtactacaatgaactaagagaaatctttagacggttgagaaaaggttctatcaacaatatcgatcctcactttgaagagttaatattattgggtggtaaactagataaaaaggaatctattaaagattgtttaagaagagaattaaaagaggaaagtgatgaacgtataacagtaaaagaatttggaaatgtaattctaaaacttacaacacgggataaattatttaataaagtatatataagttattgcatggcgtgttttattaatcaatcgttggaggatttatcgcatactagtatttacaatgtagaaattagaaagattaaatcattaaatgattgtattaacgacgataaatacgaatatctgtcttatatttataatatgctagttaatagtaaatgaacttttacagatctagtataattagtcagattattaagtataatagacgactagctaagtctattatttgcgaggatgactctcaaattattacactcacggcattcgttaaccaatgcctatggtgtcataaacgagtatccgtgtccgctattttattaactactgataacaaaatattagtatgtaacagacgagatagttttctctattctgaaataattagaactagaaacatgtttagaaagaaacgattatttctgaattattccaattatttgaacaaacaggaaagaagtatactatcgtcatttttttctctagatccagctactactgataatgatagaatagacgctatttatccgggtggcatacccaaaaggggtgagaatgttccagagtgtttatccagggaaattaaagaagaagttaatatagacaattcttttgtattcatagacactcggttttttattcatggcatcatagaagataccattattaataaattttttgaggtaatcttctttgtcggaagaatatctctaacgagtgatcaaatcattgatacatttaaaagtaatcatgaaatcaaggatctaatatttttagatccgaattcaggtaatggactccaatacgaaattgcaaaatatgctctagatactgcaaaacttaaatgttacggccatagaggatgttattatgaatcattaaaaaaattaactgaggatgattgattaaaaaatataaattaatttaccatcgtgtatttttataacgggattgtccggcatatcatgtagatagttaccgtctacatcgtatactcgaccatctacgcctttaaatcctctatttattgacattaatctattagaattggaataccaaatattagtaccctcaattagtttattggtaatattttttttagacgatagatcgatggctcttgaaaccaaggttttccaaccggactcattgtcgatcggtgagaagtctttttcattagcatgaatccattctaatgatgtatgtttaaacactctaaacaattggacaaattcttttgatttgctttgaatgatttcaaataggtcttcgtctacagtaggcataccattagataatctagccattataaagtgcacgtttacatatctacgttctggaggagtaagaacgtgactattgagacgaatggctcttcctactatctgacgaagagacgcctcgttccatgtcatatctaaaatgaagatatcattaattgagaaaaaactaataccctcgcctccactagaagagaatacgcatgttttaatgcattctccgttagtgtttgattcttggttaaactcagccaccgccttgattctagtatcttttgttctagatgagaactctatattagagataccaaagactttgaaatatagtaataagatttctattcctgactgattaacaaatggttcaaagactagacatttaccatgggatgctaatattcccaaacatacatctataaatttgacgcttttctcttttaattcagtaaatagagagatatcagccgcactagcatcccctttcaatagttctccctttttaaaggtatctaatgcggatttagaaaactctctatctcttaatgaatttttaaaatcattatatagtgttgctatctcttgcgcgtattcgcccggatcacgattttgtctttcaggaaagctatcgaacgtaaacgtagtagccatacgtctcagaattctaaatgatgatatacctgtttttatttcagcgagtttagccttttgataaatttcttcttgctttttcgacatattaacgtatcgcattaatactgttttcttagcgaatgatgcagacccttctacgtcatcaaaaatagaaaactcgttattaactatatacgaacatagtcctcctagtttggagactaattctttttcatcgactagacgtttattctcaaatagcgattggtgttgtaaggatcctggtcgtagtaagttaaccaacatggtgaattcttgcacactattgacgataggtgtagccgataaacaaatcatcttatggttttttaacgcaatggtcttagataaaaaattatatactgaacgagtaggacggatcttaccatcttctttgattaatgatttagaaatgaagttatgacattcatcaataatgacgcatattctactcttggaattaatagttttgatattagtaaaaaatttatttctaaaattttgatcatcgtaattaataaaaatacaatccttcgttatctctggagcgtatctgagtatagtgttcatccaaggatcttctatcaaagcctttttcaccaataagataatagcccaattcgtataaatatccttaagatgtttgagaatatatacagtagtcattgttttaccgacacccgtttcatggaacaataaaagagaatgcatactgtctaatcctaagaaaactcttgctacaaaatgttgataatccttgaggcgtactacgtccgaccccatcatttcaacgggcatattagtagttctgcgtaaggcataatcgatataggccgcgtgtgatttactcatttatgagtgataagtaataactatgttttaaaaatcacagcagtagtttaactagtcttctctgatgtttgttttcgatactttttgaatcagaagtcatactagaataaagcaacgagtgaacgtaatagagagcttcgtatactctattcgaaaactctaagaacttattaatgaattccgtatccactggattgtttaaaatactaaattgaacactgttcacatccttccaagaagaagacttagtgacggacttaacatgagacataaataaatccaaattttttttacaaacatcactagccaccataatggcgctatctttcaaccagctatcgcttacgcattttagcagtctaacatttttaaagagactacaatatattctcatagtatcgattacacctctaccgaataaagttggaagtttaataatacaatatttttcgtttacaaaatcaaataatggtcgaaacacgtcgaaggttaacatcttataatcgctaatgtatagattgttttcagtgagatgattattagatttaatagcatctcgttcacgtttgaacagtttattgcgtgcgctgaggtcggcaactacggcgtccgctttagtactcctcccataatactttacgctattaatctttaaaatttcatagactttatctagatcgctttctggtaacatgatatcatgtgtaaaaagttttaacatgtcggtcggcattctatttagatcattaactctagaaatctgaagaaagtaattagctccgtattccagactaggtaatgggcttttacctagagacagattaagttctggcaatgtttcataaaatggaagaaggacatgcgttccctcccggatattttttacaatttcatccatttacaactctatagtttgttttcattattattagttattatctcccataatcttggtaatacttaccccttgatcgtaagataccttatacaggtcattacatacaactaccaattgtttttgtacataatagattggatggttgacatccatggtggaataaactactcgaacagatagtttatctttccccctagatacattagccgtaatagttgtcggcctaaagaatatctttggtgtaaagttaaaagttagggttcttgttccattattgctttttgtcagtagttcattataaattctcgagatgggtccgttctctgaatatagaacatcatttccaaatctaacttctagtctagaaataatatcggtcttattcttaaaatctattcccttgatgaagggatcgttaatgaacaaatccttggcctttgattcggctgatctattatctccgttatagacgttacgttgactagtccaaagacttacaggaatagatgtatcgatgatgttgatactatgtgatatgtgagcaaagattgttctcttagtggcatcactatatgttccagtaatggcggaaaactttttagaaatgttatatataaaagaattttttcgtgttccaaacattagcagattagtatgaagataaacactcatattatcaggaacattatcaatttttacatacacatcagcatcttgaatagaaacgataccatcttctggaacctctacgatctcggcagactccggataaccagtcggtgggccatcgctaacaataactagatcatccaacaatctactcacatatgcatctatataatctttttcatcttgtgagtaccctggatacgaaataaatttattatccgtatttccataataaggtttagtataaacagagagagatgttgccgcatgaacttcagttacagtcgccgttggttggtttatttgacctattactctcctaggtttctctataaacgatggtttaatttgtacattcttaaccatatatccaataaagctcaattcaggaacataaacaaattctttgttgaacgtttcaaagtcgaacgaagagtcacgaataacgatatcggatactggattgaaggttaccgttacggtaatttttgaatcggatagtttaagactgctgaatgtatcttccacatcaaacggagttttaatataaacgtatactgtagatggttctttaatagtgtcattaggagttaggccaatagaaatatcattaagttcactagaatatccagagtgtttcaaagcaattgtattattgatacaattattatataattcttcgccctcaatttcccaaataacaccgttacacgaagagatagatacgtgattaatacatttatatccaacatatggtacgtaactgaatcttcccatacctttaacttctggaagttccaaactcagaaccaaatgattaagcgcagtaatatactgatccctaatttcgaagctagcgatagcctgattgtctggaccatcgtttgtcataactccggatagagaaatatattgcggcatatacaaagttggaatttgactatcgactgcgaagacattagaccgtttaatagagtcatccccaccgatcaaagaattaatgatagtattattcattttctatttaaaatggaaaaagcttacaataaactccgtagagaaatatctataatttgtgagttttccttaaagtaacagcttccgtaaacgccgtctttatctcttagtaggtttattgtatttatgaccttttccttatcttcatagaatactaaaggcaacaaagaaatttttggttcttctctaagagctacgtgagacttaaccatagaagccaacgaatccctacatattttagaacagaaataccctacttcaccacccttgtatgtctcaatactaataggtctaaaaaccaaatcttgattacaaaaccaacacttatcaattacactatttgtcttaatagacacatctgccatagatttataatactttggtagtatacaagcgagtgcttcttctttagcgggcttaaagactgctttaggtgctgaaataaccacatctggaaggcttactcgcttagccatttaattacggaactatttttttatacttctaatgagcaagtagaaaacctctcatctacaaaaacgtactcgtgtccataatcctctaccatagttacacgttttttagatctcatatgtgctaaaaagttttcccatactaattggttactattatttttcgtataatttttaacagtttgaggttttagatttttagttacagaagtgatatcgaatattttatccaaaaagaatgaataattaattgtcttagaaggagtgttttcttggcaaaagaataccaagtgcttaaatatttctactacttcattaatcttttctgtactcagattcagtttctcatcttttacttgattgattatttcaaagactaacttataatcctttttatttattctctcgttagccttaagaaaactagatacaaaatttgcatctacatcatccgtggatatttgatttttttccatgatatccaagagttccgagataatttctccagaacattgatgagacaataatctccgcaatacatttctcaaatgaataagtttattagacacgtggaagtttgactttttttgtacctttgtacatttttgaaataccgactcgcaaaaaatacaatattcatatccttgttcagatactataccgttatgtctacaaccgctacataatcgtagattcatgttaacactctacgtatctcgtcgtccaatattttatataaaaacattttatttctagacgttgccagaaaatcctgtaatatttttagttttttgggctgtgaataaagtatcgccctaatattgttaccgtcttccgccaatatagtagttaaattatccgcacatgcagaagaacaccgcttaggcggattcagtacaatgttatatttttcgtaccaactcatttaaatatcataatctaaaatagttctgtaatatgtctagcgctaatatattgatcataatcctgtgcataaattaagatacaacaatgtctcgaaatcatcgacatggcttcttccatagttagaagatcgtcgtcaaagttagcaacgtgattcatcaacatttgctgttttgaggcagcaaatactgaaccgtcgccattcaaccattcataaaaaccatcgtctgaatccattgataatttcttgtactggtttttgagagctcgcatcaatctagcatttctagctcccggattgaaaacagaaagaggatcgtacatccagggtccattttctgtaaatagaatcgtataatgtcccttcaagaagatatcagacgatccacaatcaaagaattggtctccgagtttgtaacaaactgcggactttaacctatacatgataccgtttagcataatttctggtgatacgtcaatcggagtatcatctattagagatctaaagccggtgtaacattctccaccaaacatattcttattctgacgtcgttctacataaaacatcattgctccattaacgataacaggggaatgaacagcactacccatcacattagttcccaatggatcaatgtgtgtaactccagaacatcttccatagcctatgttaggaggagcgaacaccactcttccactattgccatcgaatgccatagaataaatatccttggaattgatagaaatcggactgtcggatgttgtgatcatcttcataggattaacaactatgtatggtgccgcctgaagtttcatatcgtaactgatgccgtttataggtctagccacagaaaccaacgtaggtctaaatccaactatagacaaaatagaagccaatatctgttcctcatctgtcataacttgagagcatccagtatgaataatcttcattagatggggatctaccgcatcatcatcgttacaataaaaaattcccattctaatgttcataattgcttttctaatcatggtatgcatgtttgctctctgaatctctgtggaaattagatctgatacacctgtaatcactatcggattatcctccgtaagacgattaaccaacaacatataattataagactttacttttctaaattcataaagttgctggattaggctataggtgtctccatgtacatacgcgttctcgagcgcaggaagtttaataccgaatagtgccatcagaataggatgaatatagtaattagtttctggttttctataaataaaagacaaatcttgtgaactagacatatcggtaaaatgcatggattggaatcgtgtagtcgacagaagaatatgatgattagatggagagtatattttatctaactctttgagttggtcaccgattctaggactagctcgagaatgaataagtactaaaggatgagtacatttcacagaaacactagcattgttcaatgtgctctttacatgggtaaggagttgaaatagctcgtttctatttgttctgacaatatttagtttattcataatgttaagcatatcctgaatagtaaagttagatgtgtcatacttgttagtagttagatatttagcaattgcattcccatcatttctcaatctcgtactccaatcatgcgtggatgctacttcgtcgatggaaaccatacaatcctttttgataggctgttgagattgatcatttcctgcacgtttaggtttggtacgttgatttctagcccctgcggatataaagtcatcgtctacaatttgggacaatgaattgcatacactacaagacaaagatttatcagaagtgtgaatatgatcttcatctaccaaagaaagagtttgattagtataactagattttagtcctgcgttagatgttaaaaaaacatcgctattgaccacggcttccattatttatattcgtagtttttactcgaaagcgtgattttaatatccaatcttattacttttggaatcgttcaaaacctttgactagttgtagaatttgatctattgccctacgcgtatactcccttgcatcatatacgttcgtcaccagatcgtttgtttcggcctgaagttggtgcatatctctttcaacattcgacatgagatccttaagggccatatcgtctagattttgttgagatgctgctcctggatttggattttgttgtgctgttgtacatactgtaccaccagtaggtgtaggagtacatacagtggccacaataggaggttgagaaagtgtaaccgttggagtagtacaagaaatacttccatccgattgttgtgtacatgtagttgttggtaacgtctgagaaggttgggtagatggcggcgtcgtcgttttttgatctttattaaatttagagataatatcctgaacagcattgctcggcgtcaacgctggaaggagtgaactcgccggcgcatcagtatcttcagacagccaatcaaaaagattagacatatcagatgatgtattagtttgttgtcgtggttttggtgtaggagcagtactactaggtagaagaataggagccgatgtagctgttggaaccggctgtggagttatatgaatagttggttgtagcggttggataggctgtctgctggcggccatcatattatctctagctagttgttctcgcaactgtctttgataatacgactcttgagactttagtcctatttcaatcgcttcatcctttttcgtatccggatccttttcttcagaataatagattgacgactttggtgtagaggattctgccagcctctgtgagaacttgttaaagaagtccatttaaggctttaaaattgaattgcgattataagattaaatggcagacacagacgatattatcgactatgaatccgatgatctcaccgaatacgaggatgatgaagaagaggaagaagatggagagtcactagaaactagtgatatagatcccaaatcttcttataagattgtagaatcagcatccactcatatagaagatgcgcattccaatcttaaacatatagggaatcatatatctgctcttaaacgacgctatactagacgtataagtctatttgaaatagcgggtataatagcagaaagctataacttgcttcaacgaggaagattacctctagtttcagaattttctgacgaaacgatgaagcaaaatatgctacatgtaattatacaagagatagaggagggttcttgtcctatagtcatcgaaaagaacggagaattgttgtcggtaaacgattttgacaaagatggtctaaaattccatctagactatattatcaaaatttggaaacttcaaaaacgatattagaatttatacgaatatcgttctctaaatgtcacaatcaagtctcgcatgttcagcaatttattgtcgtactttatatcgtgttcattaacgatatcttgcaaaatagtaatgattctatcttccttcgatagatattcttcagagattattgtcttatattctttcttgttatcagatatgaatttgataagactttgaacattattgatacccgtctgtttaattttttctacagatattttagttttggcagattctatcgtatctgtcaatagacatccaacatcgacattcgacgtcaattgtctataaatcaacgtataaattttagaaataacattagcgaattgttgtgcgttgatgtcgttattctgaaacagtatgattttaggtagcattttcttaacaaagagaacgtatttattgttactcagttgaacagatgatatatccagattactaacgcatctgattccgtataccaaactttcagaagaaatggtatacaattgtttgtattcattcaatgtctctttttcagaaattagtttagagtcgaatactgcaataattttcaagagatagttttcatcagataagattttatttagtgtagatatgataaaactattgttttgttggagaacttgatacgccgcgttctctgtagtcgacgctctcaaatgggaaacaatctccattatttttttggaatcggatactatatcttcggtatcttgacgcagtctagtatacatagagttaagagagattagagtttgtacattaagcaacatgtctctaaatgtggctacaaacttttcctttttcacatcatctagtttattatataccgatttcacaacggcaccagatttaaggaaccagaatgaaaaactctgataactacaatatttcatcatagttacgattttatcatcttctatagttggtgtaatagcgcatacctttttctccaagactggaaccaacgtcataaaaatgtttaaatcaaaatccatatcaacatctgatgcgctaagaccagtctcgcgttcaagattatctttactaatggtgacgaactcatcgtataaaactctaagtttgtccattatttatttacagatttagttgtttaatttatttgtgctcttccagagttgggatagtatttttctaacgtcggtattatattattaggatctacgttcatatgtatcataatattaatcatccacgttttgataaatctatctttagcttctgaaataacgtatttaaacaaaggagaaaaatatttagctacggcatcagacgcaataacattttttgtaaatgtaacgtatttagacgacagatcttcgttaaaaagttttccatctatgtagaatccatcggttgttaacaccattcccgcgtcagattgaataggagtttgaatagtttgttttggaaatagatccttcaataacttatagttgggtgggaaaaaatcgattttatcactagactctttcttttttactatcattacctcatgaactatttcttgaatgagtatatgtattttctttcctatatcggacgcgttcattggaaaatataccatgtcgttaactataagaatatttttatcctcgtttacaaactgaataatatcagatgtagttcgtaaacgaactatatcatcaccagcacaacatctaactatatgatatccactagtttcctttagccgtttattatcttgttccatattagcagtcattccatcatttaagaaggcgtcaaaaataatagggagaaatgacattttggattctgttacaactttaccaaaattaaggatatacggacttactatctttttctcaacgtcaatttgatgaacacacgatgaaaatgtgcttctatgagattgatcatgtagaaaacaacaagggatacaatatttccgcatatcatgaaatatattaagaaatcccaccttattatatttccccaaaggatccatgcacgtaaacattatgccgttatcattaataaagacttctttctcatcggatctgtaaaagttgttactgatttttttcattccaggatctagataattaataatgatgggttttctattcttattctttgtattttggcatatcctagaccagtaaacagtttccactttggtaaaatcagcagacttttgaacgctattaaacatggcattaatggcaataactaaaaatgtaaaatatttttctatgttaggaatatggtttttcactttaatagatatatggtttttggccaaaatgatagatatttttttatccgaggatagtaaaatattattagtcgccgtctctataaaaatgaagctagtctcgatatccaattttattctagaattgataggagtcgccaaatgtaccttatacgttatatctcccttgatgcgttccatttgtgtatctatatcggacacaagatctgtaaatagttttacgttattaatcatcacggtatcgccgtcgctagataacgctaatgtaccatccaagtcccaaatggagagatttaactgttcatcgtttagaataaaatgattaccggtcatattaataaagtgttcatcgtatctagataacaacgacttataattaatgtccaagtcttgaactcgctgaatgatcttttttaacccagttagttttagattggtacgaaatatattgttaaactttgattctacagtaatgtccaaatctagttgtggaaatacttccatcaacattgtttcaaacttgataatattattatctacatcttcgtacgatccaaattccggaatagatgtatcgcacgctctggccacccagataaccaaaaagtcacacgctccaggatatacattgtataaaaagctatcgttttttagtagggtttttttctgcgtgtatacgaagggattaaaaatagtattatcaacgtaactatattccaaattattcttatgagaatagataataatatcgtccttaatatctaacaaatttcctaaatatccctttaattgagtcattcgaagcgtcaatagaatatgtctcttaactatttccggctgttgtatatttaaatgacttcgtaaaaaataatatatgggcgacttctcatctatgtaatcatatggagtgagatatagggctcgttctacctcctgccccttacccacctgtaataccaattgcggacttactatatatcgcatatttatatcgtggggtaaagtgaaaatctactaccgatgatgtaagtcttacaatgttcgaaccagtaccagatcttaatttggaggcctccgtagaactaggggaggtaaatatagatcaaacaacacctatgataaaggagaatagcggttttatatcccgcagtagacgtctattcgcccatagatctaaggatgatgagagaaaactagcactacgattctttttacaaagactttattttttagatcatagagagattcattatttgttcagatgcgttgacgctgtaaaagacgtcactattaccaaaaaaaataacattatcgtggcgccttatatagcacttttaactatcgcatcaaaaggatgcaaacttacagaaacaatgattgaagcattctttccagaactatataatgaacatagtaagaaatttaaattcaactctcaagtatccatcatccaagaaaaactcggataccagtttggaaactatcacgtttatgattttgaaccgtattactctacagtagctctggctattcgagatgaacattcatctggcatttttaatatccgtcaagagagttatctggtaagttcattatctgaaataacatatagattttatctaattaatctaaaatctgatcttgttcaatggagtgctagtacgggcgctgtaattaatcaaatggtaaatactgtattgattacagtgtatgaaaagttacaactggtcatagaaaatgattcacaatttacatgttcattggctgtggaatcaaaacttccaataaaattacttaaagatagaaatgaattatttacaaaattcattaacgagttaaaaaagaccagttcattcaagataagcaaacgcgataaggatacgctactaaaatattttacttaggactggagttagaatttatagacgactcatttcgtttatcattgttactattattactattactatcattattagtgttggcattattagtattcttcttgtcatcttgttcagaaatatacagcaatgctatacctaatactaaatacattatcatgctcgcaatggctctaacaacaacgaaccaaaatgaatttggtcgtagcttttgttcacaaaaatacataaagaaatgtctacataaatctatggcgccattggctacttgaaatagcgccagtcctcctacagattttaatatagctgtataacatgacatttattcatcatcaaaagagacagagtcaccatctgtcatatttagattttttttcatgtgttcaaagtatcctctactcatttcattataatagtttatcatacttagaattttaggacggatcaatgagtaagacttgactagatcgtcagtagtaatttgtgcatcgtctattctgcatccgcttcgtcgaataatgtatagcatcgctttgagattctccatagctatcaagtctttatacaatgacatggaaatatctgtgaatactttatacttctccaacatcgatgccttaacatcatcgcctactttagcattgaaaatacgttctattgtgtagatggatgtagcaagatttttaaacaacaatgccatcttacacgatgattgcctcaagtctccaatcgtttgtttagaacgattagctacagagtccaatgcttggctgactagcatattattatctttagaaattgtattcttcaatgaggcgtttatcatatctgtgatttcgttagtcatattacagtctgactgggttgtaatgttatccaacatatcacctatggatacggtacacgtaccagcatttgtaataatcctatctaagatgttgtatggcattgcgcagaaaatatcttctcctgtaatatctccactctcgataaatctactcagattattcttaaatgccttattctctggagaaaagatatcagtgtccatcatttcattaatagtatacgcagaaaagataccacgagtatcaattctatccaagatacttatcggttccgagtcacagataatggtttcctctccttcgggagatcctgcatagaaatatctaggacaatagtttctatactgtctgtaactctgataatctctaaagtcactaactgataccatgaaattgagaagatcaaacgctgaagtaattaatttttctgcctcgtttttactacaactagttttcatcaatgtagtgacgatgtattgtttagttacttttggtctaatactgatgatagagatattattgcttcccataatggatcttctagtagtcaccttaaagcccattgatgcgaatagcagatagataaagtcttggtatgactcctttctaatatagtacggactacctttgtcacccaactttatacccacataagccataacaacctctttaatagccgtttcatgaggtttatcagccatgagcctgagtagttggaagaatctcatgaatcccgtctcagaaagtcctatatgcatgatagatttatctttcctgggaaactctcgtatagtcatagatgaaatactctttaaagtttctgaaataagattagtaacagtcttacctccgactactctaggtaacaaacaaactctaataggtgttttctctgcggagataatatcagaaaggatagagcaataagtagtattattgtgattataaagaccgaatacataacaggtagaatttataaacatcatgtcctgaaggtttttagacttgtattcctcgtaatccataccgtcccaaaacatggatttggtaactttgatagccgtagatctttgttccttcgccaacaggttaaagaaattaataaagaatttgttgtttctatttatgtccacaaattgcacgtttggaagcgccacggttacattcactgcagcattttgaggatcgcgagtatgaagtacgatgttattgtttactggtatatctggaaagaaatctaccagtctaggaataagagattgatatcgcatagaaatagtaaagtttataatctcatcatcgaagagcattttgttaccattgtaataaatatccactctgtcatatgtataaatgaagtactgttcaaacatgatgagatgtttatatgttggcatagtagtgagatcgacgtttggtaatggcaatgtattaagattaactccataatgtctagcagcatctgcgatgttataagcgtcgtcaaagcggggtcgatcttgtattgttatatattgtctaacacctataagattatcaaaatcttgtctgcttaatacaccgttaacaatttttgccttgaattcttttattggtgcattaataacatccttatagaggatgttaaacaaataagtgttatcaaagttaagatctggatatttcttttctgctagaacatccattgagtcggagccatctggtttaatataaccaccgataaatctagctctgtattctgtatccgtcaatctaatattaagaaggtgttgagtgaaaggtggaagatcgtaaaagctgtgagtattaatgataggattagtttccgaactaatgttaattggggtattaataatatctatatttccagcgttaagtgtaacattaaacagttttaattcacgtgacgtggtatcaattaaataattaatgcccaatttggatatagcagcctgaagctcatcttgtttagttacggatcctaatgagttattaagcaatatatcgaacggatgaacgaaggttgttttaagttggtcacatactttgtaatctagacatagatgcggaagaacggtagaaactatacgaaataaatattcagagtcctctaattgatcaagagtaactattgacttaataggcatcatttatttagtattaaatgacgaccgtaccagtgacggatatacaaaacgatttaattacagagttttcagaagataattatccatctaacaaaaattatgaaataactcttcgtcaaatgtctattctaactcacgttaacaacgtggtagatagagaacataatgccgccgtagtgtcatctccagaggaaatatcctcacaacttaatgaagatctatttccagatgatgattcaccggccactattatcgaacgagtacaacctcatactactattattgacgatactccacctcctacgtttcgtagagagttattaatatcggaacaacgtcaacaacgagaaaaaagatttaatattacagtatcgaaaaatgctgaagcaataatggaatctagatctatgataacttctatgccaacacaaacaccatccttgggagtagtttatgataaagataaaagaattcagatgttagaggatgaagtggttaatcttagaaatcaacgatctaatacaaaatcatctgataatttagataattttaccaaaatactatttggtaagactccgtacaaatcaacagaagttaataagcgtatagccatcgttaattatgcaaatttgaacgggtcccccttatcagtcgaggacttggatgtttgttcggaggatgaaatagatagaatctataaaacgattaaacaatatcacgaaagtagaaaacgaaaaattatcgtcactaacgtgattattattgtcataaacattatcgagcaggcattgctaaaactcggatttgaagaaatcaaaggactgagtaccgatatcacttcagaaattatcgatgtggagatcggagatgactgcgatgctgtagcatctaaactaggaatcggtaacagtccggttcttaatattgtattgtttatactcaagatattcgttaaacgaattaaaattatttaatttaatacattcccatatccagacaacaatcgtctggattaatctgttcctgtcgtctcataccggacgacatattaatctttttattagtgggcatctttttagatggtttctttttcccagcattaactgagtcgatacctagaagatcgtgattgatctctccgaccattccacgaacttctaattggccgtctctgacggtaccataaactattttaccagcattagtaacagcttggacaatctgaccatccatcgcattgtacgatgtagtagtaactgttgttctacgtctaggagcaccagaagtatttttggagcccttggatgttgatgtagaagaagacgaggattttgattttggtttacatgtaatacattttgaactctttgattttgtatcacatgcgccggcagtcacatctgtttgagaattaagattattgttgcctcctttgacggctgcatctccaccgatttgcgctagtagatttttaagctgtggtgtaatcttattaactgtttcgatataatcatcgtaactgcttctaacggctaaattttttttatccgccatttagaagctaaaaatatttttatttatgcagaagatttaactagattatacaatgaactaatatgatccttttccagattatttacaaacttggtattttttggttctggaggaggcgaatttaaattcggacttggattcggattttgtaagttcttgatcttattatacatcgagtataggatggcgacagtaactgctacacaaataccgatcaaaagaagaataccaatcatttattgacaataacttcactattgatcaagtatgcaatatatcatcttttcactaaataagtagtaataatgattcaacaatgtcgagatatatggacgataataatttagttcatggaaatatcgctatgattggtgtgaatgactccgctaactctgtggggtgcgcagtgctttccccacatagaataaattagcattccgactgtgataataataccaagtataaacgccataatactcaatactttccatgtacgagtgggactggtagacttactaaagtcaataaaggcgaagatacacgaaagaatcaaaagaatgattccagcgattagcacgccggaaaaataatttccaatcataagcatcatgtccatttaactaataaaaattttaaatcgccgaatgaacaaagtggaatataaaccatataaaaacaatagtttgtactgcaaaaataatatctatttttgttttcgaagatatggtaaaattaaatagtagtacacagcatgttataactaacagcagcaacggctcgtaattacttatcatttactagacgaaaaggtggtgggatattttcttgctcaaataatacgaatatatcacccatccattttatgcgatgtttatatactctaatctttaatagatctatagacgacgggtttaccaacaatatagattttatcgattcatctaatttaaacccttccttaaacgtgaatgatctattatctggcataacgatgaccctacctgatgaatcggacaatgtactgggccatgtagaataaattatcaacgaattatcgtctacgaacatttatatcatttgttttaattttaggacgcgaataaatggatataaaatagaaaataacagatattacaaccagtgttatggccgcgcccaaccaggtaggcagttttattttatcttttactacaggttctcctggatgtacgtcaccaacggcggacgtagttctagtacaattagacgtaagttccgcttgggaattttttaacgctaaagagttaacgttaatcgtgcacccaacgtatttacatctagttcgttgaacatcttgattataatataaccattttctatctctagattcgtcagtgcactcatgtaaccaacataccctaggtcctaaatatttatctccggaattagattttggataattcgcgcaccaacaatttctatttcctttatgatcgttacaaaagacgtataatgccgtatccccaaaagtaaaataatcaggacgaataattctaataaactcagaacaatatctcgcatccatatgtttggagcaaatatcggaataagtagacatagccggtttccgttttgcacgtaaccattctaaacaattggggtttccaggatcgtttctacaaaatccagtcatgaaatcgtcacaatgttctgtcttgtaattattattaaatatttttggacagtgtttggtatttgtcttagaacaacattttgccacgctatcactatcgcccaggagataatccttttttataaaatgacatcgttgcccggatgctatataatcagtagcgtgttttaaatccttaatatattcaggagttacctcgttctgataatagattaatgatccaggacgaaatttgaaagaactacatggttctccatgaattaatacatattgtttagcaaattcaggaactataaaactactacaatgatctatcgacataccatctatcaaacaaaacttgggtttaatttctcccggagatgtttcataatagtacgtataactttcttctgcaaacttaacagctctattatattcaggataattaaaacctaattccatatatttgtctcgtatatctgctattcctggtgctattttgattctattaagagtaacagctgcccccattcttaataatcgtcagtatttaaactgttaaatgttggtatatcaacatctaccttatttcccgcagtataaggtttgttgcaggtatactgttcaggaatggttacatttatacttcttctatagtcctgtctttcgatgttcatcacatatgcaaagaacagaataaacaaaataatgtaagaaataatattaaatatctgtgaattcgtaaatacattgattgccataataattacagcagctacaatacacacaatagacattcccacagtgttgccattacctccacgatacatttgagttactaagcaataggtaataactaagctagtaagaggcaatagaaaagatgagataaatatcatcaatatagagattagaggagggctatatagagccaagacgaacaaaatcaaaccgagtaacgttctaacatcattatttttgaagattcccaaataatcattcattcctccataatcgttttgcatcatacctccatctttaggcataaacgattgctgctgttcctctgtaaataaatctttatcaagcactccagcacccgcagagaagtcgtcaagcatattgtaatatcttaaataactcatttatatattaaaaaatgtcactattaaagatggagtataatctttatgccgaactaaaaaaaatgacttgtggtcaacccctaagtctttttaacgaagacggggatttcgtagaagttgaaccgggatcatcctttaagtttctgatacctaagggattttacgcctctccttccgtaaagacgagtctagtattcgagacattaacaacgaccgataataaaatcactagtatcaatccaacaaatgcgccaaagttatatcctcttcaacgcaaagtcgtatctgaagtagtttctaatatgaggaaaatgatcgaatcaaaacgtcctctatacatcactcttcacttggcgtgtggatttggtaagactattaccacgtgttatcttatggctacacacggtagaaaaaccgtcatttgcgtacccaataaaatgttaatacatcaatggaagacacaggtagaggcagtcggattggaacataagatatccatagatggagtaagtagtctattaaaggaactaaagactcaaagtccggatgtattaatagtagtcagtagacatctgacaaacgatgccttttgtaaatatatcaataagcattatgatttgttcatcttggatgaatcacatacgtataatctgatgaacaatacagcagttacaagatttttagcgtattatcctccgatgatgtgttattttttaactgctacacctagaccatctaaccgaatttattgtaacagtattattaatattgccaagttatccaatctaaaaaaaactatctatgcagtagatagtttttttgagccatattccacagataatattagacatatggtaaaacgactagatggaccatctaataaatatcatatatataccgagaagttattatctgtagacgagcctagaaatcaacttattcttgataccctggtagaagaattcaagtcaggaactattaatcgcattttagttattactaaactacgtgaacatatggtattattctacaaacgattattagattttttcggaccagaggttgtatttataggagacgcccaaaatagacgtactccagatatggtcaaatcaatcaaggaactaaatagatttatattcgtatccaccttattttattccggtactggtttagatattcctagtttggattcgttgttcatttgctcggcagtaatcaacaatatgcaaatagagcaattactagggagggtatgtcgagaaacagaactattagataggacggtatatgtatttcctaacacatccatcaaagaaataaagtacatgataggaaatttcatgcaacgaattattagtctgtctgtagataaactaggatttaaacaaaaaagttatcggaaacatcaagaatccgatcccacttctgcatgtacaacatcatccagagaagaacgtgtattaaatagaatatttaactcgcaaaatcgttaagaagtttaagcgacgatccgcatgctgcgcaggccagtgtattacccctcatagtattaatataatccaatgatacttttgtgatgtcggaaatcttaaccaatttagactgacaggcagaacacgtcatgcaatcatcatcgtcatcgataactgtagtcttgggcttctttttgcgactcttcattccggaacgcacattggtgctatccatttaggtagtaaaaaataagtcagaatatgccctataacacgatcgtgcaaaacctggtatatcgtctctatctttatcacaatatagtgtatcgacatttttattattattgacctcgtttatcttggaacatggaatgggaacatttttgttatcaacggccatctttgccttaattccagatgttgtaaaattataactaaacagtctatcatcgacacaaatgaaattcttgtttagacgtttgtagtttacgtatgcggctcgttcgcgtctcattttttcagatattgcaggtactataatattaaaaataagaatgaaataacataggattaaaaataaagttatcatgacttctagcgctgatttaactaacttaaaagaattacttagtctgtacaaaagtttgagattttcagattctgcggctatagaaaagtataattctttggtagaatggggaacatctacttactggaaaataggcgtgcaaaaggtagctaatgtcgagacgtcaatatctgattattatgatgaggtaaaaaataaaccgtttaatattgatccgggctattacattttcttaccggtatattttgggagcgtctttatttattcgaagggtaaaaatatggtagaacttggatctggaaactcttttcaaataccagatgatatgcgaagtgcgtgtaacaaagtattagacagcgataacggaatagactttctgagatttgttttgttaaacaatagatggataatggaagatgctatatcaaaatatcagtctccagttaatatatttaaactagctagtgagtacggattaaacatacccaaatatttagaaattgaaatagaggaagacacattatttgacgacgagttatactctattatagaacgctctttcgatgataaatttccaaaaatatccatatcgtatattaagttgggagaacttagacggcaagttgtagactttttcaaattctcattcatgtatattgagtccatcaaggtagatcgtataggagataatatttttattcctagcgttataacaaaatcaggaaaaaagatattagtaaaagatgtagaccatttaatacgatccaaggttagagaacatacatttgtaaaagtaaaaaagaaaaacacattttccattttatacgactatgatggaaacggaacagaaactagaggagaagtaataaaacgaattatagacactataggacgagactattatgttaacggaaagtatttctctaaggttggtagtgcaggcttaaagcaattgactaataaattagatattaatgagtgcgcaactgtcgatgagttagttgatgagattaataaatccggaactgtaaaacgaaaaataaaaaaccaatcagcatttgatttaagcagagaatgtttgggatatccagaagcggattttataacgttagttaataacatgcggttcaaaatagaaaattgtaaggttgtaaatttcaatattgaaaatactaattgtttaaataacccgagtattgaaactatatatggaaactttaaccagttcgtctcaatctttaatgtcgtcaccgatgtcaaaaaaagattattcgagtgaaataatatgcgcctttgatataggtgcaaaaaatcctgccagaactgttttagaagtcaaggataactccgttagggtattggatatatcaaaattagactggagttctgattgggaaaggcgcatagctaaagatttgtcacaatatgaatacactacagttcttctagaacgtcagcctagaaggtcgccgtatgttaaatttatctattttattaaaggctttttatatcatacatcggctgccaaagttatttgcgtctcgcctgtcatgtctggtaattcatatagagatcgaaaaaagagatcggtcgaagcatttcttgattggatggacacattcggattgcgagactccgttccggatagacgcaaattagacgatgtagcggatagtttcaatttggctatgagatacgtattagataaatggaatactaattatacaccttataataggtgtaaatctagaaattacataaaaaaaatgtaataacgttagtaacgccattatggataatctatttacctttctacatgaaatagaagatagatatgccagaactatttttaactttcatctaataagttgcgatgaaataggagatatatatggtcttatgaaagaacgcatttcctcagaggatatgtttgataatatagtgtataataaagatatacatcctgccattaagaaactagtgtattgcgacatccaacttactaaacacattattaatcagaatacgtatccggtatttaacgattcttcacaagtgaaatgttgtcattatttcgacataaactcagataatagcaatattagctctcgtacagtagagatatttgagagggaaaagtcatctcttgtatcatatattaaaactaccaataagaagagaaaggtcaattacggcgaaataaagaaaactgttcatggaggcactaatgcaaattacttttccggtaaaaagtctgacgagtatctgagtactacagttagatccaacattaatcaaccttggatcaaaaccatctctaagaggatgagagttgatatcattaatcactctatagtaacgcgtggaaaaagctctatattacaaactatagaaattatttttactaatagaacatgtgtgaaaatattcaaggattctactatgcacattattctatccaaggacaaggatgaaaaggggtgtatacacatgattgacaaattattctatgtctattataatttatttctgttgttcgaagatatcatccaaaacgagtactttaaagaagtagctaatgttgtaaaccacgtactcacggctacggcattagatgagaaattattcctaattaagaaaatggctgaacacgatgtttatggagttagcaatttcaaaatagggatgtttaacctgacatttattaagtcgttggatcataccgttttcccctctctgttagatgaggatagcaaaataaagttttttaaggggaaaaagctcaatattgtagcattacgatctctggaggattgtataaattacgtgactaaatccgagaatatgatagaaatgatgaaggaaagatcgactattttaaatagcatagatatagaaacggaatcggtagatcgtctaaaagaattgcttctaaaatgaaaaaaaacactaattcagaaatggatcaacgactagggtataagtttttggtgcctgatcctaaagccggagttttttatagaccgttacatttccaatatgtatcgtattctaattttatattgcatcgattgcatgaaatcttgaccgtcaagcggccactcttatcgtttaagaataatacagaacgaattatgatagaaattagcaatgttaaagtgactcctccagattactcacctataatcgcgagtattaaaggtaagagttatgacgcattagccacgttcactgtaaatatctttaaagaggtaatgaccaaagagggtatatccatcactaaaataagtagttatgagggaaaagattctcatttgataaaaattccgctactaataggatacgggaataaaaatccacttgatacagccaagtatcttgttcctaatgtcataggtggagtctttatcaataaacaatctgtcgaaaaagtaggaattaatctagtagaaaagattacaacatggccaaaatttagggttgttaagccaaactcattcactttctcgttttcctccgtatcccctcctaatgtattaccgacaagatatcgccattacaagatatctctggatatatcacaattggaagcgttgaatatatcatcgacaaagacatttataacggtcaatattgttttgctgtctcaatatttatctagagtgagtctagaattcattagacgtagtttatcatacgatatgcctccagaagttgtctatctagtaaacgcgataatagatagtgctaaacgaattactgaatctattactgactttaatattgatacatacattaatgacctggtggaagctgaacacattaaacaaaaatctcagttaacgatcaacgagttcaaatatgaaatgctgcataactttttacctcatatgaactatacacccgatcaactaaagggattttatatgatatctttactaagaaagtttctctactgtatcttccacacttctagatatccagatagagattcgatggtttgtcatcgcatcctaacgtacggcaaatattttgagacgttggcacatgatgaattagagaattacataggcaacatccgaaacgatatcatgaacaatcacaagaacagaggcacttacgcggtaaacattcatgtactaacaactcccggacttaatcacgcgttttctagcttattgagtggaaagttcaaaaagtcagacggtagttatcgaacacatcctcactattcatggatgcagaatatttctattcctaggagtgttggattttatccggatcaagtaaagatttcaaagatgttttctgtcagaaaataccatccaagtcaatatctttacttttgttcatcagacgttccggaaagaggtcctcaggtaggtttagtatctcaattgtctgtcttgagttccattacaaatatactaacgtctgagtatttggatttggaaaagaaaatttgtgagtatatcagatcatattataaagatgatataagttactttgaaacaggatttccaatcactatagaaaatgctctagtcgcatctcttaatccaaatatgatatgtgattttgtaactgactttagacgtagaaaacggatgggattcttcggtaacttggaggtaggtattactttagttagggatcacatgaatgaaattcgcattaatattggagcgggaagattagtcagaccattcttggttgtggataacggagagctcatgatggatgtgtgtccggagttagaaagcagattagacgacatgacattctctgacattcagaaagagtttccgcatgtcatcgaaatggtagatatagaacaatttacttttagtaacgtatgtgaatcggttcaaaaatttagaatgatgtcaaaggatgaaagaaagcaatacgatttatgtgactttcctgccgaatttagagatggatatgtagcatcttcattagtgggaatcaatcacaattctggacccagagctattcttggatgtgctcaagctaaacaagctatctcttgtctgagctcggatatacgaaataaaatagacaatggaattcatttgatgtatccagagaggccaatcgtgattagtaaggctttagaaacttcaaagattgcggctaattgcttcggccaacatgttactatagcattaatgtcgtacaaaggtatcaatcaagaggatggaattatcatcaaaaaacaatttattcagagaggcggtctcgatattgttacagccaagaaacatcaagtagaaattccattggaaaactttaataacaaagaaagagataggtctaacgcctattcaaaattagaaagtaatggattagttagactgaatgctttcttggaatccggagacgctatggcacgaaatatctcatcaagaactcttgaagatgattttgctagagataatcagattagcttcgatgtttccgagaaatataccgatatgtacaaatctcgcgttgaacgagtacaagtagaacttactgacaaagttaaggtacgagtattaaccatgaaagaaagaagacccattctaggagacaaatttaccactagaacgagtcaaaagggaacagtcgcgtatgtcgcggatgaaacggaacttccatacgacgaaaatggtatcacaccagatgtcattattaattctacatccatcttctctagaaaaactatatctatgttgatagaagttattttaacagccgcatattctgctaagccgtacaacaataagggagaaaaccgacctgtctgttttcctagtagtaacgaaacatccatcgatacatatatgcaattcgctaaacaatgttatgagcattcaaatccgaaattgtccgatgaagaattatcggataaaatcttttgtgaaaagattctctatgatcctgaaacggataagccttatgcatccaaagtattttttggaccaatttattacttgcgtctgaggcatttaactcaggacaaggcaaccgttagatgtagaggtaaaaagacgaagctcattagacaggcgaatgagggacgaaaacgtggaggaggtatcaagttcggagaaatggagagagactgtttaatagcgcatggtgcagccaatactattacagaagttttgaaagattcggaagaagattatcaagatgtgtatgtttgtgaaaattgtggagacatagcagcacaaatcaagggtattaatacatgtcttagatgttcaaaacttaatctctctcctctcttaacaaaaattgataccacgcacgtatctaaagtatttcttactcaaatgaacgccagaggcgtaaaagtcaaattagatttcgaacgaaggcctccttcgttttataaaccattagataaagttgatctcaagccgtcttttctggtgtaatattctagtttggtagtagatacatatcaatatcatcaaattcgagatccgaattataaaatgggcgtggattgttaactatagaatcggacgtctgatattcgaaaatctgtggagtttcaggttttggtggaggtgtaactgctacttgggatactgaagtctgatattcagaaagctgtggatgttctggttcggcatccaccgatggtgtcacatcactaatcggttcggtaacgtctgtggatggaggtgctacttctacagaacctgtagcctcagttgtcaacggagatacatttttaatgcgagaaaatgtataatttggtaatggtttcttatgtggatctgaagaagaggtaagatatctactagaaagataccgatcacgttctagttctcttttgtagaacttaactttttctttctccgcatctagttgatattccaacctcttcacgttactacgttcagattccaattcacgttcgcatgggttacctccgcagtttttacgagcgatttcacgttcagccttcatgcgtctctccctctctctatcgagtttatcagagcagtctttctgaaggcgatcgaactccataaatttctccaacgctttgattgtttccatagatttccgaagttcagcttttaggactgtgattctttttctttcgaattcacagctggatgtacaaccgtttccattaccgccatctctaagtttcttttctagatcggcaacatttcatccccatgccttttacattcctcgagtctactgtcgtcgaaatatcgttccagctccttttcgacatcaataactttagcacgttgtctctcaagctctcttttgtagttatctgattccctggcacgtttaagatcttcatgcaattgagtcagctcttaacttcctctcttgcttcttcgtcatagtacgcgcaatcactgtgagatccattgttaccacgtctacactcggcgagctcgcgtttaagagattcaatttcccgtttgtattggtccatgtttccattgctaccaccattagatttacaggctgctagttgtcgttcgagatcagaaatacgggttttcttggaattgatttcgtcgatgtacttggcatcgaaacacttattaagttctttttccaattctacgattttatttctttcgcgagtcaattccctcctgtagtaactatctgttttgtcagattcacgctctctacgtagactttcttgcaagttactaatttgttccctagcacgtccgagtttagttttatatgctgaatagagttctgattcatcctttgagcagatctctagcgatcgtttaagattcctaattctagtctttagcctatttacctcctcagaagatgttccgttaccgttgcgtttacactcgttaagctgtctatcaagatccatgattctatctctaagacgttgcatctctctttccatatcagcattgctttcattattacgtctgcagtcactcaactgtctttcaatatctgagattctatctctaagacgtcgcatctctctctgtttcggcattggtttcattattacgtttacagtcgttcaactgtctttcaagatctgatattctagattggagtctgctaatctctgtagcattttcacggcattcactcagttgtctttcaagatctgaaattttagattggagtctgctaatctctgtaagatttcctcctccgctctcgatgcagtcggtcaacttattctctagttctctaatacgcgaacgcagtgcatcaacttcttgcgtgtcttcctggttgcgtgtacattcatcgagatctctaacgcgtcgtcgttcttcctcaagttctctgcgtactacagaaagcgtgtccctatcttgttgatatttagcaatttctgattctagagtactgattttgcttacgtagttactaatagttgtcttggccttatcaagatcctccttgtatttgtcgcattccttgatatccctacgaagtctggacagttcccattcgacattacgacgtttatcgatttcagctcggagatcgtcatcgcgttgttttagccacatacgactgagttcaagttctcgttgacaagatccatctacttttccattcctaatagtatccagttccttttctagttctgaacgcatttctcgttccctatcaagcgattctctcaattctcggatagtcttcttatcaatttctaataaatctgaaccatcatctgtcccattttgaatatccctgtgttctttgatctcttttgtaagtcggtcgattctttcggttttataaacagaatccctttccaaagtcctaatcttactgagtttatcactaagttctgcattcaattcggtgagttttctcttggcttcttccaactctgttttaaactctccactatttccgcattcttcctcgcatttatctaaccattcaattagtttattaataactagttggtaatcagcgattcctatagccgttcttgtaattgtgggaacataattaggatcttctaatggattgtatggcttgatagcatcatctttatcattattagggggatggacaaccttaattggttggtcctcatctcctccagtagcgtgtggttcttcaataccagtgttagtaataggcttaggcaaatgcttgtcgtacgcgggcacttcctcatccatcaagtatttataatcgggttctacttcagaatattcttttctaagagacgcgacttcgggagttagtagaagaactctgtttctgtatctatcaacgctggaatcaatactcaagttaaggatagcgaatacctcatcgtcatcatccgtatcttctgaaacaccatcatatgacatttcatgaagtctaacgtattgataaatagaatcagatttagtattaaacagatccttaacctttttagtaaacgcatatgtatattttagatctccagatttcataatatgatcacatgccttaaatgtcagtgcttccatgatataatctggaacactaatgggtgacgaaaaagatacagcaccatatgctacgttgataaataaatctgaaccactaagtagataatgattaatgttaagaaagaggaaatattcagtgtataggtatgtcttggcgtcatatcttgtactaaacacgctaaacagtttgttaatgtgatcaatttccaatagattaattagagcagcgggaataccaacaaacatattaccacatccgtattttctatgaatatcacatatcatgttaaaaaatcttgatagaagagcgaatatctcgtctgacttaatgagtcgtagttcagcagcaacataagtcataactgtaaatagaacatactttcctgtagtgttgattctagactccacatcaacaccattattaaaaatagttttatatacatctttaatctgctctccgttaatcgtcgaacgttctagtatacggaaacactttgatttcttatctgtagttaatgacttagtgatatcacgaagaatattacgaattacatttcttgtttttcttgagagacctgattcagaactcaactcatcgttccatagtttttctacctcagtggcgaaatctttggagtgcttggtacatttttcaataaggttcgtgacctccatttattataaaaaatttattcaaaacttaactacaatcgggtaattataagatcgtagatctcccatgtggcggaatactaccatctatcgcatgtggatggacagtaggtaatggccatgggaacagtaatgtttgcatatttatctttcttgctagtattactgcatattgtcccaatgtttcgatgtgatgttctaacctatcaactgccgctgtatcacaacaatagtgtccgatgaaattaagattatgatccaatgtgtttaatatatgattatcaagtcttatacgatccgcgtcttttttgacaggatcaggttcttctacaggaagaagtttcggcctcttatgatattcatgtctgggaaacggtggtctagggtgaggctccggtatcggagtgggttttggattataatcatcatcgtctatgacatcatcttcgacttcgatatttattttgctatcttgatgatgtcctgtatcagttgcattttcagcactcgactgaatattagcgcattcattgtctattattaccatatttctaaacccaaaatgtatgtgttgaacatcagtactatcgttgatgagtcttatagcatgaattcgcttatcgttatcgggtttatcttctgtcaccttagcaattccttttttattaaactctacataatcatatccatttctattgtttgttctaatataaacgagtatagcatcattgctaaatttttcaatagtatcaaaaacagaatatcctaaaccatataatatatattcaggaacactcaaactaaatgtccaggattctcctaaatacgtaaactttaatagtgcgaaatcattcaaaaatctaccacttatagatagatagtacataaatgcgtatagtagtctacctatctctttattatgaaaaccggcattacgatcatatatgtcgtgatatacctgtgatccgtttacgttaaaccataaatacatgggtgatcctataaacatgaatttatttctaattctcagagctatagttaattgaccgtgtaatatttgcttacatgcatacttgatacgcttattaataagatttttatcattgctcgttatttcagaatcgtatatataaggagtaccatcgtgattcttaccagatattatacaaaatactatatataaaatatattgacccacgttagtaatcatataaatgtttaacgttttaaattttgtattcaatgatccattatcatacgctatcatggtcttgtaatattcattctttaaaatataatattgtgttagccattgcattggagctcctaatggagattttctattctcatccattttaggataggctttcataaagtccctaataacttcgtgaataatgtttctatgttttctactgatgcatgtatttgcttcgatttttttatcccatgtttcatctatcatagatttaaacgcagtaatgctcgcaacattaacatcttgaaccgttggtacaattccgttccataaatttataatgttcgccatttatataactcattttttgaatatacttttaattaacaaaagagttaagttactcatatggacgccgtccagtctgaacatcaatctttttagccagagatatcatagccgctcttagagtttcagcgtgattttccaacctaaatagaacttcatcgttgcgtttacaacacttttctatttgttcaaactttgttgttacattagtaatctttttttccaaattagttagccgttgtttgagagtttcctcattgtcgtcttcatcggctttaacaattgcttcgcgtttagcctctggctttttagcagcctttgtagaaaaaaattcagttgctggaattgcaagatcgtcatctccggggaaaagagttccgtccatttaaagtacagattttagaaactgacactctgcgttatttatatttggtacaacacatggattataaatattgatgttaataacatcagaaaatgtaaagtctatacattgttgcatcgtgttaaattttctaatggatctagtattattgggtccaacttctgcctgaaatccaaatatggaagcggatacaaaaccgtttcctggataaaccacacatctccacttttgctttacatcagaaattgtgtcgttgacatcttgaactctcctatctaatgccggtgttccacctatagattttgaatattcgaatgctgcatgagtagcattaaattccttaatattgccataattttcatatattgagtaaccctggataaaaagtaaacacaccgcagccgtcgctaccacaataaaaaaaattgatagagagttcatttataatctattagaagctgacaaaatttttttacacgcatcagacaatgctttaataaatagttcaacatctacttttgtcatatcgaaccgatggtatgattctaacctagaattacatccgaaaaagttgactatgttcatagtcattaagtcattaacaaacaacattccagactctggattataagacgatactgtttcgtcacaattacctaccttaatcatgtgattatgaatattggctattagagcaccttctaagaaatctataatatctttgaaacacgatttaaaatcaaaccacgaatatacttctacgaagaaagttagtttacccataggagaaataactataaatggagatctaaatacaaaatccggatctatgatagttttaacattattatattctctattaaatacctccacatctaaaaatgttaattttgaaactatgtcttcgtttattaccgtacctgaactaaacgctataagctctattgtttgagaactctttaaacgatattcttgaaatacatgtaacaaagtttcctttaactcggtcggtttatctaccatagttacagaatttgtatccttatctataatataataatcaaaatcgtataaagttatataattatcgcgttcagattgtgatcttttcaaatagactaaaaaccccatttctctagtaagtatcttatgtatatgtttgtaaaatatcttcatggtgggaatatgctctaccgcagttagccattcctcattgacagcggtagatgtattagacaaaactattccaatgtttaacaagggccattttacgagattattaaatccttgtttgataaatgtagccaatgagggttcgagttcaacgacgattgaattctcttcccgcggatgctgcatgatgaacgacgggatgttgttcgattgatttggaattctttttcgactttttgtttatattaaatattttaaaatttatagcggatagcaattcatgtaccacggataatgtagacgcgtattgcgcatcgatatctttattattagataaatttatcaataaatgtgagaagtttgcctcgttaaggtcttccatttaaatattatataaacatttgtgtttgtatcttattcgtcttttatggaatagttttttactagtaaagctgcaattacacactttgtccgtaaaacataaatataaacaccagcttttatcaatcgttccaaaaagtcgacggcggacatttttaacatggcatctattttaaatacacttaggtttttggaaaaaacatcattttataattgtaacgattcaataactaaagaaaagattaagattaaacataagggaatgtcatttgtattttataagccaaagcattctaccgttgttaaatacttgtctggaggaggtatatatcatgatgatttggttgtattggggaaggtaacaattaataatctaaagatgatgctattttacatggatttatcatatcatggagtgacaagtagtggagcaatttacaaattgggatcgtctatcgatagactttctctaaataggactattgttacaaaagttaataattatgatgatacattttttgacgacgatgattgatcgctattgcacaattttgtttttgtactttctaatatagtgtttaggttctttttcatatgagaatattgatttactaaaatatctatgtttaacttttgttctatgacgtccttatcggcggtatcggtacatatacgtaattcaccttcacaaaatacggagtcttcgataataatagccaatcgattattggatctagctgtctgtatcatattcaacatgtttaatatatcctttcgtttcccctttacaggcatcgatcgtagcatattttccgcgtctgatatggaaatgttaaaactacaaaaatgcgtaatgttagcccgtcctaatattggtacgtgtctataagtttggcatagtagaataatagacgtgtttaaatgccttccaaagtttaagaattctattagagtattgcattttgatagtttatcgcctacatcatcaaaaataagtaaaaagtgtgctgattttttatgattttgtgcgacagcaatacatttttctatgttacttttagttcgtatcagattatattctagagattcctgactactaacgaaattaatatgatttggccaaatgtatccatcataatctgggttataaacgggtgtaaacaagaatatatgtttatattttttaactagtgtagaaaacagagatagtaaatagatagtttttccagatccagatcctcctgttaaaaccattctaaacggcatttttaataaattttctcttgaaaattgtttttcttggaaacaattcataattatatttacagttactaaattaatttgataataaatcaaaatatggaaaactaaggttgttagtagggaggagaacaaagaaggcacatcgtgatataaataacatttattatcatgatgacaccagaaaacgacgaagagcagacatctgtgttctccgctactgtttacggagacaaaattcagggaaagaataaacgcaaacgcgtgattggtctatgtattagaatatctatggttatttcactactatctatgattaccatgtccgcgtttctcatagtgcgcctaaatcaatgcatgtctgctaacgaggctgctattactgacgccgctgttgccgttgctgctgcatcatctactcatagaaaggttgcgtctagcactacacaatatgatcacaaagaaagctgtaatggtttatattaccagggttcttgttatatattacattcagactaccagttattctcggatgctaaagcaaattgcactgcggaatcatcaacactacccaataaatccgatgtcttgactacctggctcattgattatgttgaggatacatggggatctgatggtaatccaattacaaaaactacatccgattatcaagattctgatgtatcacaagaagttagaaagtatttttgtgttaaaacaatgaactaatatttatttttgtacattaataaatgaaatcgcttaatagacaaactgtaagtaggtttaagaagttgtcggtgccggccgctataatgatgatactctcaaccattattagtggcataggaacatttctgcattacaaagaagaactgatgcctagtgcttgcgccaatggatggatacaatacgataaacattgttatttagatactaacattaaaatgtctacagataatgcggtttatcagtgtcgtaaattacgagctagattgcctagacctgatactagacatctgagagtattgtttagtattttttataaagattattgggtaagtttaaaaaagaccaatgataaatggttagatattaataatgataaagatatagatattagtaaattaacaaattttaaacaactaaacagtacgacggatgctgaagcgtgttatatatacaagtctggaaaactggttaaaacagtatgtaaaagtactcaatctgtactatgtgttaaaaaattctacaagtgacaacaaaaaatgaattaataataagtcgttaacgtacgccgccatggacgccgcgtttgttattactccaatgggtgtgttgactataacagatacattgtatgatgatctcgatatctcaatcatggactttataggaccatacattataggtaacataaaaactgtccaaatagatgtacgggatataaaatattccgacatgcaaaaatgctactttagctataagggtaaaatagttcctcaggattctaatgatttggctagattcaacatttatagcatttgtgccgcatacagatcaaaaaataccatcatcatagcatgcgactatgatatcatgttagatatagaagataaacatcagccattttatctattcccatctattgatgtttttaacgctacaatcatagaagcgtataacctgtatacagctggagattatcatctaatcatcaatccttcagataatctgaaaatgaaattgtcgtttaattcttcattctgcatatcagacggcaatggatggatcataattgatgggaaatgcaatagtaattttttatcataaaagttgtaaagtaaataataaaacaataaatattgaactagtagtacgtatattgagcaatcagaaatgatgctggtacctcttatcacggtgaccgtagttgcgggaacaatattagtatgttatatattatatatttgtaggaaaaagatacgtactgtctataatgacaataaaattatcatgacaaaattaaaaaagataaagagttctaattccagcaaatctagtaaatcaactgatagcgaatcagactgggaggatcactgtagtgctatggaacaaaacaatgacgtagataatatttctaggaatgagatattggacgatgatagcttcgctggtagtttaatatgggataacgaatccaatgttatggcgcctagcacagaacacatttacgatagtgttgctggaagcacgctgctaataaataatgatcgtaatgaacagactatttatcagaacactacagtagtaattaatgaaacggagactgttgaagtacttaatgaagataccaaacagaatcctaactattcatccaatcctttcgtaaattataataaaaccagtatttgtagcaagtcaaatccgtttattacagaacttaacaataaatttagtgagaataatccgtttagacgagcacatagcgatgattatcttaataagcaagaacaagatcatgaacacgatgatatagaatcatcggtcgtatcattggtgtgattagtttcctttttataaaattgaagtaatatttagtattattgctgccgtcacgttgtacaaatggagatattccctgtattcggcatttctaaaattagcaattttattgctaataatgactgtagatattatatagatacagaacatcaaaaaattatatctgatgagatcaatagacagatggatgaaacggtacttcttaccaacatcttaagcgtagaagttgtaaatgacaatgagatgtaccatcttattcctcatagattatcgacgattatactctgtattagttctgtcggaggatgtgttatctctatagataatgacatcaatggcaaaaatattctaacctttcccattgatcatgctgtaatcatatccccactgagtaaatgtgtcgtagttagcaagggtcctacaaccatattggttgttaaagcggatatacctagcaaacgattggtaacatcgtttacaaacgacatactatatgtaaacaatctgtcactgattaattatttgccgttgtctgtattcattattagacgagtcaccgactatttggatagacacatatgcgatcagatatttgctaataataagtggtattcccttataaccatcgacgataagcaatatcctattccatcaaactgtataggtatgtcctctgccaagtacataaattctagcatcgagcaagatactttaatccatgtttgtaacctcgagcatccgttcgactcagtatacaaaaaaatgcagtcgtacaattctctacctatcaaggaacaaatattgtacggtagaattgataatataaatatgagcattagtatttctgtggattaatagatttctagtatggggatcattaatcatctctaatctctaaatacctcataaaacgaaaaaaaagctattatcaaatactgtacggaatggattcattctcttctctttttatgaaactctgttgtatatctactgataaaactggaagcaaaaaatctgatagaaagaataagaataagatcaaggattatatggaacacgattattataaaataacaatagttcctggttcctcttccacgtctactagctcgtggtattatacacatgcctagtaatagtctctttgcgttgacggaaagcagactagaaataacaggctaaaatgttcagacaccataatagttcccaacccagataataacagagttccatcaacacattcctttaaactcaatcccaaacccaaaaccgttaaaatgtatccggccaattgatagtagataatgaggtgtacagcgcatgataatttacacagtaaccaaaatgaaaatactttagtaattataagaaatatagacggtaatgtcatcatcaacaatccgataatatgcctgagagtaaacattgacggataaaacaaaaatgctccgcataactctatcatggcaataacacaaccaaatacttgtaagattcctaaattagtagaaaatacaacgaatatcgatgtataagtgatctcgagaaataataagaataaagtaatgcccgtaaagataaacatcaacattgtttggtaatcattaaaccaattagtatgaagttgaactaatttcacagtagattttattccagtgttatcctcgcatgtataagtacctggtaagatatctttatattccataatcaatgagacatcactatctgataacgaatgaagtctagcactagtatgccatttacttaatattgtcgtcttggaagttttattataagttaaaatatcatggttatccaatttccatctaatatactttgtcggattatctatagtacacggaataatgatggtatcattacatgctgtatactctatggtctttgtagttgttataacaaccaacgtatagaggtatatcaacgatattctaactcttgacattttttatttatttaaaatgatacctttgttatttattttattctattttgctaacggtattgaatggcataagtttgaaacgagtgaagaaataatttctacttacttattagacgacgtattatacacgggtgttaatggggcggtatacacattttcaaataataaactaaacaaaactggtttaactaataataattatataacaacatctataaaagtagaggatgcggataaggatacattagtatgcggaaccaataacggaaatcccaaatgttggaaaatagacggttcagacgacccaaaacatagaggtagaggatacgctccttatcaaaatagcaaagtaacgataatcagtcacaacggatgtgtactatctgacataaacatatcaaaagaaggaattaaacgatggagaagatttgacggaccatgtggttatgatttattcacggcggataacgtaattccaaaagatggtttacgaggagcattcgtcgataaagacggtacttatgacaaagtttacattcttttcactgatactatcggctcaaagagaattgtcaaaattccgtatatagcacaaatgtgcctaaacgacgaaggtggtccatcatcattgtctagtcatagatggtcgacgtttctcaaagtcgaattagaatgtgatatcgacggaagaagttatagacaaattattcattctagaactataaaaacagataatgatacgatactatatgtattcttcgatagtccttattccaagtccgcattatgtacctattctatgaataccattaaacaatctttttctacgtcaaaattggaaggatatacaaagcaattgccgtctccagctcctggtatatgtttaccagctggaaaagttgttccacataccacgtttgaagtcatagaacaatataatgtactagatgatattataaagcctttatctaaccaacctatcttcgaaggaccgtctggtgttaaatggttcgatataaaggagaaggaaaatgaacatcgggaatatagaatatacttcataaaagaaaattctatatattcgttcgatacaaaatctaaacaaactcgtagctcgcaagtcgatgcgcgactattttcagtaatggtaactgcgaaaccgttatttatagcagatatagggataggagtaggaatgccacaaatgaaaaaaatacttaaaatgtaatcttaatcgagtacaccacacgacaatgaacaaacataagacagattatgctggttatgcttgctgcgtaatatgcggtctaattgtcggaattatttttacagcgacactattaaaagttgtagaacgtaaattagttcatacaccattaatagataaaacgataaaagatgcatatattagagaagattgtcctactgactggataagctataataataaatgtatccatttatctactgatcgaaaaacctgggaggaaggacgtaatgcatgcaaagctctaaattcaaattcggatctaattaagatagagactccaaacgagttaagttttttaagaagccttagacgaggctattgggtaggagaatccgaaatattaaaccagacaaccccatataattttatagctaagaatgccacgaagaatggaactaaaaaacggaaatatatttgtagcacaacgaatactcccaaactgcattcgtgttacactatataacaattacactacatttttatcataccactacttcggttagatgttttagaaaaaaataaatatcgccgtaccgttcttgtttttataaaaataacaattaacaattatcaaattttttctttaatattttacgtggttgaccattcttggtggtaaaataatctcttagtgttggaatggaatgctgtttaatgtttccacactcatcgtatattttgacgtatgtagtcacatcgtttacgcaatagtcagactgtagttctatcatgcttcctacatcagaaggaggaacagttttaaagtctcttggttttaatctattaccgttagttttcatgaaatcctttgttttatccacttcacattttaaataaatgtccactatacattcttttgttaattttactagatcgtcatgggtcatagaatttataggttccgtagtccatggatccaaactagcaaacttcgcgtatacggtatcgcgattagtgtatacaccaactgtatgaaaattaagaaaacagtttaataaatcaacagaaatatttaatcctccgtttgatacagatgcgccatatttatggatttcggattcacacgttgtttgtctgaggtgttcgtctagtgttgcttctacgtaaacttcgattcccatatattctttattgtcagaatcgcataccgatttatcatcatacactgtttgaaaactaaatggtatacacatcaaaataataaataataacgagtacattctgcaatattgttatcgtaattggaaaaatagtgttcgagtgagttggattatgtgagtattggattgtatattttattttatattttgtaataagaataaaatgctaatgtcaagtttattccaatagatgtcttattaaaaacatatataataaataacaatggctgaatggcataaaattatcgaggatatctcaaaaaataataagttcgaggatgccgccatcgttgattacaagactacaaagaatgttctagctgctattcctaacagaacatttgccaagattaatccgggtgaaattattcctctcatcactaatcgtaatattctaaaacctcttattggtcagaaatattgtattgtatatactaactctctaatggatgagaacacgtatgctatggagttgcttactgggtacgcccctgtatctccgatcgttatagcgagaactcataccgcacttatatttttgatgggtaagccaacaacatccagacgtgacgtgtatagaacgtgtagagatcacgctacccgtgtacgtgcaactggtaattaaaataaaaagtaatattcatatgtagtgtcaattttaaatgatgatgatgaaatggataatatccatattgacgatgtcaataatgccggtattggcatacagttcatcgatttttagatttcattcagaggatgtggaattatgttatgggcatttgtattttgataggatctataatgtagtaaatataaaatataatccgcatattccatatagatataattttattaatcgcacgttaaccgtagatgaactagacgataatgtcttttttacacatggttattttttaaaacacaaatatggttcacttaatcctagtttgattgtctcattatcaggaaacttaaaatataatgatatacaatgctcagtaaatgtatcgtgtctcattaaaaatttggcaacgagtacatctactatattaacatctaaacataagacttattctctacatcggtccacgtgtattactataataggatacgattctattatatggtataaagatataaatgacaagtataatgacatctatgattttactgcaatatgtatgctaatagcgtctacattgatagtgaccatatacgtgtttaaaaaaataaaaatgaactcttaattatgctatgctattagaaatggataaaatcaaaattacggttgattcaaaaattggtaatgttgttaccatatcgtataacttggaaaagataactattgatgtcacacctaaaaagaaaaaagaaaaggatgtattattagcgcaatcagttgctgtcgaagaggcaaaagatgtcaaggtagaagaaaaaaatattatcgatattgaagatgacgatgatatggatgtagaaagcgcgtaatacgatctataaaaataagtatataaatactttttatttactgtactcttactgtgtagtggtgataccctactcgattatttttttaaaaaaaaaatacttattctgattcttctagccatttccgtgttcgtttgaatgccacatcgacgtcaaagataggggagtagttgaaatctagttctgcattgttggtacgcacctcaaatgtagtgttggatatcttcaacgtatagttgttgagtagtgatggttttctaaatagaattctcttcatatcattcttgcacgcgtacatttttagcatccatcttggaatcctagatccttgttctattcccaatggtttcatcaatagaagattaaacatatcgtacgaacacgatggagagtaatcgtagcaaaagtaagcatttcctttaatcttagatcccggatactggatatattttgcagccaacacgtgcatccatgcagcatttcctacatatacccggctatgcaccgcgtcatcatcgactgtacgatacataatgttaccgtgttgcttacattgctcgtaaaagactttcatcaatttgtctccttctccgtaaattccagtgggtcttaggcaacaagtatacaattttgctccattcatgattacggaattattggctttcataaccagttgctcggccatacgtttactttttgcgtatacatgtcctggtgatatatcataaagggtatgctcatggccgatgaatggatcaccgtgtttattgggtcctattgcttccatgctactagtatagatcaaatacttgattcctaggtccacacaagctgccaaaatagtctgtgttccataatagtttactttcatgatttcattatcggtgtattttccaaatacatccactagagcagccgtatgaataatcagatttaccccatctagcgcttctctcaccttatcaaagtcgtttatatcacattgtatatagtttataaccttaactttcgaggttattggttgtggatcttctacaatatctatgactctgatttcttgaacatcatctgcactaattaacagttttactatatacctgcctagaaatccggcaccaccagtaaccgcgtacacggccattgctgccactcataatatcagactacttattctattttactaaataatggctgtttgtataatagaccacgataatatcagaggagttatttactttgaaccagtccatggaaaagataaagttttaggatcagttattggattaaaatccggaacgtatagtttgataattcatcgttacggagatattagtcaaggatgtgattccataggcagtccagaaatatttatcggtaacatctttgtaaacagatatggtgtagcatatgtttatttagatacagatgtaaatatatttacaattattggaaaggcgttatctatttcaaaaaatgatcagagattagcgtgtggagttattggtatttcttacataaatgaaaagataatacattttcttacaattaacgagaatggcgtttgatatatcagttaatgcgtctaaaacaataaatgcattagtttacttttctactcagcaaaataaattagtcatacgtaatgaagttaatgatacacactacactgtcgaatttgatagggacaaagtagttgacacgtttatttcatataatagacataatgacaccatagagataagaggggtgcttccagaggaaactaatattggttgcgcggttagtatgacttacttgtataataagtatagttttaaactgattttagcagaatatataagacacagaaatactatatccggcaatatttattcggcattgatgacactagatgatttggctattaaacagtatggagacattgatctattatttaatgagaaacttaaagtagactccgattcgggactatttgactttgtcaactttgtaaaggatatgatatgttgtgattctagaatagtagtagctctatctagtctagtatctaaacattgggaattgacaaataaaaaatataggtgtatggcattagccgaacatatatctgatagtattccaatatctgagctatctagactacgatacaatctatgtaagtatctacgcggacacactgagagcatagaggataaatttgattattttgaagacgatgattcgtctacatgttctgccgtaaccgacagggaaacggatgtataattttttttatagcgtgaaggatatgataaaaaatataattgttgtatttatcccattccaatcaccttatatgattctgtaacacaataaaggagtcttatagatgtatagaggtcagatactggtttgataaactgtttattccacataagtatgtttgactttatggttagacccgcatactttaacaaatcactgaaaattggagttaggtattgacctctcagaatcagttgccgttctggaacattaaatgtattttttatgatatactccaacgcatttatgtgggcatacaacaagtcattactaatggaatattccaagagttttagttgtctagtatttaacaagagaagagatttcaacagactgtttatgaactcgaatgccgcctcattgtcgcttatattgatgatgtcgaattctcccaatatcatcaccgatgagtagctcatcttgttatcgggatccaagttttctaaagatgtcattaaaccctcgatcatgaatggatttatcatcatcgtttttatgttggacatgagcttagtccgtttgtccacatctatagaagatgatttctgaattatttcatatatctctctctttaactccaggaacttgtcaggatggtctactttaatatgttctcgtctaagagatgaaaatctttggatggttgcacgcgacttttctctaaaggatgacgttgcccaagatcctctcttaaatgaatccatcttatccttggacaagatggacagtctattttccttagatggtttaatatttttgttacccatgatctataaaggtagacctaatcgtctcggatgaccatatatttattttcagttttattatacgcataaattgtaaaaaatatgttaggtttacgaaaatgtctcgtggggcattaatcgtttttgaaggattggacaaatctggaaaaacaacacaatgtatgaacatcatggaatcaataccttcaaacacaataaaataccttaactttcctcagagatccactgtcactggaaagatgatagatgactatctaactcgtaaaaaaacctataatgatcatatagttaatctattattttgtgcaaatagatgggagtttgcatcttttatacaagaacaactagaacagggaattactttaatagttgatagatacgcattttctggagtagcgtatgccgccgctaaaggcgcgtcaatgactctcagtaagagttatgaatctggattgcctaaacccgacttagttatattcttggaatctggtagcaaagaaattaatagaaacgtcggtgaggaaatttatgaagatgttacattccaacaaaaggtattacaagaatataaaaaaatgattgaagaaggagatattcattggcaaattatttcttctgaattcgaggaagatgtaaagaaggagttgattaagaatatagttatagaggctatacacacggttactggaccagtggggcaactgtggatgtaatagtgaaattacattttttataaatagatgttagtacagtgttataaatggatgaagcatattactctggcaacttggaatcagtactcggatacgtgtccgatatgcataccgaactcgcatcaatatctcaattagttattgccaagatagaaactatagataatgatatattaaacaaggacattgtaaattttatcatgtgtagatcaaacttggataatccatttatctctttcctagatactgtatatactattatagatcaagagaactatcagactgagttgattaattcattagacgacaatgaaattatcgattgtatagttaataagtttatgagcttttataaggataacctagaaaatatagtagatgctatcattactctaaaatatataatgaataatccagattttaaaactacgtatgccgaagtactcggttccagaatagccgatatagatattaaacaagtgatacgtaagaatatactacaattgtctaataatatccgcgaacgatatttgtgaaaatattaaaaaaaaatactttttttattaaatgacgtcttttcgtgaatttagaaaattatgctgtgctatatatcacgcatcaggatataaagaaaaatctaaattaattagagactttataacagatagggatgataaatatttgatcattaagctattgcttcccggattagacgatagaatttataacatgaacgataaacaaattataaaattatatagtataatatttaaacaatctcaggaagatatgctacaagatttaggatacggatatataggagacactattaggactttcttcaaagagaacacagaaatccgtccacgagataaaagcattttaactttagaagaagtggatagttttttaactacgttatcatccgtaactaaagaatcgcatcaaataaaattattgactgatgtagcatctgtttgtacatgtaatgatttaaaatgtgtagtcatgcttattgataaagatctaaaaattaaagcgggtcctcggtacgtacttaacgctattagtcctaatgcctatgatgtgtttagaaaatctaataacttgaaagagataatagaaaattcatctaaacaaaatctagactctatatctatttctgttatgactccaattaatcccatgttagcggaatcgtgtgattctgtcaataaggcgtttaaaaaatttccatcaggaatgtttgcggaagtcaaatacgatggtgaaagagtacaagttcataaaaataataacgagtttgccttctttagtagaaacatgaaaccagtactctctcataaagtggattatctcaaagaatacataccgaaagcatttaaaaaagctacgtctatcgtattggattctgaaattgttcttgtagacgaacataatgtaccgctcccgtttggaagtttaggtatacacaaaaagaaagaatataaaaactctaacatgtgtttgttcgtgtttgactgtttgtactttgatggattcgatatgacggacattccattgtacgaacgaagatcttttctcaaagatgttatggttgaaatacccaatagaatagtattctcagagttgacgaatattagtaacgagtctcagttaactgacgtattggatgatgcactaacgagaaaattagaaggattggtcttaaaagatattaatggagtatacgaaccgggaaagagaagatggttaaaaataaagcgagactatttgaacgagggttccatggcagattctgccgatttagtagtactaggtgcctactatggtaaaggagcaaagggtggtatcatggcagtctttctaatgggttgttacgacgatgaatccggtaaatggaagacggttaccaagtgttcaggacacgatgataatacgttaagggagttgcaagaccaattaaagatgattaaaattaacaaggatcccaaaaaaattccagagtggttagtagttaataaaatctatattcccgattttgtagtagaggatccgaaacaatctcagatatgggaaatttcaggagcagagtttacatcttccaagtcccataccgcaaatggaatatccattagatttcctagatttactaggataagagaggataaaacgtggaaagaatctactcatctaaacgatttagtaaacttgactaaatcttaatagttacatacaaactgaaaattaaaataacactatttagttggtggtcgccatggatggtgttattgtatactgtctaaacgcgctagtaaaacatggcgaggaaataaatcatataaaaaatgatttcatgattaaaccatgttgtgaaagagtttgtgaaaaagtcaagaacgttcacattggcggacaatctaaaaacaatacagtgattgcagatttgccatatatggataatgcggtatccgatgtatgcaattcactgtataaaaagaatgtatcaagaatatccagatttgctaatttgataaagatagatgacgatgacaagactcctactggtgtatataattattttaaacctaaagatgccattcctgttatcatatctataggaaaggataaagatgtctgtgaactattaatctcatcagacatatcgtgtgcatgcgtggagttaaattcatatcacgtagccattcttcccatggatgtttccttttttaccaaaggaaatgcatcattgattattctcctgtttgatttctctatcgatgcggcacctctcttaagaagtgtaaccgataataatgttattatatctagacaccagcgtctacatgacgagcttccgagttccaattggttcaagttttacataagtataaagtccgactattgttctatattatatatggttgttgatggatctgtgatgcatgcgatagctgataatagaactcacgcaattattagcaaaaatatattagacaatactacgattaacgatgagtgtagatgctgttattttgaaccacagattaggattcttgatagagatgagatgctcaatggatcatcgtgtgatatgaacagacattgtattatgatgaatttacctgatgtaggcgaatttggatctagtatgttggggaaatatgaacctgacatgattaagattgctctttcggtggctggtaatttaataagaaatcgagactacattcccgggagacgaggatatagctactacgtttacggtatagcctctagataatttttttaagcacgaaataaaaaacataattttaaaccaatctatttcatactattttgtgtgatcaccatggacataaagatagatattagtatttctggtgataaatttacggtgactactaggagggaaaatgaagaaagaaaaaaatatctacctctccaaaaagaaaaaactactgatgttatcaaacctgattatcttgagtacgatgacttgttagatagagatgagatgtttactattctagaggaatattttatgtacagaggtctattaggcctcagaataaaatatggacgactctttaacgaaattaaaaaattcgacaatgatgcggaagaacaattcggtactatagaagaactcaagcagaaacttagattaaattctgaagagggagcagataactttatagattatataaaggtacaaaaacaggatatcgtcaaacttactgtatacgattgcatatctatgataggattgtgtgcatgcgtggtagatgtttggagaaatgagaaactgttttctagatggaaatattgtttacgagcgattaaactgtttattgatgatcacatgcttgataagataaaatctatactgcagaatagactagtatatgtggaaatgtcatagaaagttaaaagttaatgagagcaaaaatatataaggttgtattccatatttgttatttttttctgtaatagttagaaaaatacattcgatggtctatctatcagattattatgtgttataaggtactttttctcataataaactagagtatgagtaagatagtgtttttcaaaacatataaatctaaaattgatggatgagatatacagctattaatttcgaaaatatattttaatctgataactttaaacatggatttttaatggtggtttaacgttttaaaaaaagattttgttattgtagtatatgataatattaaaagatggatataaagaatttgctgactgcatgtactattttttacattactacattggctacggcagatatacctacttcgtcactgccacacgctccggtaaacggggcatgtgacgagggagaatatcttgataagaggcataatcaatgttgtaatcagtgtccacctggagaatttgccaaggttagatgtaatggtaacgataacacaaaatgtgaacgctgcccacctcatacatataccgcaatccccaattactctaatggatgtcatcaatgtagaaaatgcccaacaggatcatttgataaggtaaagtgtaccggaacacagaacagtaaatgttcgtgtcttcctggttggtattgcgctactgattcttcacagactgaagattgtcgagattgtataccaaaaaggagatgtccatgcggatactttggtggaatagatgaacaaggaaatcctatttgtaaatcgtgttgtgttggtgaatattgcgactacctacgtaattatagacttgatccatttcctccatgcaaactatctaaatgtaattaattatgattttgatgataatgttaccatacattatatcgctacttggttagtgtattattcagtatgaagacctattaataattacttatcttttgacgatcttgttataattataatataaaaatacttatggcatagtaactcataattgctgacgcgataaattcgtaataatctgttttgttcaaatttttataaggaatctacaggcataaaaataaaaatataatttataatatactcttacagcgcgccatcatgaataacagcagtgaattgattgctgttattaatggatttagaaatagtggacgattttgtgatattaatatagttattaatgatgaaaggataaacgctcacagactcatcctatctggagcctccgaatatttttccattctgttttccaataattttatcgattctaatgaatacgaagttaatctaagtcatttagattatcaaagtgttaacgatttgatcgattacatttatgggatacctttgagcctaactaacgataacgtgaaatatattctttcaaccgctgattttttacaaattggatctgctattacggagtgtgaaaattacatacttaaaaatctttgttctagaaactgtatcgatttctacatatacgctgataaatataataacaagaaaatagaatcagcgtcgtttaacacaatattacaaaatattttgagactcatcaacgatgaaaactttaaatacttaacagaggaatcaatgataaaaattttaagcgatgatatgttaaatataaaaaatgaggatttcgccccactaattctcattaaatggttagagagtactcaacaaccatgcaccgtcgagttacttaaatgcctcagaatatcattgctttccccacaagttataaaatcactttatagtcatcgactggttagttcaatctacgaatgtataacattcttaaacaatatagcattcttggatgaatcatttcctagataccatagcatcgagttgatatctatcggtataagtaattcgcatgataagatttccataaactgctacaatcataaaaaaaatacatgggaaatgatatcttcacgtagatataggtgtagtttcgcagtggccgtcctggataatattatctatatgatgggtggatatgatcagtccccgtatagaagttcaaaggttatagcgtacaatacatgtacaaattcttggatatatgatataccagagctaaaatatcctcgttctaattgtgggggactggctgatgacgaatacatttattgtataggcggcatacgcgatcaggattcatcgttgacatctagtattgatagatggaagccatcaaaaccatattggcagaagtatgctaaaatgcgcgaaccaaaatgtgatatgggggttgcgatgttaaacggattaatatatgttataggtggaatcgttaaaggtgacacgtgtaccgacgcactagagagtttatcagaagatggatggatgaagcatcaacgtcttccaataaaaatgtccaatatgtcgacgattgttcatgatggcaagatttatatatctggaggttacaacaatagtagtgtagttaatgtaatatcgaatctagtccttagctataattcgatatatgatgaatggaccaaattatcatcattaaacattcctagaattaatcccgctctatggtcagcgcataataaattatatgtaggaggaggaatatctgatgatgttcgaactaatacatctgagacatacgacaaagaaaaagattgttggacattggataatggtcacgtgttaccacgcaattatataatgtataaatgcgaaccgattaaacataaatatccattggaaaaaacacagtacacgaatgattttctaaagtatttggaaagttttataggtagttgatagaacaaaatacataattttgtaaaaataaatcactttttatactaatatgacacgattaccaatacttttgttactaatatcattagtatacgctacaccttttcctcagacatctaaaaaaataggtgatgatgcaactctatcatgtaatcgaaataatacaaatgactacgttgttatgagtgcttggtataaggagcccaattccattattcttttagctgctaaaagcgacgtcttgtattttgataattataccaaggataaaatatcttacgactctccatacgatgatctagttacaactatcacaattaaatcattgactgctagagatgccggtacttatgtatgtgcattctttatgacatcgcctacaaatgacactgataaagtagattatgaagaatactccacagagttgattgtaaatacagatagtgaatcgactatagacataatactatctggatctacacattcaccggaaactagttctgagaaacctgattatatagataattctaattgctcgtcggtattcgaaatctaagctcttttttttttttttttttttggcatataaataagtcgacccaccatggagacagacacactcctgctatgggtactgctgctctgggttccaggttccactggtgacgaggtccaactggtggagtcagggggagggctggtccagcctggagggtccctgaggctctcctgtgcagcctctggattcactatcagcgactactggatccactgggttcgccaggccccgggcaagggcctggagtgggtcgcaggaatcaccccagccggtggttacacctactacgccgactcagtcaagggacgattcaccatctccgccgacacctccaagaacaccgcctacctgcaaatgaacagcctgagggccgaggacacggccgtgtattactgtgcaaggttcgtgttcttcctgccatatgccatggactactggggccaagggaccctggtcaccgtctcctcaggtggtggcggttcaggcggaggtggctctggcggtggcggatcggacattcagatgacccagtctccaagctccctgtccgctagcgtcggagacagggtcactatcacttgcagagcttcccaggacgtctccactgcagtggcatggtaccagcagaagccagggaaggcaccaaagctccttatttactcagcaagcttcctttactccggagtcccatcccgattcagcggcagcggcagtggcacagattttaccctcacaatttcaagcctccaaccagaggatttcgcaacctactactgtcaacaaggctacggcaacccattcaccttcgggcaagggaccaaggttgagattaagcgataattaattaatttttatcgatctaattcaacaatgtctggagagcttcgcaggatcccgactccggaaccaattactgataaagaagaagatcatacagttacagacactgtctcatacactacagtaagtacatcatctggaattgtcactactaaatcaaccaccgatgatacgtacaatgataatgatacagtaccaccaactactgtaggcggtagtacaacctctattagcaattataaaaccaaggactttgtagaaatatttggtattaccgcattaattatattgtcggccgtggcaatattctgtattacgtattatatatgtaataaacgttcacgtaaatacaaaacagagaacaaagtctagatttttgacttacataaatgtctgggatagtaaaatctatcatattgagcggaccatctggtttaggaaagacagccatagccaaaagactatgggaatatatttggatttgtggtgtcccataccactagatttcctcgtcctatggaacgagaaggtgttgattaccattacgttaacagagaggccatctggaagggaatagccgccggaaactttctagaacatactgagtttttaggaaatatttacggaacttctaaaacagctgtgaatacagcggctattaataatcgtatttgtgtgatggatctaaacatcgacggtgttagaagtcttaaaaatacgtacctaatgccttactcggtgtatataagacctacctctcttaaaatggttgagaccaagcttcgtcgtagaaacactgaagctaacgatgagattcatcgtcgtgtgatgttggcaaaaactgacatggatgaggcaggtgaagccggtctattcgacactattatcattgaagatgatgtgaatttagcatatagtaagttaattcagatactacaggaccgtattagaatgtattttaacactaattagagacttaagacttaaaacttgataattaataatataactcgtttttatatgtgtctatttcaacgtctaatgtattagttaaatattaaaacttaccacgtaaaacttaaaatttaaaatgatatttcattgacagatagatcacacattatgaactttcaaggacttgtgttaactgacaattgcaaaaatcaatgggtcgttggaccattaataggaaaaggtggattcggtagtatttatactactaatgacaataattatgtagtaaaaatagagcccaaagctaacggatcattatttaccgaacaggcattttatactagagtacttaaaccatccgttatcgaagaatggaaaaaatctcacaatataaagcacgtaggtcttatcacgtgcaaggcatttggtctatacaaatccattaatgtggaatatcgattcttggtaattaatagattaggtgcagatctagatgcggtgatcagagccaataataatagactaccaaaaaggtcggtgatgttgatcggaatcgaaatcttaaataccatacaatttatgcacgagcaaggatattctcacggagatattaaagcgagtaatatagtcttagatcaaatagataagaataaattatatctagtggattacggattggtttctaaattcatgtctaatggcgaacatgttccatttataagaaatccaaataaaatggataacggtactctagaatttacacctatagattcgcataaaggatacgttgtatctagacgtggagatctagaaacacttggatattgtatgattagatggttgggaggtatcttaccatggactaagatatctgaaacaaagaattgtgcattagtaagtgccacaaaacagaaatatgttaacaatactgcgactttgttaatgaccagtttgcaatatgcacctagagaattgctgcaatatattaccatggtaaactctttgacatattttgaggaacccaattacgacaagtttcggcacatattaatgcagggtgtatattattaagtgtggtgtttggtcgataaaaattaaaaaataacttaatttattattgatctcgtgtgtacaaccgaaatcatggcgatgttttacgcacacgctctcggtgggtacgacgagaatcttcatgcctttcctggaatatcatcgactgttgccaatgatgtcaggaaatattctgttgtgtcagtttataataacaagtatgacattgtaaaagacaaatatatgtggtgttacagtcaggtgaacaagagatatattggagcactgctgcctatgtttgagtgcaatgaatatctacaaattggaaatccgatccatgatcaagaaggaaatcaaatctctatcatcacatatcgccacaaaaactactatgctctaagcggaatcgggtacgagagtctagacttgtgtttggaaggagtagggattcatcatcacgtacttgaaacaggaaacgctgtatatggaaaagttcaacatgattattctactatcaaagagaaggccaaagaaatgagtgcacttagtccaggacctatcatcgattaccacgtctggataggagattgtatctgtcaagttactgctgtggacgtacatggaaaggaaattatgaaaatgagattcaaaaagggtgcggtgcttccgatcccaaatctggtaaaagttaaacttggggagaatgatacagaaaatctttcttctactatatcggcggcaccatcgaggtaaccacctctctggaagacagcgtgaatcatgtactcatgaaacgtttggaaactatacgccatatgtggtctgttgtatatgatcattttgatattgtgaatggtaaagaatgctgttatgtgcatacgcattcatctaatcaaaatcctataccgagtactgtaaaaacaaatttgtacatgaagactatgggatcatgcattcaaatggattccatggaagctctagagtatcttagcgaactgaaggaatcaggtggatggagtcccagaccagaaatgcaggaatttgaatatccagatggagtggaagacactgaatcaattgagagattggcagaggagttcttcaatagatcagaacttcaggctggtgaatcagtcaaatttggtaattctattaattgttaaacatacatctgtttcagctaagcaactaagaacacgtatacggcagcagcttccttctatactctcatcttttaccaacacaaagggtggatatttgttcattggagttgataataatacacacaaagtatttggattcacggtgggttacgactacctcagactgatagagaatgatatagaaaagcatatcaaaagacttcgtgttgtgcatttctgtgagaagaaagaggacatcaagtacgcgtgtcgattcatcaaggtatataaacctggggatgagactacctcgacatacgtgtgcgctatcaaagtggaaagatgctgttgtgctgtgtttgcagattggccagaatcatggtatatggatactaatggtatcaagaagtattctccagatgaatgggtgtcacatataaaattttaattaatgtaactatagagaacaaataataaggttgtaatatcatatagacaataactaacaattaattagtaactgttatctcttttttaactaaccaactaactatatacctattaatacatcgtaattatagttcttaacatctattaatcattaattcgcttctttaattttttataaactaacattgttaattgaaaagggataacatgttacagaatataaattatatatggatttttttaaaaaggaaatacttgactggagtatatatttatctcttcattatatagcacgcgtgttttccaatttttccacatcccatataatacaggattataatctcgttcgaacatacgagaaagtggataaaacaatagttgattttttatctaggttgccaaatttattccatattttagaatatggggaaaatattctacatatttattctatggatgatgctaatacgaatattataattttttttctagatagagtattaaatattaataagaacgggtcatttatacacaatctcgggttatcatcatccattaatataaaagaatatgtatatcaattagttaataatgatcatccagataataggataagactaatgcttgaaaatggacgtagaacaagacattttttgtcctatatatcagatacagttaatatctatatatgtattttaataaatcatggattttatatagatgccgaagacagttacggttgtacattattacatagatgtatatatcactataagaaatcagaatcagaatcatacaatgaattaattaagatattgttaaataatggatcagatgtagataaaaaagatacgtacggaaacacaccttttatcctattatgtaaacacgatatcaacaacgtggaattgtttgagatatgtttagagaatgctaatatagactctgtagactttaatagatatacacctcttcattatgtctcatgtcgtaataaatatgattttgtaaagttattaatttctaaaggagcaaatgttaatgcgcgtaataaattcggaactactccattttattgtggaattatacacggtatctcgcttataaaactatatttggaatcagacacagagttagaaatagataatgaacatatagttcgtcatttaataatttttgatgctgttgaatctttagattatctattatccagaggagttattgatattaactatcgtactatatacaacgaaacatctatttacgacgctgtcagttataatgcgtataatacgttggtctatctattaaacaaaaatggtgattttgagacgattactactagtggatgtacatgtatttcggaagcagtcgcaaacaacaacaaaataataatggaagtactattgtctaaacgaccatctttgaaaattatgatacagtctatgatagcaattactaaacataaacagcataatgcagatttattgaaaatgtgtataaaatatactgcgtgtatgaccgattatgatactcttatagatgtacagtcgctacagcaatataaatggtatattttaagatgtttcgatgaaatagatatcatgaagagatgttatataaaaaataaaactgtattccaattagttttttgtatcaaagacattaatactttaatgagatacggtaaacatccttctttcgtgaaatgcactagtctcgacgtatacggaagtcgtgtacgtaatatcatagcatctattagatatcgtcagagattaattagtctattatccaagaagctggatcctggagataaatggtcgtgttttcctaacgaaataaaatataaaatattggaaaactttaacgataacgaactatccacatatctaaaaatcttataaacattattaaaatataaaatctaagtaggataaaatcacactacatcattgtttccttttagtgctcgacagtgtatactatttttaacgctcataaataaaaatgaaaacgatttccgttgttacgttgttatgcgtactacctgctgttgtttattcaacatgtactgtacccactatgaataacgctaaattaacgtctaccgaaacatcgtttaatgataaccagaaagttacgtttacatgtgatcagggatatcattctttggatccaaatgctgtctgtgaaacagataaatggaaatacgaaaatccatgcaaaaaaatgtgcacagtttctgattatgtctctgaactatataataaaccgctatacgaagtgaattccaccatgacactaagttgcaacggcgaaacaaaatattttcgttgcgaagaaaaaaatggaaatacttcttggaatgatactgttacgtgtcctaatgcggaatgtcaacctcttcaattagaacacggatcgtgtcaaccagttaaagaaaaatactcatttggggaatatatgactatcaactgtgatgttggatatgaggttattggtgcttcgtacataagttgtacagctaattcttggaatgttattccatcatgtcaacaaaaatgtgatatgccgtctctatctaacggattaatttccggatctacattttctatcggtggcgttatacatcttagttgtaaaagtggttttacactaacggggtctccatcatccacatgtatcgacggtaaatggaatcccatactcccaatatgtgtacgaactaacgaaaaatttgatccagtggatgatggtcccgacgatgagacagatttgagcaaactctcgaaagacgttgtacaatatgaacaagaaatagaatcgttagaagcaacttatcatataatcatagtggcgttgacaattatgggcgtcatatttttaatctccgttatagtattagtttgttcctgtgacaaaaataatgaccaatataagttccataaattgctaccgtaaatataaatccgttaaaataattaataatttaataacaaacaagtatcaaaagattaaagacttatagctagaatcaattgagatgtcttcttcagtggatgttgatatctacgatgccgttagagcatttttactcaggcactattataacaagagatttattgtgtatggaagaagtaacgccatattacataatatatacaggctatttacaagatgcgccgttataccgttcgatgatatagtacgtactatgccaaatgaatcacgtgttaaacaatgggtgatggatacacttaatggtataatgatgaatgaacgcgatgtttctgtaagcgttggcaccggaatactattcatggaaatgtttttcgattacaataaaaatagtatcaacaatcaactaatgtatgatataattaatagcgtatctataattctagctaatgagagatatagaagcgcttttaacgacgatggtatatacatccgtagaaatatgattaacaagttgtacggatacgcatctctaactactattggcacgatcgctggaggtgtttgttattatctgttgatgcatctagttagtttgtataaataattatttcaatatactagttaaaattttaagattttaaatgtataaaaaactaataacgtttttatttgtaataggtgcattagcatcctattcgaataatgagtacactccgtttaataaactgagtgtaaaactctatatagatggagtagataatatagaaaattcatatactgatgataataatgaattggtgttaaattttaaagagtacacaatttctattattacagagtcatgcgacgtcggatttgattccatagatatagatgttataaacgactataaaattattgatatgtataccattgactcgtctactattcaacgcagaggtcacacgtgtagaatatctaccaaattatcatgccattatgataagtacccttatattcacaaatatgatggtgatgagcgacaatattctattactgcagagggaaaatgctataaaggaataaaatatgaaataagtatgatcaacgatgatactctattgagaaaacatactcttaaaattggatctacttatatatttgatcgtcatggacatagtaatacatattattcaaaatatgatttttaaaaatttaaaatatattatcacttcagtgacagtagtcaaataacaaacaacaccatgagatatattataattctcgcagttttgttcattaatagtatacatgctaaaataactagttataagtttgaatccgtcaattttgattccaaaattgaatggactggggatggtctatacaatatatcccttaaaaattatggcatcaagacgtggcaaacaatgtatacaaatgtaccagaaggaacatacgacatatccgcatttccaaagaatgatttcgtatctttctgggttaaatttgaacaaggcgattataaagtggaagagtattgtacgggactatgcgtcgaagtaaaaattggaccaccgactgtaacattgactgaatacgacgaccatatcaatttgtacatcgagcatccgtatgctactagaggtagcaaaaagattcctatttacaaacgcggtgacatgtgtgatatctacttgttgtatacggctaacttcacattcggagattctaaagaaccagtaccatatgatatcgatgactacgattgcacgtctacaggttgcagcatagactttgtcacaacagaaaaagtgtgcgtgacagcacagggagccacagaagggtttctcgaaaaaattactccatggagttcgaaagtatgtctgacacctaaaaagagtgtatatacatgcgcaattagatccaaagaagatgttcccaatttcaaggacaaaatggccagagttatcaagagaaaatttaatacacagtctcaatcttatttaactaaatttctcggtagcacatcaaatgatgttaccacttttcttagcatgcttaacttgactaaatattcataactaatttttattaatgatacaaaaacgaaataaaactgcatattatacactggttaacgcccttataggctctaaccattttcaagatgaggtccctgattatagtccttctgttcccctctatcatctactccatgtctattagacgatgtgagaagactgaagaggaaacatggggattgaaaatagggttgtgtataattgccaaagatttctatcccgaaagaactgattgcagtgttcatctcccaactgcaagtgaaggattgataactgaaggcaatggattcagggatatacgaaacaccgataaattataaaaaaagcaatgtgtccgctgtttccgttaataatactattttcgtaactggcggattattcataaataactctaatagcacgatcgtggttaacaatatggaaaaacttgacatttataaagacaaacaatggtcgattatagaaatgcctatggctagggtatatcacggcattgactcgacatttggaatgttatattttgccggaggtctatccgttaccgaacaatatggtaatttagagaaaaacaacgagatatcttgttacaatcctagaacgaataagtggtttgatatttcatatactatttataagatatccatatcatcattgtgtaaactaaataacgtcttctatgtatttagtaaggacattggatatgtggaaaagtatgatggtgcatggaagttagtacatgatcgtctccccgctataaaggcattatcaacttctccttattgattgaaaatgaaaatataaatagtttttatgtatagcagtattaccctatagttttattgcttactactaacatggatacagatgttacaaatgtagaagatatcataaatgaaatagatagagagaaagaagaaatactaaaaaatgtagaaattgaaaataataaaaacattaacaagaatcatcccaatgaatatattagagaagcactcgttattaataccagtagtaatagtgattccattgataaagaagttatagaatgtatcagtcacgatgtaggaatatagatcatatctactaatttttataatcgatacaaaacataaaaaacaactcgttattacatagcaggcatggaatccttcaagtattgttttgataacgatggcaagaaatggattatcggaaatactttatattctggtaattcaatactctataaggtcagaaaaaatttcactagttcgttctacaattacgtaatgaagatagatcacaaatcacacaagccattgttgtctgaaatacgattctatatatctgtattggatcctttgactatcgacaactggacacgggaacgtggtataaagtatttggctattccagatctgtatggaattggagaaaccgatgattatatgttcttcgttataaagaattcgggaagagtattcgccccaaaggatactgaatcagtcttcgaagcatgcgtcactatgataaacacgttagagtttatacactctcgaggatttacccatggaaaaatagaaccgaggaatatactgattagaaataaacgtctttcactaattgactattctagaactaacaaactatacaagagtggaaactcacatatagattacaacgaggacatgataacttcaggaaatatcaattatatgtgtgtagacaatcatcttggagcaacagtttcaagacgaggagatttagaaatgttgggatattgcatgatagaatggttcggtggcaaacttccatggaaaaacgaaagtagtataaaagtaataaaacaaaaaaaagaatataaaaaatttatagctactttctttgaggactgttttcctgaaggaaatgaacctctggaattagttagatatatagaattagtatacacgttagattattctcaaactcctaattatgacagactacgtaaactgtttatacaagattgaaattatattcttttttttatagagtgtggtagtgttacggatatctaatattaatattagactatctctatcgcgctacacgaccaatatcgattactatggatatcttctatgaaaggagagaatgtatttatttctccagcgtcaatctcgtcagtattgacaatactgtattatggagctaatggatccactgctgaacagctatcaaaatatgtagaaacggaggagaacacggataaggttagcgctcagaatatctcattcaaatccatgaataaagtatatgggcgatattctgccgtgtttaaagattcctttttgagaaaaattggcgataagtttcaaactgttgacttcactgattgtcgcactatagatgcaatcaacaagtgtgtagatatctttactgaggggaaaatcaatccactattggatgaaccattgtctcctagcaattagtgccgtatactttaaagcaaaatggttgacgccattcgaaaaggaatttaccagtgattatcccttttacgtatctccgacggaaatggtagacgtaagtatgatgtctatgtacggcaaggcatttaatcacgcatctgtaaaagaatcattcggcaacttttcaatcatagaactgccatatgttggagatactagtatgatggtcattcttccagacaagattgatggattagaatccatagaacaaaatctaacagatacaaattttaagaaatggtgtgactttatggatgctatgtttatagatgttcacattcccaagtttaaggtaacaggctcgtataatctggtggatactctagtaaagtcaggactgacagaggtgttcggttcaactggagattatagcaatatgtgtaatttagatgtgagtgtcgacgctatgatccacaaaacgtatatagatgtcaatgaagagtatacagaagcagctgcagcaacttctgtactagtggcagactgtgcatcaacaattacaaatgagttctgtgcagatcatccgttcatctatgtgattaggcatgttgatggaaaaattcttttcgttggtagatattgctctccgacaactaattgttaaccattttttttaaaaaaaatagaaaaaacatgtggtattagtgcaggtcgttgttcttccaattgcaattggtaagatgacggccaactttagtacccacgtcttttcaccacagcactgtggatgtgacagactgaccagtattgatgacgtcaaacaatgtttgactgaatatatttattggtcgtcctatgcataccgcaacaggcaatgcgctggacaattgtattccacactcctctcttttagagatgatgcggaattagtgttcatcgacattcgcgagctggtaaaaaatatgccgtgggatgatgtcaaagattgtacagaaatcatccgttgttatataccggatgagcaaaaaaccatcagagagatttcggccatcatcggactttgtgcatatgctgctacttactggggaggtgaagaccatcccactagtaacagtctgaacgcattgtttgtgatgcttgagatgctaaattacgtggattataacatcatattccggcgtatgaattgatgagttgtacatcttgacattttctttcttctcttctccctttcttctcttctcccttcctccctcttctccctttcccagaaacaaacttttttacccactataaaataaaatgagtatactacctattatatttcttcctatatttttttattcttcattcgttcagacttttaacgcgtctgaatgtatcgacaaagggcaatattttgcatcattcatggagttagaaaacgagccagtaatcttaccatgtcctcaaataaatacgctatcatccggatataatatattagatattttatgggaaaaacgaggagcggataatgatagaattataccgatagataatggtagcaatatgctaattctgaacccgacacaatcagactctggtatttatatatgcattaccacgaacgaaacctactgtgacatgatgtcgttaaatttgacaatcgtgtctgtctcagaatcaaatatagatcttatctcgtatccacaaatagtaaatgagagatctactggcgaaatggtatgtcccaatattaatgcatttattgctagtaacgtaaacgcagatattatatggagcggacatcgacgccttagaaataagagacttaaacaacggacacctggaattattaccatagaagatgttagaaaaaatgatgctggttattatacatgtgttttagaatatatatacggtggcaaaacatataacgtaaccagaattgtaaaattagaggtacgggatagaataataccttctactatgcaattaccagatggcattgtaacttcaataggtagtaatttgactattgcatgcagagtatcgttgagacctcccacaacggacaccgacgtcttttggataagtaatggtatgtattacgaagaagatgatggggacggaaacggtagaataagtgtagcaaataaaatctatatgaccgataagagacgtgttattacatcccggttaaacattaatcctgtcaaggaagaagatgctacaacgtttacgtgtatggcgtttactattcctagcatcagcaaaacagttactgttagtataacgtgaatgtatgttgttacatttccatgtcaattgagtttataagaatttttatacattatcttccaacaaacaattgacgaacgtattgctatgattaactcccacgatactatgcatattattaatcattaacttgcagactatacctagtgctattttgacatactcgtgttcttgtgtaattgcggtatctatattattaaagtacgtaaatctagctatagttttattatttaattttagataatataccgtctccttatttttaaaaattgccacatcctttattaaatcatgaatgggaatttctatgtcatcgttagtatattgtgaacaacaagagcagatatctataggaaagggtggaatgcgatacattgatctatgtagttttaaaacacacgcgaactttgaagaatttatataaatcattccatcgatacatccttctatgttgacatgtatatatccaggaattcttttattaatgtcaggaaatgtataaactaaaacattgcccgaaagcggtgcctctatctgcgttatatccgttcttaacttacaaaatgtaaccaatacctttgcatgacttgttttgttcggcaacgttagtttaaacttgacgaatggattaattacaatagcatgatccgcgcatctattaagtttttttactttaacgcccttgtatgtttttacagagactttatctaaatttctagtgcttgtatgtgttataaatataacgggatatagaaccgaatcacctaccttagatacccaattacattttatcagatccagataataaacaaattttgtcgccctaactaattctatattgttatatattttacaattggttatgatatcatgtaataacttggagtctaacgcgcatcgtcgtacgtttatacaattgtgatttagtgtagtatatctacacatgtatttttccgcactatagtattctggactagtgataaaactatcgttatatctgtcttcaatgaactcatcgagatattgctctctgtcatattcatacacctgcataaactttctagacatcttacaatccgtgttattttaggatcatatttacatatttacgggtatatcaaagatgttagattagttaatgggaatcgtctataataatgaatattaaacaattatatgaggacttttaccacaaagcatcataaaaatgagtcgtcgtctgatttatgttttaaatatcaaccgcaaatcaactcataaaatacaagagaatgaaatatatacatattttagtcattgcaatatagaccatacttctacagaacttgattttgtagttaaaaactatgatctaaacagacgacaacctgtaactgggtatactgcactacactgctatttgtataataattactttacaaacgatgtactgaagatattattaaatcatgacgtaaatgtaacgatgaaaaccagtagcggacgtatgcctgtttatatattgcttactagatgttgtaatatttcacatgatgtagtgatagatatgatagacaaagataaaaaccacttattacatagagactattccaacctattactagagtatataaaatctcgttacatgttattgaaggaagaggatatcgatgagaacatagtatccactttattagataagggaatcgatcctaactttaaacaagacggatatacagcgttacattattattatttgtgtctcgcacacgtttataaactaggtgagtgtagaaaaccgataacgataaaaaaggccaagcgaattatttctttgtttatacaacatggagctaatctaaacgcgttagataattgtggtaatacaccattccatttgtatcttagtattgaaatgtgtaataatattcatatgactaaaatgctgttgacttttaatccgaatttcaaaatatgtaataatcatggattaacgcctatactatgttatataacttccgactacatacaacacgatattcttgttatgttaatacatcactatgaaacaaatgttggagaaatgccgatagatgagcgtcgtatgatcgtattcgagtttatcaaaacatattctacacgtccggcagattcgataacttatttgatgaataggtttaaaaatataaatatttatacccgctatgaaggaaagacattattacacgtagcatgtgaatataataatacacaagtaatagattatcttatacgtatcaacggagatataaatgcgttaaccgacaataacaaacacgctacacaactcattatagataacaaagaaaattccccatataccattaattgtttactgtatatacttagatatattgtagataagaatgtgataagatcgttggtggatcaacttccatctctacctatcttcgatataaaatcatttgagaaattcatatcctactgtatacttttagatgacacattttacgataggcacgttaagaatcgcgattctaaaacgtatcgatacgcattttcaaaatacatgtcgtttgataaatacgatggtataataactaaatgtcacgacgaaacaatgttactcaaactgtccactgttctagacactacactatatgcagttttaagatgtcataattcgagaaagttaagaagatacctcaacgagttaaaaaaatataataacgataagtcctttaaaatatattctaatattatgaatgagagataccttaatgtatattataaagatatgtacgtgtcaaaggtatatgataaactatttcctgttttcacagataaaaattgtctactaacattactaccttcagaaattatatacgaaatattatacatgctgacaattaacgatctttataatatatcgtatccacctaccaaagtatagttgtatttttctcatgcgatgtgtgtaaaaaaactgatattatataaatattttagtgccgtataataaagatgacgatgaaaatgatggtacatatatatttcgtatcattattgttattgctattccacagttacgccatagacatcgaaaatgaaatcacagaattcttcaataaaatgagagatactctaccagctaaagactctaaatggttgaatccagcatgtatgttcggaggcacaatgaatgatatagccgctctaggagagccattcagcgcaaagtgtcctcctattgaagacagtcttttatcgcacagatataaagactatgtggttaaatgggagaggctagaaaagaatagacggcgacaggtttctaataaacgtgttaaacatggtgatttatggatagccaactatacatctaaattcagtaaccgtaggtatttgtgcaccgtaactacaaagaatggtgactgtgttcagggtatagttagatctcatattaaaaaacctccttcatgcattccaaaaacatatgaactaggtactcatgataagtatggcatagacttatactgtggaattctttacgcaaaacattataataatataacttggtataaagataataaggaaattaatatcgacgacattaagtattcacaaacgggaaaggaattaattattcataatccagagttagaagatagcggaagatacgactgttacgttcattacgacgacgttagaatcaagaatgatatcgtagtatcaagatgtaaaatacttacggttataccgtcacaagaccacaggtttaaactaatactagatccgaaaatcaacgtaacgataggagaacctgccaatataacatgcactgctgtgtcaacgtcattattgatcgacgatgtactgattgaatgggaaaatccatccggatggcttataggattcgattttgatgtatactctgttttaactagtagaggcggtatcaccgaggcgaccttgtactttgaaaatgttactgaagaatatataggtaatacatataaatgtcgtggacacaactattattttgaaaaaacccttacaactacagtagtattggagtaaatatacaatgcatttttatatacattactgaattattattactgaattattattactgaattattattaattatatcgtatttgtgctatagaatggatgaagatacgcgactatctaggtatttgtatctcaccgatagagaacatataaatgtagactctattaaacagttgtgtaaaatatcagatcctaatgcatgttatagatgtggatgtacggctttacatgagtacttttataattatagatcagtcaacggaaaatacaagtatagatacaacggttactatcaatattattcatctagcgattatgaaaattataatgaatattattatgatagaactggtatgaacagtgagagtgataatatatcaatcaaaacagaatatgaattctatgatgaaacacaagatcaaagtacacaactagtaggttacgacattaaactcaaaaccaatgaggatgattttatggctatgatagatcagtgggtgtccatgattatatagatgaatcaattaataaagtagtatatggaagagagtctcacgtaagatggcgggatatatggcaagaacataatgatggcgtatacagtataggaaaggagtgcatagataatatatacgaagacaaccataccgtagacgaattctacaagatagacagcgtatcagatgtagatgacgcggaacacatatctccgataactaaaaaaccatagaatcagttgatgataatacctacatttctaatcttccgtataccatcaaatacaaaatattcgagcaacaataagtattttttatacctttaaaactgataaataaattttttctagtgatattttggcaagatgagaatcctatttctcatcgctttcatgtatgggtgtgttcactcatatgttaacgcggttgaaaccaaatgtccaaatctagacattgtaacatcttctggagaatttcattgttcaggatgtgtggaacatatgcctgagtttagctatatgtattggttggcaaaggatatgaaatcggacgaggataccaagtttatagaacatctgggtgatggcatcaaagaagatgaaaccgttcgtaccacagatagtggaatcgtcactctacgtaaagtccttcatgtgactgatactaataaatttgataattataggttcacttgtgtcctcgctacgctagatggcatttataaaaagaatgtttgctgaagtagttgtgtgctactatttttatttatgatataatctaatggaattaatttgaattgatatttatccaatactaaagattatattagaatcaaattaatcttttatacgagaaaaaataacgacatacgtcgtcaacaaattaaactttttatttattagttaactagcttatagaacttgctcattgttatgtttctaaaacgggtacggcatataggacaattatccgacgcaccggtttctcttcgtgttctatgccatatattgatgcatgttatgcaaaatatatgagtacacgaatccaataaaccaaagtatctatcgttttgagtaaacaacttcatagcaaattccacattctttttctttacttactctatacacgtcctcgtatttatttagtattttgatgatatccaactcagaaatggttgttgtattattgggtgtatttggagtataggtattattagctatgtaccaatttaccaaccctcttaatattgattgataatcacatcggttatccaattaataactaaattgtagtgtatatatagaccatatatgtttctatttttttgacagttacgtatagtttcagtaagttttgattgttgtattcctgtatctctagataagttagtcatatagtcccttccggcgatacgttttttccaagcccgaaattgattagccaaatgtgtatttatttttgtgatattgatataatatttcggataatgcatactgttagtcttatatcatttggttcatctatgtattgtaatattgttacatgatctatagatgatgtattgattttggcaggatcgaattccatatccgcgactaaacagtgaaaaaaatgtaaatactttttaaattttaaattagtaaaacttttttttattttttatgattccaaaaatactgaatacaaagtcctaaattataaatatggagatcatactaccacaacttattattatgtatacaaggccggtgtaatagatagatatatataattctattacaccggcagacaattaccgaccggtatttgtcgttaccaacataccgtataatatgtaatatacaattccataacccattgacagttgttatacatcaaaattgcaattcttttgattacgatgttataagaatgtagttaattgatgtatgatgttaatgtgtcctctttcctcttataacatcgtaatcaaaaacttttttataatatatacctaataatgtgtcttaatagttctcgtgattcgtcaaacaatcattcttataaaatataataaagcaacgtaaaaacacataaaaataagcgtaactaataagacaatggatatttacgacgataaaggtctacagactattaaactgtttaataatgaatttgattgtataaggaatgacatcagagaattatttaaacatgtaactgattccgatagtatacaacttccgatggaagacaattctgatattatagaaaatatcagaaaaatactatatagacgattaaaaaatgtagaatgtgttgacatcgataacacaataacttttatgaaatacgatccaaatgatgataataagcgtacgtgttctaattgggtacccttaactaataactatatggaatattgtctagtaatatatttggaaacaccgatatgtggaggcaaaataaaattataccaccctacaggaaatataaagtcggataaggatattatgtttgcaaagactctagactttaaatcaacgaaagtgttaactggacgtaaaacaattgccgttctagacatatccgtttcatataatagatcaatgactactattcactacaacgacgacgttgatatagatatacatactgataaaaatggaaaagagttatgttattgttatataacaatagatgatcattacttggttgatgtggaaactataggagttatagtcaatagatctggaaaatgtctgttagtaaataaccatctaggtataggtatcgttaaagataaacgtataagcgatagttttggagatgtatgtatggatacaatatttgacttttctgaagcacgagagttattttcattaactaatgatgataacaggaatatagcatgggacactgataaactagacgatgatacagatatatggactcccgtcacagaagatgattacaaatttctttctagactagtattgtatgcaaaatctcaatcggatactgtatttgactattatgttcttactggtgatacggaaccacccactgtattcattttcaaggtaactagattttactttaatatgccgaaataaaaaatttttgtataatatctagaggtagaggtattgtttagataaatacaaataacatagatacatcgcatacttagcatttttataaatatacataagacatacactttatacatttttgtaaaaatactcataaaaaaatttataaaaattatggcacaaccatatcttgtataggtagtttagttcgtcgagtgaacctataaacagataatagacaacacataataatgcctactaatacaagcataataccgggagatgggatatatgacgttgtagtgtttgggttttctgaacgttgatagtctactaatactacatgctgacatctaatgcctgtataaccatgagagcatctacaatacataccgtcaatatctctagcgtggatacagtcaccgtgtaaacaatatccatctccctctggaccgcataatctgatagctggaatatctgttgtagcgtttgtaatttctggcaatgtcgtttcgatagcgttaccactatcggcgaatgatctgattatcatagcagcgaacaacaacatcagataatttatcaacatttttgatggattctgtgtttatgctgtttctcagtgtgtgtttatgacaagattgggaattttatattattaattcagtaatataaactaataatatattgttaattgtgtaaataatataaaaataacaatacaatattgaatgtgttgctgttaaaaatgtatgtgttaatataatagaataaaataaatgagtatgatcattttagataacgattgattttatcattaccgcttcattcttatattctttgcttacggaacctatatttagaaacatctactaacaattttttatgcttgcattattaatggtatgtaatatgattgattgtgtacgcaataccaatttgttaagtatgaatacggggtacaaacataaattgaaatttaacattatttatttatgatatatatcgttatcgttaggtctataccatggatatctttaaagaactaatcttaaaacaccctgatgaaaatgttttgatttctccagtttccattttatctactttatctattctaaatcatggagcagctggttctacagctgaacaactatcaaaatatatagagaatatgaatgagaatacacccgatgacaataatgatgacatggaggtagatattccgtattgtgcgacactagctaccgcaaataaaatatacggtagcgatagtatcgagttccacgcctccttcctacaaaaaataaaagacgattttcaaactgtaaactttaataatgctaaccaaacaaaggaactaatcaacgaatgggttaagacaatgacaaatggtaaaattaattccttattgactagtccgctatccattaatactcgtatgacagttgttagcgccgtccattttaaagcaatgtggaaatatccattttctaaacatcttacatatacagacaagttttatatttctaagaatatagttaccagcgttgatatgatggtgggtaccgagaataacttgcaatatgtacatattaatgaattattcggaggattctctattatcgatattccatacgagggaaactctagtatggtaattatactaccggacgacatagaaggtatatataacatagaaaaaaatataacagatgaaaaatttaaaaaatggtgtggtatgttatctactaaaagtatagacttgtatatgccaaagtttaaagtggaaatgacagaaccgtataatctggtaccgattttagaaaatttaggacttactaatatattcggatattatgcagattttagcaagatgtgtaatgaaactatcactgtagaaaaatttctacatacgacgtttatagatgttaatgaggagtatacagaagcatcggccgttacaggagtatttacgattaacttttcgatggtatatcgtacgaaggtctacataaaccatccattcatgtacatgattaaagacaccacaggacgtatactttttatagggaaatactgctatccgcaataaatataaacaaatagacttttataaagagtcttcaacgataagtatatcgacatactacttatgctgcgaaagattctgaacgagaacgactatctcaccctcttggatcatatccgcactgctaaatactaaatctccactacactttttatcatcttatgaggaatgattgccttcgtgaaataggaataattagcaccagaatagctatggattattgtggtagagagtgcactattctatgtcgtctactggatgaagatgtgacgtacaaaaaaataaaactagaaattgaaacgtgtcacaacttatcaaaacatatagatagacgaggaaacaatgcgctacattgttacgtctccaataaatgcgatacagacattaagattgttctctcgcggagtcgagagactttgtagaaacaacgaaggattaactccgctaggagtatacagtaagcatagatacgtaaaatctcagattgtgcatctactgatatccagctattcaaattcctctaacgaactcaagtcgaatataaatgatttcgatctgtattcggataatatcgacttacgtctgctaaaatacctaattgtggataaacggatacgtccgtccaagaatacgaattatgcaatcaatggtctcggattggtggatatatacgtaacgacgcctaatccgagaccagaagtattgctatggcttcttaaatcagaatgttacagcaccggttacgtatttcgtacctgtatgtacgacagtgatatgtgtaagaactctcttcattactatatatcgtctcatagagaatctcaatctctatccaaggatgtaattaaatgtttgatcgataacaatgtttccatccatggcagagacgaaggaggatctttacccatccaatactactggtctttctcaaccatagatatagagattgttaaattattattaataaaggatgtggacacgtgtagagtatacgacgtcagccctatattagaggcgtattatctaaacaagcgatttagagtaaccccatataatgtagacatggaaatcgttaatcttcttattgagagacgtcatactcttgtcgacgtaatgcgtagtattacttcgtacgattccagagaatataaccactacatcatcgataacattctaaagagatttagacaacaggatgaatccatcgtacaagccatactgataaactacttacattacggcgatatggtcgttcgatgcatgttagataacggacaacaactatcctctacacgactactttgttaataataatctcgtcgatgtaaacgtcgtaaggtttatcgtggaaaatatggacacgcggctgtaaatcacgtatcgaacaatggccgtctatgtatgtacggtctgatattatcgagatttaataattgcgggtatcactgttatgaaaccatactgatagatgtatttgatatactaagcaagtacatggatgatatagatatgatcgataactctactatattacgcggtcgatgtcaataatatacaatttgcaaagcggttattggaatatggagcgagtatcacgctcgataatcaatacggccatccagaaaagcagttacagaagagaaaacaaaacgaaatcgttgttctacaagatgtctctccctacgacgattactacgtaaaaaagatactagcctactgcctattaagggacgagtcattcgcggaactacatagtaaattctgtttaaacgaggactataaaagtgtatttatgaaaaatatatcattcgataagatagattccatcatcgtgacataagtcgcctcaaagagattcgaatctccgacaccgacctgtatacggtatcacagctatcttaaagccatacattcagacagtcacatttcatttcccatgtacgacgatctcatagaacagtgccatctatcgatggagcgtaaaagtaaactcgtcgacaaagcactcaataaattagagtctaccatcggtcaatctagactatcgtatttgcctccggaaattatgcgcaatatcatctaaacagtatgttgtacggaaagaaccattacaaatattatccatgatagaaagaaaatatctatatgattggagaagtaggaaacaggaacaagacaacgattactacattattaaatcatgaagtccgtattatactcgtatatattgtttctctcatgtataataataaacggaagagatatagcaccgcatgcaccatccgatggaaagtgtaaagacaacgaatacaaacgccataatttgtgtccgggaacatacgcttccagattatgcgatagcaagactaacacacgatgtacgccgtgtggttcgggtaccttcacatctcgcaataatcatttacccgcttgtctaagttgtaacggaagacgcgatcgtgtaacacgactcacaatagaatctgtgaatgctctcccggatattattgtcttctcaaaggatcatccggatgcaaggcatgtgtttcccaaacaaaatgtggaataggatacggagtatccggagacgtcatctgttctccgtgtggtctcggaacatattctcacaccgtctcttccgcagataaatgcgaacccgtacccagaaatacgtttaactatatcgatgtggaaattaacctgtatccagttaacgacacgtcgtgtactcggacgaccactaccggtctcagcgaatccatctcaacgtcggaactaactattactatgaatcataaagactgtaatcccgtatttcgtgatggatacttctccgttcttaataaggtagcgacttcaggtttctttacaggagaaaggtgtgcactctgaatttcgagattaaatgcaataacaaagattcttcctccaaacagttaacgaaagcaaagaatgatactatcatgccgcattcggagacagtaactctagtgggcgacatctatatactatatagtaataccaatactcaagactacgaaactgatacaatctcttatcatgtgggtaatgttctcgatgtcgatagccatatgcccggtagttgcgatatacataaactgatcactaattccaaacccacccactttttatagtaagtttttcacccataaataataaatacaataattaatttctcgtaaaagtagaaaatatattctaatttattgcacggtaaggaagtagaatcataaagaacagtactcaatcaatagcaattatgaaacaatatatcgtcctggcatgcatgtgcctggcggcagctgctatgcctgccagtcttcagcaatcatcctcatcctcctcctcgtgtacggaagaagaaaacaaacatcatatgggaatcgatgttattatcaaagtcacaaagcaagaccaaacaccgaccaatgataagatttgccaatccgtaacggaaattacagagtccgagtcagatccagatcccgaggtggaatcagaagatgattccacatcagtcgaggatgtagatcctcctaccacttattactccatcatcggtggaggtctgagaatgaactttggattcaccaaatgtcctcagattaaatccatctcagaatccgctgatggaaacacagtgaatgctagattgtccagcgtgtccccaggacaaggtaaggactctcccgcgatcactcatgaagaagctcttgctatgatcaaagactgtgaagtgtctatcgacatcagatgtagcgaagaagagaaagacagcgacatcaagacccatccagtactcgggtctaacatctctcataagaaagtgagttacgaagatatcatcggttcaacgatcgtcgatacaaaatgcgtcaagaatctagagtttagcgttcgtatcggagacatgtgcaaggaatcatctgaacttgaggtcaaggatggattcaagtatgtcgacggatcggcatctgaaggtgcaaccgatgatacttcactcatcgattcaacaaaactcaaagcgtgtgtctgaatcgataactctattcatctgaaattggatgagtagggttaatcgaacgattcaggcacaccacgaattaaaaaagtgtaccggacactatattccggtttgcaaaacaaaaatgttcttaactacattcacaaaaagttacctctcgcgacttcttctttttctgtctcaatagtgtgatacgattatgacactattcctattcctattcctatttcctttcagagtatcacaaaaatattaaacctctttctgatggtctcataaaaaaagttttacaaaaatatttttattctctttctctctttgatggtctcataaaaaaagttttacaaaaatatttttattctctttctctctttgatggtctcataaaaaaagttttacaaaaatatttttattctctttctctctttgatggtctcataaaaaaagttttacaaaaatatttttattctctttctctctttgatggtctcataaaaaaagttttacaaaaatatttttattctctttctctctttgatggtctcataaaaaaagttttacaaaaatatttttattctctttctctctttgatggtctcataaaaaaagttttacaaaaatatttttattctctttctctctttgatggtctcataaaaaaagttttacaaaaatatttttattctctttctctctttgatggtctcataaaaaaagttttacaaaaatatttttattctctttctctctttgatggtctcataaaaaaagttttacaaaaatatttttattctctttctctctttgatggtctcataaaaaaagttttacaaaaatatttttattctctttctctctttgatggtctcataaaaaaagttttacaaaaatatttttattctctttctctctttgatggtctcataaaaaagttttacaaaaatatttttattctctttctctctttgatggtctcataaaaaagttttacaaaaatatttttattctctttctctctttgatggtctcataaaaaaagttttacaaaaatatttttattctctttctctctttgatggtctcataa

SEQ ID NO: 190 - DNA, 201446 bp, Artificial Sequence
  GLV-1h188
ttatgagaccatcaaagagagaaagagaataaaaatatttttgtaaaactttttttatgagaccatcaaagagagaaagagaataaaaatatttttgtaaaacttttttatgagaccatcaaagagagaaagagaataaaaatatttttgtaaaacttttttatgagaccatcaaagagagaaagagaataaaaatatttttgtaaaactttttttatgagaccatcaaagagagaaagagaataaaaatatttttgtaaaactttttttatgagaccatcaaagagagaaagagaataaaaatatttttgtaaaactttttttatgagaccatcaaagagagaaagagaataaaaatatttttgtaaaactttttttatgagaccatcaaagagagaaagagaataaaaatatttttgtaaaactttttttatgagaccatcaaagagagaaagagaataaaaatatttttgtaaaactttttttatgagaccatcaaagagagaaagagaataaaaatatttttgtaaaactttttttatgagaccatcaaagagagaaagagaataaaaatatttttgtaaaactttttttatgagaccatcaaagagagaaagagaataaaaatatttttgtaaaactttttttatgagaccatcaaagagagaaagagaataaaaatatttttgtaaaactttttttatgagaccatcaaagagagaaagagaataaaaatatttttgtaaaactttttttatgagaccatcaaagagagaaagagaataaaaatatttttgtaaaactttttttatgagaccatcagaaagaggtttaatatttttgtgatactctgaaaggaaataggaataggaataggaatagtgtcataatcgtatcacactattgagacagaaaaagaagaagtcgcgagaggtaactttttgtgaatgtagttaagaacatttttgttttgcaaaccggaatatagtgtccggtacacttttttaattcgtggtgtgcctgaatcgttcgattaaccctactcatccaatttcagatgaatagagttatcgattcagacacacgctttgagttttgttgaatcgatgagtgaagtatcatcggttgcaccttcagatgccgatccgtcgacatacttgaatccatccttgacctcaagttcagatgattccttgcacatgtctccgatacgaacgctaaactctagattcttgacgcattttgtatcgacgatcgttgaaccgatgatatcttcgtaactcactttcttatgagagatgttagacccgagtactggatgggtcttgatgtcgctgtctttctcttcttcgctacatctgatgtcgatagacacttcacagtctttgatcatagcaagagcttcttcatgagtgatcgcgggagagtccttaccttgtcctggggacacgctggacaatctagcattcactgtgtttccatcagcggattctgagatggatttaatctgaggacatttggtgaatccaaagttcattctcagacctccaccgatgatggagtaataagtggtaggaggatctacatcctcgactgatgtggaatcatcttctgattccacctcgggatctggatctgactcggactctgtaatttccgttacggattggcaaatcttatcattggtcggtgtttggtcttgctttgtgactttgataataacatcgattcccatatgatgtttgttttcttcttccgtacacgaggaggaggatgaggatgattgctgaagactggcaggcatagcagctgccgccaggcacatgcatgccaggacgatatattgtttcataattgctattgattgagtactgttctttatgattctacttccttaccgtgcaataaattagaatatattttctacttttacgagaaattaattattgtatttattatttatgggtgaaaaacttactataaaaagtgggtgggtttggaattagtgatcagtttatgtatatcgcaactaccgggcatatggctatcgacatcgagaacattacccacatgataagagattgtatcagtttcgtagtcttgagtattggtattactatatagtatatagatgtcgcccactagagttactgtctccgaatgcggcatgatagtatcattctttgctttcgttaactgtttggaggaagaatctttgttattgcatttaatctcgaaattcagagtgcacacctttctcctgtaaagaaacctgaagtcgctaccttattaagaacggagaagtatccatcacgaaatacgggattacagtctttatgattcatagtaatagttagttccgacgttgagatggattcgctgagaccggtagtggtcgtccgagtacacgacgtgtcgttaactggatacaggttaatttccacatcgatatagttaaacgtatttctgggtacgggttcgcatttatctgcggaagagacggtgtgagaatatgttccgagaccacacggagaacagatgacgtctccggatactccgtatcctattccacattttgtttgggaaacacatgccttgcatccggatgatcctttgagaagacaataatatccgggagagcattcacagattctattgtgagtcgtgttacacgatcgcgtcttccgttacaacttagacaagcgggtaaatgattattgcgagatgtgaaggtacccgaaccacacggcgtacatcgtgtgttagtcttgctatcgcataatctggaagcgtatgttcccggacacaaattatggcgtttgtattcgttgtctttacactttccatcggatggtgcatgcggtgctatatctcttccgtttattattatacatgagagaaacaatatatacgagtataatacggacttcatgatttaataatgtagtaatcgttgtcttgttcctgtttcctacttctccaatcatatagatattttctttctatcatggataatatttgtaatggttctttccgtacaacatactgtttagatgatattgcgcataatttccggaggcaaatacgatagtctagattgaccgatggtagactctaatttattgagtgctttgtcgacgagtttacttttacgctccatcgatagatggcactgttctatgagatcgtcgtacatgggaaatgaaatgtgactgtctgaatgtatggctttaagatagctgtgataccgtatacaggtcggtgtcggagattcgaatctctttgaggcgacttatgtcacgatgatggaatctatcttatcgaatgatatatttttcataaatacacttttatagtcctcgtttaaacagaatttactatgtagttccgcgaatgactcgtcccttaataggcagtaggctagtatcttttttacgtagtaatcgtcgtagggagagacatcttgtagaacaacgatttcgttttgttttctcttctgtaactgcttttctggatggccgtattgattatcgagcgtgatactcgctccatattccaataaccgctttgcaaattgtatattattgacatcgaccgcgtaatatagtagagttatcgatcatatctatatcatccatgtacttgcttagtatatcaaatacatctatcagtatggtttcataacagtgatacccgcaattattaaatctcgataatatcagaccgtacatacatagacggccattgttcgatacgtgatttacagccgcgtgtccatattttccacgataaaccttacgacgtttacatcgacgagattattattaacaaagtagtcgtgtagaggatagttgttgtccgttatctaacatgcatcgaacgaccatatcgccgtaatgtaagtagtttatcagtatggcttgtacgatggattcatcctgttgtctaaatctctttagaatgttatcgatgatgtagtggttatattctctggaatcgtacgaagtaatactacgcattacgtcgacaagagtatgacgtctctcaataagaagattaacgatttccatgtctacattatatggggttactctaaatcgcttgtttagataatacgcctctaatatagggctgacgtcgtatactctacacgtgtccacatcctttattaataataatttaacaatctctatatctatggttgagaaagaccagtagtattggatgggtaaagatcctccttcgtctctgccatggatggaaacattgttatcgatcaaacatttaattacatccttggatagagattgagattctctatgagacgatatatagtaatgaagagagttcttacacatatcactgtcgtacatacaggtacgaaatacgtaaccggtgctgtaacattctgatttaagaagccatagcaatacttctggtctcggattaggcgtcgttacgtatatatccaccaatccgagaccattgattgcataattcgtattcttggacggacgtatccgtttatccacaattaggtattttagcagacgtaagtcgatattatccgaatacagatcgaaatcatttatattcgacttgagttcgttagaggaatttgaatagctggatatcagtagatgcacaatctgagattttacgtatctatgcttactgtatactcctagcggagttaatccttcgttgtttctacaaagtctctcgactccgcgagagaacaatcttaatgtctgtatcgcatttattggagacgtaacaatgtagcgcattgtttcctcgtctatctatatgttttgataagttgtgacacgtttcaatttctagttttatttttttgtacgtcacatcttcatccagtagacgacatagaatagtgcactctctaccacaataatccatagctattctggtgctaattattcctatttcacgaaggcaatcattcctcataagatgataaaaagtgtagtggagatttagtatttagcagtgcggatatgatccaagagggtgagatagtcgttctcgttcagaatctttcgcagcataagtagtatgtcgatatacttatcgttgaagactctttataaaagtctatttgtttatatttattgcggatagcagtatttccctataaaaagtatacgtcctgtggtgtctttaatcatgtacatgaatggatggtttatgtagaccttcgtacgatataccatcgaaaagttaatcgtaaatactcctgtaacggccgatgcttctgtatactcctcattaacatctataaacgtcgtatgtagaaatttttctacagtgatagtttcattacacatcttgctaaaatctgcataatatccgaatatattagtaagtcctaaattttctaaaatcggtaccagattatacggttctgtcatttccactttaaactttggcatatacaagtctatacttttagtagataacataccacaccattttttaaatttttcatctgttatatttttttctatgttatatataccttctatgtcgtccggtagtataattaccatactagagtttccctcgtatggaatatcgataatagagaatcctccgaataattcattaatatgtacatattgcaagttattctcggtacccaccatcatatcaacgctggtaactatattcttagaaatataaaacttgtctgtatatgtaagatgtttagaaaatggatatttccacattgctttaaaatggacggcgctaacaactgtcatacgagtattaatggatagcggactagtcaataaggaattaattttaccatttgtcattgtcttaacccattcgttgattagttcctttgtttggttagcattattaaagtttacagtttgaaaatcgtcttttattttttgtaggaaggaggcgtggaactcgatactatcgctaccgtatattttatttgcggtagctagtgtcgcacaatacggaatatctacctccatgtcatcattattgtcatcgggtgtattctcattcatattctctatatattttgatagttgttcagctgtagaaccagctgctccatgatttagaatagataaagtagataaaatggaaactggagaaatcaaaacattttcatcagggtgttttaagattagttctttaaagatatccatggtatagacctaacgataacgatatatatcataaataaataatgttaaatttcaatttatgtttgtaccccgtattcatacttaacaaattggtattgcgtacacaatcaatcatattacataccattaataatgcaagcataaaaaattgttagtagatgtttctaaatataggttccgtaagcaaagaatataagaatgaagcggtaatgataaaatcaatcgttatctaaaatgatcatactcatttattttattctattatattaacacatacatttttaacagcaacacattcaatattgtattgttatttttatattatttacacaattaacaatatattattagtttatattactgaattaataatataaaattcccaatcttgtcataaacacacactgagaaacagcataaacacagaatccatcaaaaatgttgataaattatctgatgttgttgttcgctgctatgataatcagatcattcgccgatagtggtaacgctatcgaaacgacattgccagaaattacaaacgctacaacagatattccagctatcagattatgcggtccagagggagatggatattgtttacacggtgactgtatccacgctagagatattgacggtatgtattgtagatgctctcatggttatacaggcattagatgtcagcatgtagtattagtagactatcaacgttcagaaaacccaaacactacaacgtcatatatcccatctcccggtattatgcttgtattagtaggcattattatgtgttgtctattatctgtttataggttcactcgacgaactaaactacctatacaagatatggttgtgccataatttttataaatttttttatgagtatttttacaaaaatgtataaagtgtatgtcttatgtatatttataaaaatgctaagtatgcgatgtatctatgttatttgtatttatctaaacaatacctctacctctagatattatacaaaaattttttatttcggcatattaaagtaaaatctagttaccttgaaaatgaatacagtgggtggttccgtatcaccagtaagaacataatagtcaaatacagtatccgattgagattttgcatacaatactagtctagaaagaaatttgtaatcatcttctgtgacgggagtccatatatctgtatcatcgtctagtttatcagtgtcccatgctatattcctgttatcatcattagttaatgaaaataactctcgtgcttcagaaaagtcaaatattgtatccatacatacatctccaaaactatcgcttatacgtttatctttaacgatacctatacctagatggttatttactaacagacattttccagatctattgactataactcctatagtttccacatcaaccaagtaatgatcatctattgttatataacaataacataactcttttccatttttatcagtatgtatatctatatcaacgtcgtcgttgtagtgaatagtagtcattgatctattatatgaaacggatatgtctagaacggcaattgttttacgtccagttaacactttcgttgatttaaagtctagagtctttgcaaacataatatccttatccgactttatatttcctgtagggtggtataattttattttgcctccacatatcggtgtttccaaatatattactagacaatattccatatagttattagttaagggtacccaattagaacacgtacgcttattatcatcatttggatcgtatttcataaaagttattgtgttatcgatgtcaacacattctacattttttaatcgtctatatagtatttttctgatattttctataatatcagaattgtcttccatcggaagttgtatactatcggaatcagttacatgtttaaataattctctgatgtcattccttatacaatcaaattcattattaaacagtttaatagtctgtagacctttatcgtcgtaaatatccattgtcttattagttacgcttatttttatgtgtttttacgttgctttattatattttataagaatgattgtttgacgaatcacgagaactattaagacacattattaggtatatattataaaaaagtttttgattacgatgttataagaggaaagaggacacattaacatcatacatcaattaactacattcttataacatcgtaatcaaaagaattgcaattttgatgtataacaactgtcaatgggttatggaattgtatattacatattatacggtatgttggtaacgacaaataccggtcggtaattgtctgccggtgtaatagaattatatatatctatctattacaccggccttgtatacataataataagttgtggtagtatgatctccatatttataatttaggactttgtattcagtatttttggaatcataaaaaataaaaaaaagttttactaatttaaaatttaaaaagtatttacatttttttcactgtttagtcgcggatatggaattcgatcctgccaaaatcaatacatcatctatagatcatgtaacaatattacaatacatagatgaaccaaatgatataagactaacagtatgcattatccgaaatattatatcaatatcacaaaaataaatacacatttggctaatcaatttcgggcttggaaaaaacgtatcgccggaagggactatatgactaacttatctagagatacaggaatacaacaatcaaaacttactgaaactatacgtaactgtcaaaaaaatagaaacatatatggtctatatatacactacaatttagttattaattggataaccgatgtgattatcaatcaatattaagagggttggtaaattggtacatagctaataatacctatactccaaatacacccaataatacaacaaccatttctgagttggatatcatcaaaatactaaataaatacgaggacgtgtatagagtaagtaaagaaaaagaatgtggaatttgctatgaagttgtttactcaaaacgatagatactttggtttattggattcgtgtactcatatattttgcataacatgcatcaatatatggcatagaacacgaagagaaaccggtgcgtcggataattgtcctatatgccgtacccgttttagaaacataacaatgagcaagttctataagctagttaactaataaataaaaagtttaatttgttgacgacgtatgtcgttattttttctcgtataaaagattaatttgattctaatataatctttagtattggataaatatcaattcaaattaattccattagattatatcataaataaaaatagtagcacacaactacttcagcaaacattctttttataaatgccatctagcgtagcgaggacacaagtgaacctataattatcaaatttattagtatcagtcacatgaaggactttacgtagagtgacgattccactatctgtggtacgaacggtttcatcttctttgatgccatcacccagatgttctataaacttggtatcctcgtccgatttcatatcctttgccaaccaatacatatagctaaactcaggcatatgttccacacatcctgaacaatgaaattctccagaagatgttacaatgtctagatttggacatttggtttcaaccgcgttaacatatgagtgaacacacccatacatgaaagcgatgagaaataggattctcatcttgccaaaatatcactagaaaaaatttatttatcagttttaaaggtataaaaaatacttattgttgctcgaatattttgtatttgatggtatacggaagattagaaatgtaggtattatcatcaactgattctatggttttatgtattctatcatgtttcactattgcgttggaaataatatcatatgcttccacatatattttattttgttttaactcataatactcacgtaattctggattattggcatatctatgaataattttagctccatgatcagtaaatattaatgagaacatagtattaccacctaccattatttttttcatctcattcaattcttaattgcaaagatctatataatcattatagcgttgacttatggactctggaatcttagacgatgtacagtcatctataatcatggcatatttaatacattgttttatagcatagtcgttatctacgatgttagatatttctctcaatgaatcaatcacacaatctaatgtaggtttatgacataatagcattttcagcagttcaatgtttttagattcgttgatggcaatggctatacatgtatatccgttatttgatctaatgttgacatctgaaccggattctagcagtaaagatactagagattgtttattatatctaacagccttgtgaagaagtgtttctcctcgtttgtcaatcatgttaatgtctttaagataaggtaggcaaatgtttatagtactaagaattgggcaagcataagacatgtcacaaagacccttttttgtatgtataagtgtaaaaattataacatccatagttggatttacataggtgtccaatcgggatctctccatcatcgagataattgatggcatctcccttccttttttagtagatatttcatcgtgtaagaatcaatattaatatttctaaagtatccgtgtatagcctctttatttaccacagctccatattccactagagggatatcgccgaatgtcatatactcaattagtatatgttggaggacatccgagttcattgttttcaatatcaaagagatggtttccttatcatttctccatagtggtacaatactacacattattccgtgcggctttccattttccaaaaacaatttgaccaaatctaaatctacatctttattgtatctataatcactatttagataatcagccataattcctcgagtgcaacatgttagatcgtctatatatgaataagcagtgttatctattcctttcattaacaatttaacgatgtctatatctatatgagatgacttaatataatattgaagagctgtacaatagtttttatctataaaagacggcttgattccgtgattaattagacatttaacaacttccggacgcacatatgctctcgtatccgactctgaatacagatgagagatgatatacagatgcaatacggtaccgcaatttcgtagttgataatcatcatacgcgtatcagtactcgtcctcataaagaacactgcagccattttctatgaacaaatcaataattttagaaacaggatcattgtcattacataattttctataactgaacgatggttttcacatttaacactcaagtcaaatccatgttctaccaacacctttatcaagtcaacgtctacatttttggatttcatatagctgaatatattaaagttatttatgttgctaaatccagtggcttctagtagagccatcgctatatccttattaactttaacatgtctactatttgtgtattcttctaatggggtaagctgtctccaatttttgcgtaatggattagtgccactgtctagtagtagtttgacgacctcgacattattacaatgctcattaaaaaggtatgcgtgtaaagcattattcttgaattggttcctggtatcattaggatctctgtctttcaacatctgtttaagttcatcaagagccacctcctcattttccaaatagtcaaacattttgactgaatgagctactgtgaactctatacacccacacaactaatgtcattaaatatcatgtcaaaaacttgtacaattattaataaaaataatttagtgtttaaattttaccagttccagattttacacctccgttaatacctccattaaccccactggacgatcctcctccccacattccaccgccaccagatgtataagttttagatcctttattactaccatcatgtccatggataaagacactccacatgccgccactaccccctttagaagacatattaataagacttaaggacaagtttaacaataaaattaatcacgagtaccctactaccaacctacactattatatgattatagtttctatttttacagtaccttgactaaagtttctagtcacaagagcaatactaccaacctacactattatatgattatagtttctatttttataggaacgcgtacgagaaaatcaaatgtctaatttctaacggtagtgttgataaacgattgttatccgcggatacctcctctatcatgtcgtctattttcttactttgttctattaacttattagcattatatattatttgattataaaacttatattgcttattagcccaatctgtaaatatcggattattaacatatcgtttctttgtaggtttatttaacatgtacatcactgtaagcatgtccttaccatttattttaatttgacgcatatccgcaatttctttttcgcagtcggttataaattctatatatgatggatacatgctacatgtgtacttataatcgactaatatgaagtacttgatacatattttcagtaacgatttattattaccacctatgaataagtacctgtgatcgtctaggtaatcaactgttttcttaatacattcgatggttggtaatttactcagaataatttccaatatcttaatatataattctgctatttctgggatatatttatctgccagtataacacaaatagtaatacatgtaaacccatattttgttattatattaatgtctgcgccattatctattaaccattctactaggctgacactatgcgactcaatacaatgataaagtatactacatccatgtttatctattttgtttatatcatcaatatacggcttacaaagttttagtatcgataacacatccaactcacgcatagagaaggtagggaataatggcataatatttattaggttatcatcattgtcattatctacaactaagtttccattttttaaaatatactcgacaactttaggatctctattgccaaatttttgaaaatatttatttatatgcttaaatctatataatgtagctccttcatcaatcatacatttaataacattgatgtatactgtatgataagatacatattctaacaatagatcttgtatagaatctgtatatcttttaagaattgtggatattaggatattattacataaactattacacaattctaaaatataaaacgtatcacggtcgaataatagttgatcaactatataattatcgattttgtgatttttcttcctaaactgtttacgtaaatagttagatagaatattcattagttcatgaccactatagttactatcgaataacgcgtcaaatatttcccgtttaatatcgcatttgtcaagataataatagagtgtggtatgttcacgataagtataataacgcatctctttttcgtgtgaaattaaatagtttattacgtccaaagatgtagcataaccatcttgtgacctagtaataatataataatagagaactgttttacccattctatcatcataatcagtggtgtagtcgtaatcgtaatcgtctaattcatcatcccaattataatattcaccagcacgtctaatctgttctattttgatcttgtatccatactgtatgttgctacatgtaggtattcctttatccaataatagtttaaacacatctacattgggatttgatgttgtagcgtatttttctacaatattaataccatttttgatactatttatttctatacctttcgaaattagtaatttcaataagtctatattgatgttatcagaacatagatattcgaatatatcaaaatcattgatatttttatagtcgactgacgacaataacaaaatcacaacatcgtttttgatattattatttttcttggtaacgtatgcctttaatggagtttcaccatcatactcatataatggatttgcaccactttctatcaatgattgtgcactgctggcatcgatgttaaatgttttacaactatcatagagtatcttatcgttaaccatgattggttgttgatgctatcgcattttttggtttctttcatttcagttatgtatggatttagcacgtttgggaagcatgagctcatatgatttcagtactgtagtgtcagtactattagtttcaataagatcaatctctagatctatagaatcaaaacacgataggtcagaagataatgaatatctgtaggcttcttgttgtactgtaacttctggttttgttagatggttgcatcgtgctttaacgtcaatggtacaaattttatcctcgctttgtgtatcatattcgtccctactataaaattgtatattcagattatcatgcgatgtgtatacgctaacggtatcaataaacggagcacaccatttagtcataaccgtaatccaaaaatttttaaagtatatcttaacgaaagaagttgtgtcattgtctacggtgtatggtactagatcctcataagtgtatatatctagagtaatgtttaatttattaaatggttgataatatggatcctcgtgacaatttccgaagatggaaataagacataaacacgcaataaatctaattgcggacatggttactccttaaaaaaatacgaataatcaccttggctatttagtaagtgtcatttaacactatactcatattaatccatggactcataatctctatacgggattaacggatgttctatatacggggatgagtagttctcttctttaactttatactttttactaatcatatttagactgatgtatgggtaatagtgtttgaagagctcgttctcatcatcagaataaatcaatatctctgtttttttgttatacagatgtattacagcctcatatattacgtaatagaacgtgtcatctaccttattaactttcaccgcatagttgtttgcaaatacggttaatcctttgacctcgtcgatttccgaccaatctgggcgtataatgaatctaaactttaattgcttgtaatcattcgaaataatttttagtttgcatccgtagttatcccctttatgtaactgtaaatttctcaacgcgatatctccattaataatgatgtcgaattcgtgctgtatacccatactgaatggatgaacgaataccgacggcgttaatagtaatttactttttcatctttacatattgggtactagttttactatcataagtttataaattccacaagctactatggaataagccaaccatcttagtataccacacatgtcttaaagtttattaattaattacatgttgttttatatatatcgctacgaatttaaagagaaattagtttaggaagaaaaattatctatctacatcatcacgtctctgtattctacgatagagtgctactttaagatgcgacagatccgtgtcatcaaatatatactccattaaaatgattattccggcagcgaacttgatattggatatatcacaacctttgttaatatctacgacaatagacagcagtcccatggttccataaacagtgagtttatctttctttgaagagatattttgtagagatcttataaaactgtcgaatgacatcgcatttatatctttagctaaatcgtatatgttaccatcgtaatatctaaccgcgtctatcttaaacgtttccatcgctttaaagacgtttccgatagatggtctcatttcatcagtcatactgagccaacaaatataatcgtgtataacatctttgatagaatcagactctaaagaaaacgaatcggctttattatacgcattcatgataaacttaatgaaaaatgtttttcgttgtttaagttggatgaatagtatgtcttaataattgttattatttcattaattaatatttagtaacgagtacactctataaaaacgagaatgacataactaatcataactagttatcaaagtgtctaggacgcgtaattttcatatggtatagatcctgtaagcattgtctgtattctggagctattttctctatcgcattagtgagttcagaatatgttataaatttaaatcgaataacgaacataactttagtaaagtcgtctatattaactcttttattttctagccatcgtaataccatgtttaagatagtatattctctagttactacgatctcatcgttgtctagaatatcacatactgaatctacatccaattttagaaattggtctgtgttacatatctcttctatattattgttgatgtattgtcgtagaaaactattacgtagaccattttctttataaaacgaatatatagtactccaattatctttaccgatatatttgcacacataatccattctctcaatcactacatctttaagattttcgttgttaagatatttggctaaactatataattctattagatcatcaacagaatcagtatatatttttctagatccaaagacgaactctttggcgtcctctataatattcccagaaaagatattttcgtgttttagtttatcgagatctgatctgttcatatacgccatgattgtacggtacgttatgataaccgcataaaataaaaatccattttcatttttaaccaatactattcataattgagattgatgtaatactttgttactttgaacgtaaagacagtacacggatccgtatctccaacaagcacgtagtaatcaaatttggtgttgttaaacttcgcaatattcatcaatttagatagaaacttatactcatcatctgttttaggaatccatgtattattaccactttccaacttatcattatcccaggctatgtttcgtccatcatcgttgcgcagagtgaataattcttttgtattcggtagttcaaatatatgatccatgcatagatcggcaaagctattgtagatgtgatttttcctaaatctaatataaaactcgtttactagcaaacactttcctgatttatcgaccaagacacatatggtttctaaatctatcaagtggtggggatccatagttatgacgcagtaacatatattattacattcttgactgtcgctaatatctaaatatttattgttatcgtattggattctgcatatagatggcttgtatgtcaaagatatagaacacataaccaatttatagtcgcgctttacattctcgaatctaaagttaagagatttagaaaacattatatcctcggatgatgttatcactgtttctggagtaggatatattaaagtctttacagatttcgtccgattcaaataaatcactaaataatatcccacattatcatctgttagagtagtatcattaaatctattatattttatgaaagatatatcactgctcacctctatatttcgtacatttttaaactgtttgtataatatctctctgatacaatcagatatatctattgtgtcggtagacgataccgttacatttgaattaatggtgttccattttacaacttttaacaagttgaccaattcatttctaatagtatcaaactctccatgattaaatattttaatagtatccattttatatcactacggacacaaagtagctgacataaaccattgtataatttttatgttttatgtttattagcgtacacattttggaagttccggcttccatgtatttcctggagagcaagtagatgatgaggaaccagatagtttatatccgtacttgcacttaaagtctacattgtcgttgtatgagtatgatcttttaaacccgctagacaagtatccgtttgatattgtaggatgtggacatttaacaatctgacacgtgggtggatcggaccattctcctcctgaacacaggacactagagttaccaatcaacgaatatccactattgcaactataagttacaacgctcccatcggtataaaaatcctcgtatccgttatgtcttccgttggatatagatggaggggattggcatttaacagattcacaaataggtgcctcgggattccataccatagatccagtagatcctaattcacaatacgatttagattcaccgatcaactgatatccgctattacaagagtacgttatactagagccaaagtctactccaccaatatcaagttggccattatcgatatctcgaggcgatgggcatctccgtttaatacattgattaaagagtgtccatccagtacctgtacatttagcatatataggtcccattttttgctttctgtatccaggtagacatagatattctatagtgtctcctatgttgtaattagcattagcatcagtctccacactattcttaaatttcatattaatgggtcgtgacggaatagtacagcatgatagaacgcatcctattcccaacaatgtcaggaacgtcacgctctccaccttcatatttatttatccgtaaaaatgttatcctggacatcgtacaaataataaaaagcccatatatgttcgctattgtagaaattgtttttcacagttgctcaaaaacgatggcagtgacttatgagttacgttacactttggagtctcatctttagtaaacatatcataatattcgatattacgagttgacatatcgaacaaattccaagtatttgattttggataatattcgtattttgcatctgctataattaagatataatcaccgcaagaacacacgaacatctttcctacatggttaaagtacatgtacaattctatccatttgtcttccttaactatatatttgtatagataattacgagtctcgtgagtaattccagtaattacatagatgtcgccgtcgtactctacagcataaactatactatgatgtctaggcatgggagacttttttatccaacgatttttagtgaaacattccacatcgtttaatactacatatttctcatacgtggtataaactccacccattacatatatatcatcgtttacgaataccgacgcgcctgaatatctaggagtaattaagtttggaagtcttatccatttcgaagtgccgtgtttcaaatattctgccacacccgttgaaatagaaaattctaatcctcctattacatataactttccatcgttaacacaagtactaacttctgattttaacgacgacatattagtaaccgttttccattttttcgttttaagatctacccgcgatacggaataaacatgtctattgttaatcatgccgccaataatgtatagacaattatgtaaaacatttgcattatagaattgtctatctgtattaccgactatcgtccaatattctgttctaggagagtaatgggttattgtggatatataatcagagtttttaatgactactatattatgttttataccatttcgtgtcactggctttgtagatttggatatagttaatcccaacaatgatatagcattgcgcatagtattagtcataaacttgggatgtaaaatgttgatgatatctacatcgtttggatttttatgtatccactttaataatatcatagctgtaacatcctcatgatttacgttaacgtcttcgtgggataagatagttgtcagttcatcctttgataattttccaaattctggatcggatgtcaccgcagtaatattgttgattatttctgacatcgacgcattatatagttttttaattccatatcttttagaaaagttaaacatccttatacaatttgtgaaattaatattatgaatcatagtttttacacatagatctactacaggcggaacatcaattattatggcagcaactagtatcatttctacattgtttatggtgatgtttatcttcttccagcgcatatagtctaatagcgattcaaacgcgtgatagtttataccattcaatataatcgcttcatcctttagatggtgatcctgaatgcgtttaaaaaaattatacggagacgccgtaataatttccttattcacttgtataatttccccattgatagaaaatattacgctttccattcttaaagtactataagtaattatagtataatgtaaacgtttatatattcaatatttttataaaaatcattttgacattaattcctttttaaatttccgtctatcatctatagaaacgtattctatgaatttataaaatgcttttacgtgtcctatcgtaggcgatagaaccgctaaaaagcctatcgaatttctacaaaagaatctgttatatggtatagggagagtataaaacattaaatgtccgtacttattaaagtattcagtagccaatcctaactctttcgaatacttattaatggctcttgttctgtacgaatctatttttttgaacaacggacctagtggtatatcttgttctatgtatctaaaataatgtctgactagatccgttagtttaatatccgcagtcatcttgtctagaatggcaaatctaactgcgggtttaggctttagtttagtttctatatctacatctatgtctttatctaacaccaaaaatataatagctaatattttattacaatcatccggatattcttctacgatctcactaactaatgtttctttggttatactagtatagtcactatcggacaaataaagaaaatcagatgatcgatgaataatacatttaaattcatcatctgtaagatttttgagatgtctcattagaatattattagggttagtactcattatcattcggcagctattacttattttattatttttcaccatatagatcaatcattagatcatcaaaatatgtttcaatcatcctaaagagtatggtgaatgactcttcccatctaatttctgaacgttcaccaatgtctctagccactttggcactaatagcgatcattcgcttagcgtcttctatattattaactggttgatttaatctatctagcaatggaccgtcggacagcgtcattctcatgttcttaatcaatgtacatacatcgccgtcatctaccaattcatccaacaacataagctttttaaaatcatcattataataggtttgatcgttgtcatttctccaaagaatatatctaataagtagagtcctcatgcttagttaacaactattttttatgttaaatcaattagtacaccgctatgtttaatacttattcatattttagtttttaggattgagaatcaatacaaaaattaatgcatcattaattttagaaatacttagtttccacgtagtcaatgaaacatttgaactcatcgtacaggacgttctcgtacaggacgtaactataaaccggtttatatttgttcaagatagatacaaatccgataactttttttacgaattctacgggatccactttaaaagtgtcataccgggttctttttatttttttaaacagatcaatggtgtgatgttgattaggtcttttacgaatttgatatagaatagcgtttacatattctccataatggtcaatcgccatttgttcgtatgtcataaattctttaattatatgacactgtgtattatttagttcatccttgttcattgttaggaatctatccaaaatggcaattatactagaactataggtgcgttgtatacacatattgatgtgtctgtttatacaatccatgatatttggatccatgctactaccttcgggtaaaattgtagcatcatataccatttctagtactttaggttcattattatccattgcagaggacgtcatgatcgaatcataaaaaaatatattatttttatgttattttgttaaaaataatcatcgaatacttcgtaagatactccttcatgaacataatcagttacaaaacgtttatatgaagtaaagtatctacgatttttacaaaagtccggatgcataagtacaaagtacgcgataaacggaataataatagatttatctagtctatctttttctatagctttcatagttagatacatggtctcagaagtaggattatgtaacatcagcttcgataaaatgactgggttatttagtcttacacattcgctcatacatgtatgaccgttaactacagagtctacactaaaatgattgaacaatagatagtctaccattgtttcgtattcagatagtacagcgtagtacatggcatcttcacaaattatatcattgtctaatagatatttgacgcatcttatggatcccacttcaacagccatcttaaaatcatattgctttcctttatcattaataatttctagaacatcatctctatcataaaagatacaaatattaactgtttgatccgtaataacattgctagtcaatagcaatttgttaataagatgcgctgggctcaatgtcttaataagaagtgtaagaggactatctccgaatttgttttgtttattaacatccgttgatggaagtaaaagatctataatgtctacattcttgactgttttagagcatacaatatggagaggtgtatttccatcatgatctggttttgagggactaattcctagtttcatcatccatgagattgtagaagcttttggattgtctgacataagatgtctatgaatatgatttttgccaaatttatccactatcctggcttcgaatccgatggacattatttttttaaacactctttctgaaggatctgtacacgccaacaacggaccacatccttcttcatcaaccgagttgttaatcttggctccatactgtaccaataaatttattctctctatgacttcatcatctgttcccgagagataatatagaggtgttttatgctgtttatcacacgcgtttggatctgcgccgtgcgtcagcagcatcgcgactattctattattattaattttagaagctatatgcaatggataatttccatcatcatccgtctcatttggagagtatcctctatgaagaagttcttcgacaaatcgttcatctagtcctttaattccacaatacgcatgtagaatgtgataattatttccagaaggttcgatagcttgtagcatattcctaaatacatctaaatttttactattatatttggcataaagagatagataatactcggccgacataatgttgtccattgtagtataaaaattaatatttctatttctatttctgtatatttgcaacaatttactctctataacaaatatcataacttagtttttttatgtcaagaaggcactggtttagttcatctataaatgtcacgccataactaccacgcatgccatactcagaattatgataaagatatttatccttggggtgtaggtaatggggattaatctttgttggatcagtctctaagttaacacatgtcacacatgatccatttatagttatatcacacgatgatgatttatgaattgattccggaagatcgctatcgtattttgtggttccacaattcatttccatacatgttattgtcacactaatattatgatgaactttatctagccgctgagtggtaaacaacagaacagatagtttattatctttaccaacaccctcagccgctgccacaaatctctgatccgtatccatgatggtcatgtttatttctagtccgtatccagtcaacactatgttagcatttctgtcgatatagctttcactcatatgacactcaccaataatagtagaattaatgtcgtaatttacaccaatagtgagttcggcggcaaagtaccaataccggtaatcttgtcgaggaggacatatagtattcttgtattctaccgaatacccgagagatgcgatacaaaagagcaagactaatttgtaaaccatcttactcaaaatatgtaacaatagtacgatgcaatgagtaagacaataggaaatctatcttatatacacataattattctatcaattttaccaattagttagtgtaatgttaacaaaaatgtgggagaatctaattagtttttctttacacaattgacgtacatgagtctgagttccttgtttttgctaattatttcatccaatttattattcttgacgatatcgagatcttttgtataggagtcaaacttgtattcaacatgcttttctataatcattttagctatttcggcatcatccaatagtacattttccagattagcagaatagatattaatgtcgtatttgaacagagcctgtaacatctcaatgtctttattatctatagccaatttaatgtccggaatgaagagaagggaattattggtgtttgtcgacgtcatatagtcgagcaagagaatcatcatatccacgtgtccattttttatagtgatgtgaatacaactaaggagaatagccagatcaaaagtagatggtatctctgaaagaaagtaggaaacaatacttacatcattaagcatgacggcatgataaaatgaagttttccatccagttttcccatagaacatcagtctccaatttttcttaacaaacagttttaccgtttgcatgttaccactatcaaccgcataatacaatgcggtgtttcccttgtcatcaaattgtgaatcatccagtccactgaatagcaaaatctttactattttggtatcttccaatgtggctgcctgatgtaatggaaattcattctctagaagatttttcaatgctccagcgttcaacaacgtacatactagacgcacgttattatcagctattgcataatacaaggcactatgtccatggacatccgccttaaatgtatctttactagagagaaagcttttcagctgcttagacttccaagtattaattcgtgacagatccatgtctgaaacgagacgctaattagtgtatattttttcattttttataattttgtcatattgcaccagaattaataatatctttaatagatctgattagtagatacatggctatcgcaaaacaacatatacacatttaataaaaataatatttattaagaaaattcagatttcacgtacccatcaatataaataaaataatgattccttacaccgtacccatattaaggagattccaccttacccataaacaatataaatccagtaatatcatgtctgatgatgaacacaaatggtgtattaaattccagtttttcaggagatgatctcgccgtagctaccataatagtagatgcctctgctacagttccttgttcgtcgacatctatctttgcattctgaaacattttataaatatataatgggtccctagtcatatgtttaaacgacgcattatctggattaaacatactaggagccatcatttcggctatcgacttaatatccctcttattttcgatagaaaatttagggagtttaagattgtacactttattccctaattgagacgaccaatagtctaattttgcagccgtgatagaatctgtgaaatgggtcatattatcacctattgccaggtacatactaatattagcatccttatacggaaggcgtaccatgtcatattctttgtcatcgattgtgattgtatttccttgcaatttagtaactacgttcatcatgggaaccgttttcgtaccgtacttattagtaaaactagcattgcgtgttttagtgatatcaaacggatattgccatatacctttaaaatatatagtattaatgattgcccatagagtattattgtcgagcatattagaatctactacattagacataccggatctacgttctactatagaattaattttattaaccgcatctcgtctaaagtttaatctatataggccgaatctatgatattgttgataatacgacggtttaatgcacacagtattatctacgaaactttgataagttagatcagtgtacgtatatttagatgttttcagcttagctaatcctgatattaattctgtaaatgctggacccagatctctttttctcaaatccatagtcttcaataattctattctagtattacctgatgcaggcaatagcgacataaacatagaaaacgaataaccaaacggtgagaagacaatattatcatcttgaatatttttatacgctactataccggcattggtaaatccttgtagacgataggcggacgctgaacacgctaacgatagtatcaataacgcaatcatgattttatggtattaataattaaccttatttttatgttcggtataaaaaaattattgatgtctacacatccttttgtaattgacatctatatatccttttgtataatcaactctaatcactttaacttttacagttttccctaccagtttatccctatattcaacatatctatccatatgcatcttaacactctctgccaagatagcttcagagtgaggatagtcaaaaagataaatatatagagcataatcattctcgtatactctgccctttattacatcacccgcattgggcaacgaataacaaaatgcaagcatcttgttaacgggctcgtaaattgggataaaaattatgtttttattgtcttatatctattttattcaagagaatattcaggaatttctttttccggttgtatctcgtcgcagtatatatcatttgtacattgtttcatattttttaatagtttacaccttttagtaggactagtatcgtacaattcatagctgtattttgaattccaatcacgcataaaaatatcttccaattgttgacgaagacctaatccatcatccggtgtaatattaatagatgctccacatgtatccgtaaagtaatttcctgtccaatttgaggtacctatataggccgttttatcggttaccatatatttggcatggtttaccctagaatacggaatgggaggatcagcatctggtacaataaatagctttacttctatatttatgtttttagattttagcatagcgatagatcttaaaaagtttctcatgataaacgaagatcgttgccagcaactaatcaatagcttaacggatacttgtctgtctatagcggatcttcttaattcatcttctatataaggccaaaacaaaattttacccgccttcgaataaataatagggataaagttcataacagatacataaacgaatttactcgcatttctaatacatgacaataaagcggttaaatcattggttctttccatagtacatagttgttgcggtgcagaagcaataaatacagagtgtggaacgccgcttacgttaatactaagaggatgatctgtattataatacgacggataaaagtttttccaattatatggtagattgttaactccaagataccagtatacctcaaaaatttgagtgagatccgctgccaagttcctattattgaagatcgcaatacccaattccttgacctgagttagtgatctccaatccatgttagcgcttcctaaataaatatgtgtattatcagatatccaaaattttgtatgaagaactcctcctaggatatttgtaatatctatgtatcgtacttcaactccggccatttgtagtctttcaacatcctttaatggtttgttagatttattaacggctactctaactcgtactcctcttttgggtaattgtacaatctcgtttaatattatcgtgccgaaattcgtacccacttcatccgataaactccaataaaaagatgatatatctagtgtttttgtggtattggatagaatttccctccacatgttaaatgtagacaaatatactttatcaaattgcatacctataggaatagtttctgtaatcactgcgattgtattatccggattcattttatttgttaaaagaataatcctatatcacttcactctattaaaaatccaagtttctatttctttcatgactgattttttaacttcatccgtttccttatgaagatgatgtttggcaccttcataaatttttatttctctattacaatttgcatgttgcatgaaataatatgcacctaaaacatcgctaatcttattgtttgttccctggagtatgagagtcggggggtgttaatcttggaaattatttttctaaccttgttggtagccttcaagacctgactagcaaatccagccttaattttttcatgattgactaatgggtcgtattggtatttataaactttatccatatctctagatactgattctggacatagctttccgactggcgcatttggtgtgatggttcccataagtttggcagctagcagattcagtcttgaaacagcatctgcattaactagaggagacattagaatcattgctgtaaacaagtttggattatcgtaagaggctagctcccatggaatgacccaataagtagatttaatagttaccacgtgctgtaccaaagtcatcaatcatcattttttcaccattacttcttccatgtccaatatgatcatgtgagaatactaaaattcctaacgatgatatgttttcagctagttcgtcataacgtccagaatgtttaccagctccatgacttatgaatactaatgccttaggatatgtaataggtttccaatatttacaatatatgtaatcattgtccagattgaacatacagtttgcactcatgattcacgttatataactatcaatattaacagttcgtttgatgatcatattatttttatgttttattgataattgtaaaaacatacaattaaatcaatatagaggaaggagacggctactgtcttttgtaagatagtcatggcgactaaattagattatgaggatgctgttttttactttgtggatgatgataaaatatgtagtcgcgactccatcatcgatctaatagatgaatatattacgtggagaaatcatgttatagtgtttaacaaagatattaccagttgtggaagactgtacaaggaattgatgaagttcgatgatgtcgctatacggtactatggtattgataaaattaatgagattgtcgaagctatgagcgaaggagaccactacatcaattttacaaaagtccatgatcaggaaagtttattcgctaccataggaatatgtgctaaaatcactgaacattggggatacaaaaagatttcagaatctagattccaatcattgggaaacattacagatttgatgaccgacgataatataaacatcttgatactttttctagaaaaaaaattgaattgatgatataggggtcttcataacgcataattattacgttagcattctatatccgtgttaaaaaaaattatcctatcatgtatttgagagttttatatgtagcaaacatgatagctgtgatgccaataagctttagatattcacgcgtgctagtgttagggatggtattatctggtggtgaaatgtccgttatataatctacaaaacaatcatcgcatatagtatgcgatagtagagtaaacatttttatagtttttactggattcatacatcgtctacccaattcggttataaatgaaattgtcgccaatcttacacccaaccccttgttatccattagcatagtattaacttcgttatttatgtcataaactgtaaatgattttgtagatgccatatcatacatgatattcatgtccctattataatcattactaactttatcacaatatatgttgataatatctatatatgatctagtctttgtgggcaactgtctatacaagtcgtctaaacgttgtttactcatatagtatcgaacagccatcattacatggtcccgttccgttgatagataatcgagtatgttagtggacttgtcaaatctatataccatattttctggaagtggatatacatagtcgtgatcaacattattgctagcctcatcttctatatcctgtactataccattatctatatcatctacataatctatgatattattacacataaacatcgacaacatactattgtttattatctaagtcctgttgatccaaacccttgatctcctctatttgtactatctagagattgtacttcttccagttctggataatatatacgttgatagattagctgagctattctatctccagtatttacattaaacgtacattttccattattaataagaatgactcctatgtttcccctataatcttcgtctattacaccacctcctatatcaatgccttttagtgacagaccagacctaggagctattctaccatagcagaacttaggcatggacatactaatatctgtcttaattaactgtctttctcctggagggatagtataatcgtaagcgctatacaaatcatatccggcagcacccggcgattgcctagtaggagatttagctctgttagtttccttaacaaatctaactggtgagttaatattcatgttgaacataaaactaatattttatttcaaaattatttaccatcccatatattccatgaataagtgtgatgattgtacacttctatagtatctatatacgatccacgataaaatcctcctatcaatagcagtttattatccactatgatcaattctggattatccctcggataaataggatcatctatcagagtccatgtattgctggattcacaataaaattccgcatttctaccaaccaagaataaccttctaccgaacactaacgcgcatgatttataatgaggataataagtggatggtccaaactgccactgatcatgattgggtagcaaatattctgtagttgtatcagtttcagaatgtcctcccattacgtatataacattgtttatggatgccactgctggattacatctaggtttcagaagactcggcatattaacccaagcagcatccccgtggaaccaacgctcaacagatgtgggatttggtagacctcctactacgtataatttattgttagcgggtatcccgctagcatacagtctggggctattcatcggaggaattggaatccaattgtttgatatataatttacagctatagcattgttatgtatttcattgttcatccatccaccgatgagatatactacttctccaacatgagtacttgtacacatatggaatatatctataatttgatccatgttcataggatactctatgaatggatacttgtatgatttgcgtggttgtttatcacaatgaaatattttggtacagtctagtatccattttacattatttatacctctgggagaaagataatttgacctgattacatttttgataaggagtagcagatttcctaatttatttcttcgcctcatataccacttaatgacaaaatcaactacataatcctcatctggaacatttagttcatcgctttctagaataagtttcatagatagataatcaaaattgtctatgatgtcatcttccagttccaaaaagtgtttggcaataaagtttttagtatgacataagagattggatagtccgtattctatacccatcatgtaacactcgacacaatattcctttctaaaatctcgtaagataaagtttatacaagtgtagatgataaattctacagaggttaatatagaagcacgtaataaattgacgacgttatgactatctatatatacctttccagtatatgagtaaataactatagaagttaaactgtgaatgtcaaggtctagacaaacccttgtaactggatctttatttttcgtgtatttttgacgtaaatgtgtgcgaaagtaaggagataactttttcaatatcgtagaattgactattatattgcctcctatggcatcaataattgttttgaatttcttagtcatagacaatgctaatatattcttacagtacacagtattgacaaatatcggcatttatgtttctttaaaagtcaacatctagagaaaaatgattatctttttgagacataactcccattttttggtattcacccacacgtttttcgaaaaaattagtttttccttccaatgatatattttccatgaaatcaaacggattggtaacattataaatttttttaaatcccaattcagaaatcaatctatccgcgacgaattctatatatgttttcatcatttcacaattcattcctataagtttaactggaagagccgcagtaagaaattcttgttcaatggatactgcatctgttataatagatctaacggtttcttcactcggtggatgcaataaatgtttaaacatcaaacatgcgaaatcgcagtgcagaccctcgtctctactaattagttcgttggaaaacgtgagtccgggcattaggccacgctttttaagccaaaatatggaagcgaatgatccagaaaagaaaattccttctactgcagcaaaggcaataagtctctctccataaccggcgctgtcatgtatccacttttgagcccaatcggccttcttttttacacaaggcatcgtttctatggcattaaagagatagtttttttcattactatctttaacataagtatcgatcaaaagactatacatttccgaatgaatgttttcaatggccatctgaaatccgtagaaacatctagcctcggtaatctgtacttctgtacaaaatcgttccgccaaattttcattcactattccgtcactggctgcaaaaaacgccaatacatgttttataaaatatttttcgtctggtgttagtttattccaatcattgatatctttagatatatctacttcttccactgtccaaaatgatgcctctgcctttttatacatgttccagatgtcatgatattggattgggaaaataacaaatctatttggatttggtgcaaggatgggttccataactaaattaacaataacaataaattttttttcagttatctatatgcctgtacttggattttttgtacatcgatatcgccgcaatcactacaataattacaagtattattgatagcattgttattagtactatcataattaaattatctacattcatgggtgctgaataatcgttattatcatcattatcattttgtaattgtgacatcatactagataaatcgtttgcgagattgttgtgggaagcgggcatggaggatgcattatcattattatttaacgccttccatttggattcacaaatgttacgcacattcaacattttatggaaactataattttgtgaaaacaaataacaagaaaactcgtcatcgttcaaatttttaacgatagtaaaccgattaaacgtcgagctaatttctaacgctagcgactctgttggatatgggtttccagatatatatcttttcagttcccctacgtatctataatcatctgtaggaaatggaagatatttccatttatctactgttcctaatatcatatgtggtggtgtagtagaaccattaagcgcgaaagatgttatttcgcatcgtattttaacttcgcaataatttctggttagataacgcactctaccagtcaagtcaatgatattagcctttacagatatattcatagtagtcgtaacgatgactccatcttttagatgcgatactcctttgtatgtaccagaatcttcgtacctcaaactcgatatatttaaacaagttaatgagatattaacgcgttttatgaatgatgatatataaccagaagttttatcctcggtggctagcgctataaccttatcattataataccaactagtgtgattaatatgtgacacgtcagtgtgggtacaaatatgtacattatcgtctacgtcgtattcgatacatccgcatacagccaacaaatataaaatgacaaatactctaacgccgttcgtacccatcttgatgcggtttaataaatgttttgatttcaatttattgtaaaaaaagattcggttttatactgttcgatattctcattgcttatattttcatctatcatctccacacagtcaaatccgtggttagcatgcacctcatcaaccggtaaaagactatcggactcttctatcattataactctagaatatttaatttggtcattattaatcaagtcaattatcttatttttaacaaacgtgagtattttactcattttttataaaaacttttagaaatatacagactctatcgtgtgtctatatcttctttttatatccaatgtatttatgtctgatttttcttcatttatcatatataatggtccaaattctacacgtgcttcggattcatccagatcattaaggttcttataattgtaacatccttctcttccctcttctacatcttccttcttattcttattcttagcgtcacagaatctaccacagcaggatcccatgacgagcgtcatattaaactaatccattttcaattataatatatgattagtaatgaccattaaaataaaaaatattcttcataaccggcaagaaagtgaaaagttcacattgaaactatgtcagtagtatacatcatgaaatgatgatatatatatactctattttggtggaggattatatgatataattcgtggataatcatttttaagacacatttctttattcgtaaatcttttcacgttaaatgagtgtccatattttgcaatttcttcatatgatggcggtgtacgtggacgaggctgctcctgttcttgttgtggtcgccgactgtcgtgtctgcgtttagatccctccattatcgcgattgcgtagatggagtactattttataccttgtaattaaatttttttattaattaaacgtataaaaacgttccgtatctgtatttaagagccagatttcgtctaatagaacaaatagctacagtaaaaataactagaataattgctacacccactagaaaccacggatcgtaatacggcaatcggttttcgataataggtggaacgtatattttatttaaggacttaacaattgtctgtaaaccacaatttgcttccgcggatcctgtattaactatctgtaaaagcatatgttgaccgggcggagccgaacattctccgatatctaatttctgtatatctataatattattaacctccgcatacgcattacagttcttttctagcttggataccgcactaggtacatcgtctagatctattcctatttcctcagcgatagctcttctatccttttccggaagcaatgaaatcacttcaataaatgattcaaccatgagtgtgaaactaagtcgagaattactcatgcatttgttagttattcggagcgcgcaatttttaaactgtcctataacctctcctatatgaatagcacaagtgacattagtagggatagaatgttgagctaatttttgtaaataactatctataaaaagattatacaaagttttaaactctttagtttccgccatttatccagtctgagaaaatgtctctcataataaatttttccaagaaactaattgggtgaagaatggaaacctttaatctatatttatcacagtctgttttggtacacatgatgaattcttccaatgccgtactaaattcgatatctttttcgatttctggatatgtttttaataaagtatgaacaaagaaatggaaatcgtaataccagttatgtttaactttgaaattgttttttattttcttgttaatgattccagccacttgggaaaagtcaaagtcgtttaatgccgatttaatacgttcattaaaaacaaactttttatcctttagatgaattattattggttcattggaatcaaaaagtaagatattatcgggtttaagatctgcgtgtaaaaagttgtcgcaacagggtagttcgtagattttaatgtataacagagccatctgtaaaaagataaactttatgtattgtaccaaagatttaaatcctaatttgatagctaactcggtatctactttatctgccgaatacagtgctaggggaaaaattataatgtttcctctttcatattcgtagttagttctcttttcatgttcgaaaaagtgaaacatgcggttaaaatagtttataacattaatattactgttaataactgccggataaaagtgggatagtaatttcacgaatttgatactgtcctttctctcgttaaacgcctttaaaaaaactttagaagaatatctcaatgagagttcctgaccatccatagtttgtatcaataatagcaacatatgaagaacacgtttatacagagtatgtaaaaatgttaatttatagtttaatcccatggcccacgcacacacgattaattttttttcatctccctttagattgttgtatagaaatttgggtactgtgaactccgccgtagtttccatgggactatataattttgtggcctcgaatacaaattttactacatagttatctatcttaaagactataccatatcctcctgtagatatgtgataaaaatcgtcgtttataggataaaatcgtttatccttttgttggaaaaaggatgaattaatgtaatcattctcttctatctttagtagtgtttccttattaaaattcttaaaataatttaacaatctaactgacggagcccaattttggtgtaaatctaattgggacattatattgttaaaatacaaacagtctcctaatataacagtatctgataatctatggggagacatccattgatattcaggggatgaatcattggcaacacccatttattgtacaaaaagccccaatttacaaacgaaagtccaggtttgatagagacaaacaattaactattttgtctctgtttttaacacctccacagtttttaatttctttagtaatgaaattattcacaatatcagtatcttctttatctaccagagattttactaacttgataaccttggctgtctcattcaatagggtagtaatatttgtatgtgtgatattgatatctttttgaattgtttcttttagaagtgattctttgatggtgccagcatacgaattacaataatgcagaaactcggttaacatgcaggaattatagtaagccaattccaattgttgcctgtgttgtattagagtgtcaatatgagcaatggtgtccttgcgtttctctgatagaatgcgagcagcgattttggcgttatcatttgacgatatttctggaatgacgaatcctgtttctactaactttttggtaggacaaagtgaaacaatcaagaagatagcttctcctcctatttgtggaagaaattgaactcctctagatgatctactgacgatagtatctccttgacagatattggaccgaattacagaagtacctggaatgtaaagccctgaaaccccctcattttttaagcagattgttgccgtaaatcctgcactatgcccaagatagagagctcctttggtgaatccatctctatgtttcagtttaaccaagaaacagtcagctggtctaaaatttccatctctatctaatacagcatctaacttgatgtcaggaactatgaccggtttaatgttatatgtaacattgagtaaatccttaagttcataatcatcactgtcatcagttatgtacgatccaaacaatgtttctaccggcatagtggatacgaagatgctatccatcagaatgtttccctgattagtattttctatatagctattcttctttaaacgattttccaaatcagtaactatgttcatttttttaggagtaggacgcctagccagtatggaagaggattttctagatcctctcttcaacatctttgatctcgatggaatgcaaaaccccatagtgaaacaaccaacgataaaaataatattgtttttcactttttataattttaccatctgactcatggattcattaatatctttataagagctactaacgtataattctttataactgaactgagatatatacaccggatctatggtttccataattgagtaaatgaatgctcggcaataactaatggcaaatgtatagaacaacgaaattatactagagttgttaaagttaatattttctatgagctgttccaataaattatttgttgtgactgcgttcaagtcataaatcatcttgatactatccagtaaaccgtttttaagttctggaatattatcatcccattgtaaagcccctaattcgactatcgaatatcctgctctgatagcagtttcaatatcgacggacgtcaatactgtaataaaggtggtagtattgtcatcatcgtgataaactacgggaatatggtcgttagtaggtacggtaactttacacaacgcgatatataactttccttttgtaccatttttaacgtagttgggacgtcctgcagggtattgttttgaagaaatgatatcgagaacagatttgatacgatatttgttggattcctgattattcactataatataatctagacagatagatgattcgataaatagagaaggtatatcgttggtaggataatacatccccattccagtattctcggatactctattgatgacactagttaagaacatgtcttctattctagaaaacgaaaacatcctacatggactcattaaaacttctaacgctcctgattgtgtctcgaatgcctcgtacaaggatttcaaggatgccatagattctttgaccaacgatttagaattgcgtttagcatctgatttttttattaaatcgaatggtcggctctctggtttgctaccccaatgataacaatagtcttgtaaagataaaccgcaagaaaatttatacgcatccatccaaataaccctagcaccatcggatgatattaatgtattattatagattttccatccacaattattgggccagtatactgttagcaacggtatatcgaatagattactcatgtaacctactagaatgatagttcgtgtactagtcataatatctttaatccaatctaaaaaatttaaaattagattttttacactgttaaagttaacaaaagtattacccgggtacgtggatatcatatatggcattggtccattatcagtaatagctccataaactgatacggcgatggtttttatatgtgtttgatctaacgaggaagaaattcgcgcccacaattcatctctagatatgtatttaatatcaaacggtaacacatcaatttcgggacgcgtatatgtttctaaatttttaatccaaatataatgatgacctatatgccctattatcatactgtcaactatagtacacctagggaacttacgatacatctgtttcctataatcgttaaattttacaaatctataacatgctaaaccttttgacgacagccattcattaatttctgatatggaatctgtattctcgataccgtatcgttctaaagccagtgctatatctccctgttcgtgggaacgctttcgtataatatcgatcaacggataatctgaagtttttggagaataatatgactcatgatctatttcgtccataaacaatctagacataggaattggaggcgatgatcttaattttgtgcaatgagtcgtcaatcctataacttctaatcttgtaatattcatcatcgacataatactatctatgttatcatcgtatattagtataccatgaccttcttcatttcgtgccaaaatgatatacagtcttaaatagttacgcaatatctcaatagtttcataattgttagctgttttcatcaaggtttgtatcctgtttaacatgatggcgttctataacgtctctattttctatttttaattttttaaatttttaacgatttactgtggctagatacccaatctctctcaaatatttttttagcctcgcttacaagctgtttatctatactattaaaactgacgaatccgtgattttggtaatgggttccgtcgaaatttgccgaagtgatatgaacatattcgtcgtcgactatcaacaattttgtattattctgaatagtgaaaaccttcacagatagatcattttgaacacacaacgcatctagacttttggcggttgccatagaatatacgtcgttcttatcccaattaccaactagaagtctgatcttaactcctctattaatggctgcttctataatggagttgtaaatgtcgggccaatagtagctattaccgtcgacacgtgtagtgggaactatggccaaatgttcaatatctatactagtcttagctgacctgagtttatcaataactacatcggtatctagatctctagaatatcccaataggtgttccggagaatcagtaaagaacactccacctataggattcttaatatgatacgcagtgctaactggcaaacaacaagccgcagagcataaattcaaccatgaattttttgcgctattaaaggctttaaaagtatcaaatcttctacgaagatctgtggccagcgggggataatcagaatatacacctaacgttttaatcgtatgtatagatcctccagtaaatgacgcgtttcctacataacatctttcatcatctgacacccaaaaacaaccgagtagtagtcccacattattttttttatctatattaacggttataaaatttatatccgggcagtgactttgtagctctcccagatttcttttccctcgttcatctagcaaaactattattttaatccctttttcagatgcctcttttagtttatcaaaaataagcgctcccctagtcgtactcagaggattacaacaaaaagatgctatgtatatatatttcttagctagagtgataatttcgttaaaacattcaaatgttgttaaatgatcggatctaaaatccatattttctggtagtgtttctaccagcctacattttgctcccgcaggtaccgatgcaaatggccacatttagttaacataaaaacttatacatcctgttctatcaacgattctagaatatcatcggctatatcgctaaaattttcatcaaagtcgacatcacaacctaactcagtcaatatattaagaagttccatgatgtcatcttcgtctatttctatatccgtatccattgtagattgttgaccgattatcgagtttaaatcattactaatactcaatccttcagaatacaatctgtgtttcattgtaaatttataggcggtgtatttaagttggtagattttcaattatgtattaatatagcaacagtagttcttgctcctccttgattctagcatcctcttcattattttcttctacgtacataaacatgtccaatacgttagacaacacaccgacgatggcggccgcagatctcgagttatgatctacttccttaccgtgcaataaattagaatatattttctacttttacgagaaattaattattgtatttattatttatgggtgaaaaacttactataaaaagcgggtgggtttggaattagtgaaagcttaaaaattgaaattttattttttttttttggaatataaataagctcgaagtcgacagatctaggcctggtaccaggaggaggaattcagcttaaagatgacttcgaaagtttatgatccagaacaaaggaaacggatgataactggtccgcagtggtgggccagatgtaaacaaatgaatgttcttgattcatttattaattattatgattcagaaaaacatgcagaaaatgctgttatttttttacatggtaacgcggcctcttcttatttatggcgacatgttgtgccacatattgagccagtagcgcggtgtattataccagatcttattggtatgggcaaatcaggcaaatctggtaatggttcttataggttacttgatcattacaaatatcttactgcatggtttgaacttcttaatttaccaaagaagatcatttttgtcggccatgattggggtgcttgtttggcatttcattatagctatgagcatcaagataagatcaaagcaatagttcacgctgaaagtgtagtagatgtgattgaatcatgggatgaatggcctgatattgaagaagatattgcgttgatcaaatctgaagaaggagaaaaaatggttttggagaataacttcttcgtggaaaccatgttgccatcaaaaatcatgagaaagttagaaccagaagaatttgcagcatatcttgaaccattcaaagagaaaggtgaagttcgtcgtccaacattatcatggcctcgtgaaatcccgttagtaaaaggtggtaaacctgacgttgtacaaattgttaggaattataatgcttatctacgtgcaagtgatgatttaccaaaaatgtttattgaatcggatccaggattcttttccaatgctattgttgaaggcgccaagaagtttcctaatactgaatttgtcaaagtaaaaggtcttcatttttcgcaagaagatgcacctgatgaaatgggaaaatatatcaaatcgttcgttgagcgagttctcaaaaatgaacaagcggccgccgccaccatgagcaagggcgaggaactgttcactggcgtggtcccaattctcgtggaactggatggcgatgtgaatgggcacaaattttctgtcagcggagagggtgaaggtgatgccacatacggaaagctcaccctgaaattcatctgcaccactggaaagctccctgtgccatggccaacactggtcactaccttcacctatggcgtgcagtgcttttccagatacccagaccatatgaagcagcatgactttttcaagagcgccatgcccgagggctatgtgcaggagagaaccatctttttcaaagatgacgggaactacaagacccgcgctgaagtcaagttcgaaggtgacaccctggtgaatagaatcgagctgaagggcattgactttaaggaggatggaaacattctcggccacaagctggaatacaactataactcccacaatgtgtacatcatggccgacaagcaaaagaatggcatcaaggtcaacttcaagatcagacacaacattgaggatggatccgtgcagctggccgaccattatcaacagaacactccaatcggcgacggccctgtgctcctcccagacaaccattacctgtccacccagtctgccctgtctaaagatcccaacgaaaagagagaccacatggtcctgctggagtttgtgaccgctgctgggatcacacatggcatggacgagctgtacaagtgagcggccgccctgctagcaagcttgctagcggccgctcgagatctgcggccgctacagacacgaatatgactaaaccgatgaccatttaaaaacccctctctagctttcacttaaactgtatcgatcattcttttagcacatgtataatataaaaacattattctatttcgaatttaggcttccaaaaatttttcatccgtaaaccgataataatatatatagacttgttaatagtcggaataaatagattaatgcttaaactatcatcatctccacgattagagatacaatatttacattctttttgctgtttcgaaactttatcaatacacgttaatacaaacccaggaaggagatattgaaactgaggctgttgaaaatgaaacggtgaatacaataattcagataatgtaaaatcatgattccgtattctgatgatattagaactgctaatggatgtcgatggtatgtatctaggagtatctattttaacaaagcatcgatttgctaatatacaattatccttttgattaattgttattttattcatattcttaaaaggtttcatatttatcaattcttctacattaaaaatttccatttttaatttatgtagccccgcaatactcctcattacgtttcattttttgtctataatatccattttgttcatctcggtacatagattatccaattgagaagcgcatttagtagttttgtacattttaagtttattgacgaatcgtcgaaaactagttatagttaacattttattatttgataccctgatattaatacccctgccgttactattatttataactgatgtaatccacgtaacattggaattaactatcgatagtaatgcatcgacgcttccaaaattgtctattataaactcaccgataatttttttattgcatgttttcatattcattaggattatcaaatctttaatcttattacgattgtatgcgttgatattacaagacgtcattctaaaagacggaggatctccatcaaatgccagacaatcacgtacaaagtacatggaaataggttttgttctattgcgcatcatagatttatatagaacacccgtagaaatactaatttgttttactctataaaatactaatgcatctatttcatcgttttgtataacgtctttccaagtgtcaaattccaaatttttttcattgatagtaccaaattcttctatctctttaactacttgcatagataggtaattacagtgatgcctacatgccgttttttgaaactgaatagatgcgtctagaagcgatgctacgctagtcacaatcaccactttcatatttagaatatatatatgtaaaaatatagtagaatttcattttgtttttttctatgctataaatgaattctcattttgcatctgctcatactccgttttatattaataccaaagaaggaagatatctggttctaaaagccgttaaagtatgcgatgttagaactgtagaatgcgaaggaagtaaagcttcctgcgtactcaaagtagataaaccctcatcgcccgcgtgtgagagaagaccttcgtccccgtccagatgcgagagaatgaataaccctggaaaacaagttccgtttatgaggacggacatgctacaaaatatgttcgcggctaatcgcgataatgtagcttctagacttttgtcctaaaatactattatatccttttcgatattaataaatccgtgtcgtccaggttttttatctctttcagtatgtgaatagataggtattttatctctattcatcatcgaatttaagagatccgataaacattgtttgtattctccagatgtcagcatctgatacaacaatatatgtgcacataaacctctggcacttatttcatgtaccttccccttatcactaaggagaatagtatttgagaaatatgtatacatgatattatcatgaattagatatacagaatttgtaacactctcgaaatcacacgatgtgtcggcgttaagatctaatatatcactcgataacacattttcatctagatacactagacattttttaaagctaaaatagtctttagtagtaacagtaactatgcgattattttcatcgatgatacatttcatcggcatattattacgcttaccatcaaagactataccatgtgtatatctaacgtattctagcatggttgccatacgcgcattaaacttttcaggatctttggatagatcttccaatctatctatttgagaaaacatttttatcatgttcaatagttgaaacgtcggatccactatatagatattatctataaagattttaggaactacgttcatggtatcctggcgaatattaaaactatcaatgatatgattatcgttttcatcttttatcaccatatagtttctaagatatgggattttacttaatataatattatttcccgtgataaattttattagaaaggccaaatctataagaaaagtcctagaattagtctgaagaatatctatatcgccgtatagtatatttggattaattagatatagagaatatgatccgtaacatatacaacttttattatggcgtctaagatattcttccatcaacttattaacatttttgactagggaagatacattatgacgtcccattacttttgccttgtctattactgcgacgttcatagaatttagcatatctcttgccaattcttccattgatgttacattataagaaattttagatgaaattacatttggagctttaatagtaagaactcctaatatgtccgtgtatgtggtcactaatacagattgtagttctataatcgtaaataatttacctatattatatgtttgagtctgtttagaaaagtagctaagtatacgatcttttatttctgatgcagatgtattaacatcggaaaaaaatctttttttattcttttttactaaagatacaaatatgtctttgttaaaaacagttattttctgaatatttctagcttgtaattttaacatatgatattcgttcacactaggtactctgcctaaataggtttctataatctttaatgtaatattaggaaaagtattctgatcaggattcctattcattttgaggatttaaaactctgattattgtctaatatggtctctacgcaaactttttcacagagcgatagagtttttgataactcgtttttcttaagaaatataaaactactgtctccagagctcgctctatcttttattttatctaattcgatacaaactcctgatactggttcagaaagtaattcattaattttcagtcctttatagaagatatttaatatagataatacaaaatcttcagtttttgatatcgatctgattgatcctagaactagatatattaataacgtgctcattaggcagtttatggcagcttgataattagatatagtatattccagttcatatttattagataccgcattgcccagattttgatattctatgaattcctctgaaaataaatccaaaataactagacattctattttttgtggattagtgtactctcttccctctatcatgttcactactggtgtccacgatgataaatatctagagggaatataatatagtccataggatgccaatctagcaatgtcgaataactgtaattttattcttcgctcttcattatgaattgattcttgaggtataaacctaacacaaattatattattagacttttcgtatgtaatgtctttcatgttataagtttttaatcctggaatagaatctattttaatgaggcttttaaacgcagagttctccaacgagtcaaagcataatactctgttgtttttcttatatacgatgttacgattttcttctttgaatggaataggtttttgaattagtttataattacaacataatagataaggaagtgtgcaaatagtacgcggaaaaaacataatagctcccctgttttcatccatggttttaagtaaatgatcactggcttctttagtcaatggatattcgaacattaaccgtttcatcatcattggacagaatccatatttcttaatgtaaagagtgatcaaatcattgtgtttattgtaccatcttgttgtaaatgtgtattcggttatcggatctgctcctttttctattaaagtatcgatgtcaatctcgtctaagaattcaactatatcgacatatttcatttgtatacacataaccattactaacgtagaatgtataggaagagatgtaacgggaacagggtttgttgattcgcaaactattctaatacataattcttctgttaatacgtcttgcacgtaatctattatagatgccaagatatctatataattattttgtaagatgatgttaactatgtgatctatataagtagtgtaataattcatgtattttgatatatgttccaactctgtctttgtgatgtctagtttcgtaatatctatagcatcctcaaaaaatatattcgcatatattcccaagtcttcagttctatcttctaaaaaatcttcaacgtatggaatataataatctattttacctcttctgatatcattaatgatatagtttttgacactatcttctgtcaattgattcttattcactatatctaagaaacggatagcgtccctaggacgaactactgccattaatatctctattatagcttctggacataattcatctattataccagaattaatgggaactattccgtatctatctaacatagttttaagaaagtcagaatctaagacttgatgttcatatattggttcatacatgaaatgatctctattgatgatagtgactatttcattctctgaaaattggtaactcattctatatatgctttccttgttgatgaaggatagaatatactcaatagaatttgtaccaacaaactgttctcttatgaatcgtatatcatcatctgaaataatcatgtaaggcatacatttaacaattagagacttgtctcctgttatcaatatactattcttgtgataatttatgtgtgaggcaaatttgtccacgttctttaattttgttatagtagatatcaaatccaatggagctacagttcttggcttaaacagatatagtttttctggaacaaattctacaacattattataaaggactttgggtagataagtgggatgaaatcctattttaattaatgcgatagccttgtcctcgtgcagatatccaaacgcttttgtgatagtatggcattcattgtctagaaacgctctacgaatatctgtgacagatatcatctttagagaatatactagtcgcgttaatagtactacaatttgtattttttaatctatctcaataaaaaaattaatatgtatgattcaatgtataactaaactactaactgttattgataactagaatcagaatctaatgatgacgtaaccaagaagtttatctactgccaatttagctgcattatttttagcatctcgtttagattttccatcggccttatcgaatactcttccgtcgatgtctacacaggcataaaatgtaggagagttactaggcccaactgattcaatacgaaaagaccaatctctcctagtaatttggcagtactcattaataacggtgacagggttagcatctttccaatcaataatttttttagccggaataacatcatcaaaagacttatgatcctctctcattgatttttcgcgggatacatcatctattatgacgtcagccatagcatcagcatccggcttatccgcctccgttgtcataaaccaacgaggaggaatatcgtcggagctgtacaccatagcactacgttgaagatcgtacagagctttattaacttctcgcttctccatattaagttgtctagttagttgtgcagcagtagctccttcgattccaatgtttttaatagccgcacacacaatctctgcgtcagaacgctcgtcaatatagatcttagacatttttagagagaactaacgcaaccagcaataaaactgaacctactttatcatttttttattcatcatcctctggtggttcgtcgttcctatcaaatgtagctctgattaacccgtcatctataggtgatgctggttctggagattctggaggagatggattattatctggaagaatctctgttatttccttgttttcatgtatcgattgcgttgtaacattaagattgcgaaatgctctaaatttgggaggcttaaagtgttgtttgcaatctctacacgcgtgtctaactagtggaggttcgtcagctgctctagtttgaatcatcatcggcgtagtattcctacttttacagttaggacacggtgtattgtatttctcgtcgagaacgttaaaataatcgttgtaactcacatcctttattttatctatattgtattctactcctttcttaatgcattttataccgaataagagatagcgaaggaattctttttcggtgccgctagtacccttaatcatatcacatagtgttttatattccaaatttgtggcaatagacggtttatttctatacgatagtttgtttctggaatcctttgagtattctataccaatattattctttgattcgaatttagtttcttcgatattagattttgtattacctatattcttgatgtagtactttgatgatttttccatggcccattctattaagtcttccaagttggcatcatccacatattgtgatagtaattctcggatatcagtagcggctaccgccattgatgtttgttcattggatgagtaactactaatgtatacattttccatttataacacttatgtattaactttgttcatttatattttttcattattatgttgatattaacaaaagtgaatatatatatgttaataattgtattgtggttatacggctacaattttataatgagtgaaagtcagtgtccgatgatcaatgacgatagctttactctgaaaagaaagtatcaaatcgatagtgcggagtcaacaataaaaatggataagaagaggataaagtttcagaatagagccaaaatggtaaaagaaataaatcagacaataagagcagcacaaactcattacgagacattgaaactaggatacataaaatttaagagaatgattatgactactactctagaagatatagcaccatctattccaaataatcagaaaacttataaactattctcggacatttcagccatcggcaaagcatcacagaatccgagtaagatggtatatgctctgctgctttacatgtttcccaatttgtttggagatgatcatagattcattcgttatagaatgcatccaatgagtaaaatcaaacacaagatcttctctcctttcaaacttaatcttattagaatattagtggaagaaagattctataataatgaatgcagatctaataaatggagaataattggaacacaagttgataaaatgttgatagctgaatctgataaatatacaatagatgcaaggtataacctaaaacccatgtatagaatcaagggagaatctgaagaagataccctctttatcaaacagatggtagaacaatgtgtgacatcccaggaattggtggaaaaagtgttgaagatactgtttagagatttgttcaagagtggagaatacaaagcgtacagatacgatgatgatgtagaaaatggatttattggattggatacactaaaattaaacattgttcatgatatagttgaaccatgtatgcctgttcgtaggccagtggctaagatactgtgtaaagaaatggtaaataaatactttgagaatccgctacatattattggtaaaaatcttcaagagtgcattgactttgttagtgaataggcatttcatctttctccaatactaattcaaattgttaaattaataatggatagtataaatagttattagttataagatagtaaaaataattattagaataagagtgtagtatcatagataactctcttctataaaaatggattttattcgtagaaagtatcttatatacacagtagaaaataatatagattttttaaaggatgatacattaagtaaagtaaacaattttaccctcaatcatgtactagctctcaagtatctagttagcaattttcctcaacacgttattactaaggatgtattagctaataccaatttttttgttttcatacatatggtacgatgttgtaaagtgtacgaagcggttttacgacacgcatttgatgcacccacgttgtacgttaaagcattgactaagaattatttatcgtttagtaacgcaatacaatcgtacaaggaaaccgtgcataaactaacacaagatgaaaaatttttagaggttgccgaatacatggacgaattaggagaacttataggcgtaaattatgacttagttcttaatccattatttcacggaggggaacccatcaaagatatggaaatcatttttttaaaactgtttaagaaaacagacttcaaagttgttaaaaaattaagtgttataagattacttatttgggcatacctaagcaagaaagatacaggcatagagtttgcggataatgatagacaaaatatatacactctatttcaacaaactggtagaatcgtccatagcaatctaacagaaacgtttagagattatatctttcccggagataagactagctattgggtgtggttaaacgaaagtatagctaatgatgcggatatcgttcttaatagacacgccattaccatgtatgataaaattcttagttatatatactctgagataaaacaaggacgcgttaataaaaacatgcttaagttagtttatatctttgagcctgaaaaagatatcagagaacttctgctagaaatcatatatgatattcctggagatatcctatctattattgatgcaaaaaacgacgattggaaaaaatattttattagtttttataaagctaattttattaacggtaatacatttattagtgatagaacgtttaacgaggacttattcagagttgttgttcaaatagatcccgaatatttcgataatgaacgaattatgtctttattctctacgagtgctgcggacattaaacgatttgatgagttagatattaataacagttatatatctaatataatttatgaggtgaacgatatcacattagatacaatggatgatatgaagaagtgtcaaatctttaacgaggatacgtcgtattatgttaaggaatacaatacatacctgtttttgcacgagtcggatcccatggtcatagagaacggaatactaaagaaactgtcatctataaaatccaagagtagacggctgaacttgtttagcaaaaacattttaaaatattatttagacggacaattggctcgtctaggtcttgtgttagatgattataaaggagacttgttagttaaaatgataaaccatcttaagtctgtggaggatgtatccgcattcgttcgattttctacagataaaaaccctagtattcttccatcgctaatcaaaactattttagctagttataatatttccatcatcgtcttatttcaaaggtttttgagagataatctatatcatgtagaagaattcttggataaaagcatccatctaaccaagacggataagaaatatatacttcaattgataagacacggtagatcatagaacagaccaaatatattattaataatttgtatatacatagatataattatcacacatttttgataaatgggaactgctgcaacaattcagactcccaccaaattaatgaataaagaaaatgcagaaatgattttggaaaaaattgttgatcatatagttatgtatattagtgacgaatcaagtgattcagaaaataatcctgaatatattgattttcgtaacagatacgaagactatagatctctcattataaaaagtgatcacgagtttgtaaagctatgtaaaaatcatgcggagaaaagttctccagaaacgcaacaaatgattatcaaacacatatacgaacaatatcttattccagtatctgaagtactattaaaacctataatgtccatgggtgacataattacatataacggatgtaaagacaatgaatggatgctagaacaactctctaccctaaactttaacaatctccgcacatggaactcatgtagcataggcaatgtaacgcgtctgttttatacattttttagttatctgatgaaagataaactaaatatataagtataatcccattctaatactttaacctgatgtattagcatcttattagaatattaacctaactaaaagacataacataaaaactcattacatagttgataaaaagcggtaggatataaatattatggctgccaccgttccgcgttttgacgacgtgtacaaaaatgcacaaagaagaattctagatcaagaaacattttttagtagaggtctaagtagaccgttaatgaaaaacacatatctatttgataattacgcgtatggatggataccagaaactgcaatttggagtagtagatacgcaaacctagatgctagtgactattatcccatttcgttgggattacttaaaaagttcgagtttctcatgtctctatataaaggtcctattcccgtatatgaagaaaaagtaaatactgaattcatagccaatggatcgttctctggtagatacgtatcatatcttcgaaagttttctgcccttccaacaaacgagtttattagttttttgttactgacttccattccaatctataatatcttgttctggtttaaaaacacacagtttgatattactaaacacacattattcagatacgtctatacagataatgccaaacacctggcgttggctaggtatatgcatcaaacaggagactataagcctttgtttagtcgtctcaaagagaattatatatttaccggtcccgttccaataagtatcaaagatatagatcaccctaatcttagtagagcaagaagtccatccgattatgagacattagctaatattagtactatattgtactttaccaagtatgatccggtattaatgtttttattgttttacgtacctgggtattcaattactacaaaaattactccagccgtagaatatctaatggataaactgaatctaacaaagagcgacgtacaactgttgtaaattattttatgcttcgtaaaatgtaggttttgaaccaaacattctttcaaagaatgagatgcataaaactttattatccaatagattgactatttcggacgtcaatcgtttaaagtaaacttcgtaaaatattctttgatcactgccgagtttaaaacttctatcgataattgtctcatatgttttaatatttacaagttttttggtccatggtacattagccggacaaatatatgcaaaataatatcgttctccaagttctatagtttctggattatttttattatattcagtaactaaatacatattagggttatctgcggatttataatttgagtgatgcattctactcaacataaataattctagaggagacgatctactatcaaattcggatcgtaaatctgtttctaaagaacggagaatatctatacatacctgattagaattcatccgtccttcagacaacatctcagacagtctggttttgtacatcttaatcatattcttatgaaacttggaaacatctcttctagtttcactagtacctttattaattctctcaggtacagattttgaattcgacgatgctgagtatttcatcgttgtatatttcttcttcgattgcataatcagattcttatataccgcctcaaactctattttaaaattattaaacaatactctattattaatcagtcgttctaactctttcgctatttctatagacttatctacatcttgactgtctatctctgtaaacacggagtcggtatctccatacacgctacgaaaacgaaatctgtaatctataggcaacgatgttttcacaatcggattaatatctctatcgtccatataaaatggattacttaatggattggcaaaccgtaacataccgttagataactctgctccatttagtaccgattctagatacaagatcattctacgtcctatggatgtgcaactcttagccgaagcgtatgagtatagagcactatttctaaatcccatcagaccatatactgagttggctactatcttgtacgtatattgcatggaatcatagatggccttttcagttgaactggtagcctgttttagcatctttttatatctggctctctctgccaaaaatgttcttaatagtctaggaatggttccttctatcgatctatcgaaaattgctatttcagagatgaggttcggtagtctaggttcacaatgaaccgtaatatatctaggaggtggatatttctgaagcaatagctgattatttatttcttcttccaatctattggtactaacaacgacaccgactaatgtttccggagatagatttccaaagatacacacattaggatacagactgttataatcaaagattaatacattattactaaacattttttgttttggagcaaataccttaccgccttcataaggaaacttttgttttgtttctgatctaactaagatagttttagtttccaacaatagctttaacagtggacccttgatgactgtactcgctctatattcgaataccatggattgaggaagcacatatgttgacgcacccgcgtctgtttttgtttctactccataatactcccacaaatactgacacaaacaagcatcatgaatacagtatctagccatatctaaagctatgtttagattataatccttatacatctgagctaaatcaacgtcatcctttccgaaagataatttatatgtatcattaggtaaagtaggacataatagtacgactttaaatccattttcccaaatatctttacgaattactttacatataatatcctcatcaacagtcacataattacctgtggttaaaacctttgcaaatgcagcggctttgcctttcgcgtctgtagtatcgtcaccgatgaacgtcatttctctaactcctctatttaatactttacccatgcaactgaacgcgttcttggatatagaatccaatttgtacgaatccaatttttcaaatttttgaatgaatgaatatagatcgaaaaatatagttccattattgttattaacgtgaaacgtagtattggccatgccgcctactcccttatgactagactgatttctctcataaatacagagatgtacagcttcctttttgtccggagatctaaagataattttctctcctgttaataactctagacgattagtaatatatctcagatcaaagttatgtccgttaaaggtaacgacgtagtcgaacgttagttccaacaattgtttagctattcgtaacaaaactatttcagaacatagaactagttctcgttcgtaatccatttccattagtgactgtatcctcaaacatcctctatcgacggcttcttgtatttcctgttccgttaacatctcttcattaatgagcgtaaacaataatcgtttaccacttaaatcgatataacagtaacttgtatgcgagattgggttaataaatacagaaggaaacttcttatcgaagtgacactctatatctagaaataagtacgatcttgggatatcgaatctaggtatttttttagcgaaacagttacgtggatcgtcacaatgataacatccattgttaatctttgtcaaatattgctcgtccaacgagtaacatccgtctggagatatcccgttagaaatataaaaccaactaatattgagaaattcatccatggtggcattttgtatgctgcgtttctttggctcttctatcaaccacatatctgcgacggagcattttctatctttaatatctagattataacttattgtctcgtcaatgtctatagttctcatctttcccaacggcctcgcattaaatggaggaggagacaatgactgatatatttcgtccgtcactacgtaataaaagtaatgaggaaatcgtataaatacggtctcgccatttcgacatctggatttcagatataaaaatctgttttcaccgtgactttcaaaccaattaatgcaccgaacatccatttatagaatttagaaatatattttcatttaaatgaatcccaaacattggggaagagccgtatggaccattatttttatagtactttcgcaagcgggtttagacggcaacatagaagcgtgtaaacgaaaactatatactatagttagcactcttccatgtcctgcatgtagacggcacgcgactatcgctatagaggacaataatgtcatgtctagcgatgatctgaattatatttattattttttcatcagattatttaacaatttggcatctgatcccaaatacgcgatcgatgtgacaaaggttaaccctttataaacttaacccattataaaacttatgattagtcacaactgaaataaccgcgtgattattttttggtataattctacacggcatggtttctgtgactatgaattcaacccccgttacattagtgaaatctttaacaaacagcaagggttcgtcaaagacataaaactcattgtttacaatcgaaatagaccccctatcacacttaaaataaaaaatatccttatcctttaccaccaaataaaattctgattggtcaatgtgaatgtattcacttaacagttccacaaatttatttattaactccgaggcacatacatcgtcggtattttttatggcaaactttactcttccagcatccgtttctaaaaaaatattaacgagttccatttatatcatccaatattattgaaatgacgttgatggacagatgatacaaataagaaggtacggtacctttgtccaccatctcctccaattcatgctctattttgtcattaactttaatgtatgaaaacagtacgccacatgcttccatgacagtgtgtaacactttggatacaaaatgtttgacattagtataattgtccaagactgtcaatctataatagatagtagctataatatattctatgatggtattgaagaagatgacaaccttggcatattgatcatttaacacagacatggtatcaacagatagcttgaatgaaagagaatcagtaattggaataagcgtcttctcgatagagtgtccgtataccaacatgtctgatattttgatgtattccattaaattatttagttttttctttttattctcgttaaacagcatttctgtcaacggaccccaacatcgttgaccgattaagttttgattgatttttccgtgtaaggcgtatctagtcagatcgtatagcctatccaataatccatcgtctgtgtgtagatcacatcgtacactttttaattctctatagaagagcgacagacatctggagcaattacagacagcaatttctttattctctacagatgtaagatacttgaagacattcctatgatgatgcagaattttggataacacggtattgatggtatctgttaccataattcctttgatggctgatagtgtcagagcacaagatttccaatctttgacaatttttagcaccattatctttgttttgatatctatatcagacagcatggtgcgtctgacaacacagggattaagacggaaagatgaaatgattctctcaacatcttcaatagataccttgctattttttctggcattatctatatgtgcgagaatatcctctagagaatcagtatcctttttgatgatagtggatctcaatgacatgggacgtttaaaccttcttattctatcaccagattgcatggtgatttgtcttctttcttttatcataatgtaatctctaaattcatcggcaaattgtctatatctaaaatcataatatgagatgtttacctctacaaatatctgttcgtccaatgttagagtatttacatcagttttgtattccaaattaaacatggcaacggatttaattttatattcctctattaagtcctcgtcgataataacagaatgtagataatcatttaatccgtcgtacatggttggaagatgcttgttgacaaaatctttaattgtcttgatgaaggtgggactatatctaacatcttgattaataaaatttataacattgtccataggatactttgtaactagttttatacacatctcttcatcggtaagtttagacagaatatcgtgaacaggtggtatattatattcatcagatatacgaagaacaatgtccaaatctatattgtttaatatattatatagatgtagcgtagctcctacaggaatatctttaactaagtcaatgatttcatcaaccgttagatctattttaaagttaatcatataggcattgatttttaaaaggtatgtagccttgactacattctcattaattaaccattccaagtcattgtgtgtaagaagattatattctatcataagcttgactacatttggtcccgataccattaaagaattcttatgatataaggaaacagattttaggtactcatctactctacaagaattttggagagccttaacgatatcagtgacgtttattatttcaggaggaaagaatctaacattgagaatatcggaattaatagcttccagatacagtgattttggcaatagtccgtgtaatccataatccagtaacacgagctggtgcttgctagacaccttttcaatgtttaatttttttgaaataagctttgataaagccttcctcgcaaattccggatacatgaacatgtcggcgacatgattaagtattgttttttcattatttttatattttctcaacaagttctcaataccccaatagatgatagaatatcacccaatgcgtccatgttgtctatttccaacaggtcgctatatccaccaatagaagtttttccaaaaaagattctaggaacagttctaccaccagtaatttgttcaaaataatcccgcaattcattttcgggtttaaattctttaatatcgacaatttcatacgctcctcttttgaaactaaacttatttagaatatccagtgcatttctacaaaaaggacatgtatacttgacaaaaattgtcactttgttattggccaacctttgttgtacaaattcctcggccattttaatatttaagtgatataaaactatctcgacttatttaactctttagtcgagatatatggacgcagatagctatatgatagccaactacagaaggcaaacgctataaaaaacataattacgacgagcatatttataaatatttttattcagcattacttgatatagtaatattaggcacagtcaaacattcaaccactctcgatacattaactctctcattttctttaacaaattctgcaatatcttcgtaaaaagattcttgaaactttttagaatatctatcgactctagatgaaatagcgttcgtcaacatactatgttttgtatacataaaggcgcccattttaacagtttctagtgacaaaatgctagcgatcctaggatcctttagaatcacatagattgacgattcgtctctcttagtaactctagtaaaataatcatacaatctagtacgcgaaataatattatccttgacttgaggagatctaaacaatctagttttgagaacatcgataagttcatcgggaatgacatacatactatctttaatagaactcttttcatccagttgaatggattcgtccttaaccaactgattaatgagatcttctattttatcattttccagatgatatgtatgtccattaaagttaaattgtgtagcgcttctttttagtctagcagccaatactttaacatcactaatatcgatatacaaaggagatgatttatctatggcattaagaattcgtttttcgacatccgtcaaaaccaattcctttttgcctgtatcatccagttttccatcctttgtaaagaaattattttctactagactattaataagactgataaggattcctccataattgcacaatccaaactttttaacaaaactagactttacgagatctacaggaatgcgtacttcaggttttttagcttgtgattttttcttttgcggacattttctagtaaccaactcatctaccatttcattgattttagcagtgaaataagctttcaatgcacgggcactgatactattgaaaacgagttgatcttcaaattccgccatttaagttcaccaaacaacttttaaatacaaatatatcaatagtagtagaataagaactataaaaaaaataataattaaccaaccccaacaaccggtattattagttgatgtggtagttttctcatcacttagaacagatttaacaatttctataaagtctgtcaaatcatcttccggagaccccataaatacaccaaatatagcggcgtacaacttatccatttatacattgaatattggcttttctttatcgctatcttcatcatattcatcatcaatatcaacaagtcccagattacgagccagatcttcttctacattttcagtcattgatacacgttcactatctccagagagtccgataacgttagccaccacttctctatcaatgattagtttcttgagcgcgaaagtaatttttgtttccgttccggatctatagaagacgataggtgtgataattgccttggccaattgtctttctcttttactgagtgattctagttcaccttctatagatctgagaatggatgattctccagtcgaaacatattctaccatggatccgtttaatttgttgatgaagatggattcatccttaaatgttttctctgtaatagtttccaccgaaagactatgcaaagaatttggaatgcgttccttgtgcttaatgtttccatagacggcttctagaagttgatacaacataggactagccgcggtaacttttatttttagaaagtatccatcgcttctatcttgtttagatttatttttataaagtttagtctctccttccaacataataaaagtggaagtcatttgactagataaactatcagtaagttttatagagatagacgaacaattagcgtattgagaagcatttagtgtaacgtattcgatacattttgcattagatttactaatcgattttgcatactctataacacccgcacaagtctgtagagaatcgctagatgcagtaggtcttggtgaagtttcaactctcttcttgattaccttactcatgattaaacctaaataattgtactttgtaatataatgatatatattttcactttatctcatttgagaataaaaatgtttttgtttaaccactgcatgatgtacagatttcggaatcgcaaaccaccagtggttttattttatccttgtccaatgtgaattgaatgggagcggatgcgggtttcgtacgtagatagtacattcccgtttttagaccgagactccatccgtaaaaatgcatactcgttagtttggaataactcggatctgctatatggatattcatagattgactttgatcgatgaaggctcccctgtctgcagccatttttatgatcgtcttttgtggaatttcccaaatagttttataaactcgcttaatatcttctggaaggtttgtattctgaatggatccaccatctgccataatcctattcttgatctcatcattccataattttctctcggttaaaactctaaggagatgcggattaactacttgaaattctccagacaatactctccgagtgtaaatattactggtatacggttccaccgactcattatttcccaaaatttgagcagttgatgcagtcggcataggtgccaccaataaactatttctaagaccgtatgttctgattttatcttttagaggttcccaattccaaagatccgacggtacaacattccaaagatcatattgtagaataccgttactggcgtacgatcctacatatgtatcgtatggtccttccttctcagctagttcacaactcgcctctaatgcaccgtaataaatggtttcgaagatcttcttatttagatcttgtgcttccaggctatcaaatggataatttaagagaataaacgcgtccgctaatccttgaacaccaataccgataggtctatgtctcttattagagatttcagcttctggaataggataataattaatatctataattttattgagatttctgacaattactttgaccacatccttcagtttgagaaaatcaaatcgcccatctattacaaacatgttcaaggcaacagatgccagattacaaacggctacctcattagcatccgcatattgtattatctcagtgcaaagattactacacttgatagttcctaaattttgttgattactctttttgttacacgcatccttataaagaatgaatggagtaccagtttcaatctgagattctataatcgctttccagacgactcgagcctttattatagatttgtatctcctttctctttcgtatagtgtatacaatcgttcgaactcgtctccccaaacattgtccaatccaggacattcatccggacacatcaacgaccactctccgtcatccttcactcgtttcataaagagatcaggaatccaaagagctataaatagatctctggttctatgttcctcgtttcctgtattctttttaagatcgaggaacgccataatatcagaatgccacggttccaagtatatggccataactccaggccgtttgtttcctccctgatctatgtatctagcggtgttattataaactctcaacattggaataataccgtttgatataccattggtaccggagatatagcttccactggcacgaatattactaattgatagacctattccccctgccattttagagattaatgcgcatcgttttaacgtgtcatagataccctctatgctatcatcgatcatgttaagtagaaaacagctagacatttggtgacgactagttcccgcattaaataaggtaggagaagcgtgcgtaaaccatttttcagaaagtagattgtacgtctcaatagctgagtctatatcccattgatgaattcctactgcgacacgcattaacatgtgctgaggtctttcaacgatcttgttgtttattttcaacaagtaggatttttccaaagttttaaaaccaaaatagttgtatgaaaagtctcgttcgtaaataataaccgagttgagtttatccttatatttgttaactatatccatggtgatacttgaaataatcggagaatgtttcccatttttaggattaacatagttgaataaatcctccatcacttcactaaatagtttttttgtttccttgtgtagatttgatacggctattctggcggctagaatggcataatccggatgttgtgtagtacaagtggctgctatttcggctgccagagtgtccaattctaccgttgttactccattatatattccttgaataaccttcatagctattttaataggatctatatgatccgtgtttaagccataacataattttctaatacgagacgtgattttatcaaacatgacattttccttgtatccatttcgtttaatgacaaacatttttgttggtgtaataaaaaaattatttaacttttcattaatagggatttgacgtatgtagcgtacaaaatgattgttcctggtatatagataaagagtcctatatatttgaaaatcgttacggctcgattaaactttaatgattgcatagtgaatatatcattaggatttaactccttgactatcatggcggcgccagaaattaccatcaaaagcattaatacagttataccgatcgcagttagaacggttatagcatccaccatttatatctaaaaattagatcaaagaatatgtgacaaagtcctagttgtatactgagaattgacgaaacaatgtttcttacatatttttttcttattagtaaccgacttaatagtaggaactggaaaactagacttgattattctataagtatagatacccttccaaataatattctctttgataaaagttccagaaaatgtagaattttttaaaaagttatcttttgctattaccaagattgtgtttagacgcttattattaatatgagtgatgaaatccacaccgcctctagatatcgcctttatttccacattagatggtaaatccaatagtgaaactatctttttaggaatgtatggactcgcgtttagaggagtaaacgtcttaggcgtcggaaaggatgattcatcaaacgaataaacaatttcacaaatggatgttaatgtattagtaggaaattttttgacgctattggaattgaagattctaatggatgatgttctacctatttcatccgataacatgttaatttccgacaccaacggttttaatatttcgatgatatacggtagtctctctttcggacttatatagcttattccacaatacgagtcattatatactccaaaaaacaaaataactagtataaaatctgtatcgaatgggaaaaacgaaattatcgacataggtatagaatccggaacattgaacgtattaatacttaattctttttctgtggtaagtaccgataggttattgacattgtatggttttaaatattctataacttgagacttgatagatattagtgatgaattgaaaattatttttatcaccacgtgtgtttcaggatcatcgtcgacgcccgtcaaccaaccgaacggagtaaaataaatatcattaatatatgctctagatattagtatttttatcaatcctttgattatcatcttctcgtaggcgaatgattccatgatcaagagtgatttaagaacatcctccggagtattaatgggcttagtaaacagtccatcgttgcaataataaaagttatccaagttaaaggatattatgcattcgtttaaagatatcacctcatctgacggagacaattttttggtaggttttagagactttgaagctacttgtttaacaaagttattcatcgtcgtctactattctatttaattttgtagttaatttatcacatatcacattaattgactttttggtccacttttccatacgtttatattcttttaatcctgcgttatccgtttccgttatatccagggatagatcttgcaagttaaatagaatgctcttaaataatgtcattttcttatccgctaaaaatttaaagaatgtataaacctttttcagagatttgaaactcttaggtggtgtcctagtacacaatatcataaacaaactaataaacattccacattcagattccaacagctgattaacttccacattaatacagcctattttcgctccaaatgtacattcgaaaaatctgaataaaacatcgatgtcacaatttgtattatccaatacagaatgtttgtgattcgtgttaaaaccatcggagaaggaatagaaataaaaattattatagtggtggaattcagttggaatattgcctccggagtcataaaaggatactaaacattgttttttatcataaattacacatttccaatgagacaaataacaaaatccaaacattacaaatctagaggtagaacttttaattttgtctttaagtatatacgataagatatgtttattcataaacgcgtcaaatttttcatgaatcgctaaggagtttaagaatctcatgtcaaattgtcctatataatccacttcggatccataagcaaactgagagactaagttcttaatacttcgattgctcatccaggctcctctctcaggctctattttcatcttgacgacctttggattttcaccagtatgtattcctttacgtgataaatcatcgattttcaaatccatttgtgagaagtctatcgccttagatactttttcccgtagtcgaggtttaaaaaaatacgctaacggtatactagtaggtaactcaaagacatcatatatagaatggtaacgcgtctttaactcgtcggttaactctttcttttgatcgagttcgtcgctactattgggtctgctcaggtgccccgactctactagttccaacatcataccgataggaatacaagacactttgccggcggttgtagatttatcatatttttccactacatatccgttacaatttgttaaaaatttagatacatctatattgctacataatccagctagtgaatatatatgacataataaattggtaaatcctagttctggtattttactaattactaaatctgtatatctttccatttatcatggaaaagaatttaccagatatcttcttttttccaaactgcgttaatgtattctcttacaaatattcacaagatgaattcagtaatatgagtaaaacggaacgtgatagtttctcattggccgtgtttccagttataaaacatagatggcataacgcacacgttgtaaaacataaaggaatatacaaagttagtacagaagcacgtggaaaaaaagtatctcctccatcactaggaaaacccgcacacataaacctaaccgcgaagcaatatatatacagtgaacacacaataagctttgaatgttatagttttctaaaatgtataacaaatacagaaatcaattcgttcgatgagtatatattaagaggactattagaagctggtaatagtttacagatattttccaattccgtaggtaaacgaacagatactataggtgtactagggaataagtatccatttagcaaaattccattggcctcattaactcctaaagcacaacgagagatattttcagcgtggatttctcatagacctgtagttttaactggaggaactggagtgggtaagacgtcacaggtacccaagttattgctttggtttaattatttatttggtggattctctactctagataaaatcactgactttcacgaaagaccagtcattctatctcttcctaggatagctttagttagattgcatagcaataccattttaaaatcattgggatttaaggtactagatggatctcctatttctttacggtacggatctataccggaagaattaataaacaaacaaccaaaaaaatatggaattgtattttctacccataagttatctctaacaaaactatttagttatggcactcttattatagacgaagttcatgagcatgatcaaataggagatattattatagcagtagcgagaaagcatcatacgaaaatagattctatgtttttaatgactgccacgttagaggatgacagggaacggctaaaagtatttttacctaatcccgcatttatacatattcctggagatacactgtttaaaattagcgaggtatttattcataataagataaatccatcttccagaatggcatacatagaagaagaaaagagaaatttagttactgctatacagatgtatactcctcctgatggatcatccggtatagtctttgtggcatccgttgcacagtgtcacgaatataaatcatatttagaaaaaagattaccgtatgatatgtatattattcatggtaaggtcttagatatagacgaaatattagaaaaagtgtattcatcacctaatgtatcgataattatttctactccttatttggaatccagcgttactatacgcaatgttacacacatttatgatatgggtagagtttttgtccccgctccttttggaggatcgcaacaatttatttctaaatctatgagagatcaacgaaaaggaagagtaggaagagttaatcctggtacatacgtctatttctatgatctgtcttatatgaagtctatacagcgaatagattcagaatttctacataattatatattgtacgctaataagtttaatctaacactccccgaagatttgtttataatccctacaaatttggatattctatggcgtacaaaggaatatatagactcgttcgatattagtacagaaacatggaataaattattatccaattattatatgaagatgatagagtatgctaaactttatgtactaagtcctattctcgctgaggagttggataactttgagaggacgggagaattaactagtattgtacgagaagccattttatctctaaatttacaaattaagattttaaattttaaacataaagatgatgatacgtatatacacttttgtaaaatattattcggtgtctataacggaacaaacgctactatatattatcatagacctctaacgggatatatgaatatgatttcagatactatatttgttcctgtagataataactaaaaatcaaactctaatgaccacatctttttttagagatgaaaaattttccacatctccttttgtagacacgactaaacattttgcagaaaaaagtttattagtgtttagataatcgtatacttcatcagtgtagatagtaaatgtgaacagataaaaggtattcttgctcaatagattggtaaattccatagaatatattaatcctttcttcttgagatcccacatcatttcaaccagagacgttttatccaatgatttacctcgtactataccacatacaaaactagattttgcagtgacgtcgtacctggtattcctaccaaacaaaattttacttttagttcttttagaaaattctaaggtagaatctctatttgccaatatgtcatctatggaattaccactagcaaaaaatgatagaaatatatattgatacatcgcagctggttttgatctactatactttaaaaacgaatcagattccataattgcctgtatatcatcagctgaaaaactatgttttacacgtattccttcggcatttctttttaatgatatatcttgtttagacaatgataaagttatcatgtccatgagagacgcgtctccgtatcgtataaatatttcattagatgttagacgcttcattaggggtatacttctataaggtttcttaatcagtccatcattggttgcgtcaagaactactatcggatgttgttgggtatctctagtgttacacatggccttactaaagtttgggtaaataactatgatatctctattaattatagatgcatatatttcattcgtcaaggatattagtatcgacttgctatcgtcattaatacgtgtaatgtaatcatataaatcatgcgatagccaaggaaaatttaaatagatgttcatcatataatcgtcgctataattcatattaatacgttgacattgactaatttgtaatatagcctcgccacgaagaaagctctcgtattcagtttcatcgataaaggataccgttaaatataactggttgccgatagtctcatagtctattaagtggtaagtttcgtacaaatacagaatccctaaaatattatctaatgttggattaatctttaccataactgtataaaatggagacggagtcataactattttaccgtttgtacttactggaatagatgaaggaataatctccggacatgctggtaaagacccaaatgtctgtttgaagaaatccaatgttccaggtcctaatctcttaacaaaaattacgatattcgatcccgatatcctttgcattctatttaccagcatatcacgaactatattaagattatctatcatgtctattctcccaccgttatataaatcgcctccgctaagaaacgttagtatatccatacaatggaatacttcatttctaaaatagtattcgttttctaattctttaatgtgaaatcgtatactagaaagggaaaaattatctttgagttttccgttagaaaagaaccacgaaactaatgttctgattgcgtccgattccgttgctgaattaatggatttacaccaaaaactcatataacttctagatgtagaagcattcgctaaaaaattagtagaatcaaaggatataagtagatgttccaacaagtgagcaattcccaagatttcatctatatcattctcgaatccgaaattagaaattcccaagtagatatcctttttcatccgatcgttgatgaaaatacgaactttattcggtaagacaatcatttactaaggagtaaaataggaagtaatgttcgtatgtcgttatcatcgtataaattaaaggtgtgttttttaccattaagtgacattataattttaccaatattggaattataatataggtgtatttgcgcactcgcgacggttgatgcatcggtaaatatagctgtatctaatgttctagtcggtatttcatcatttcgctgtctaataatagcgttttctctatctgtttccattacagctgcctgaagtttattggtcggataatatgtaaaataataagaaatacatacgaataacaaaaataaaataagatataataaagatgccatttagagatctaattttgtttaacttgtccaaattcctacttacagaagatgaggaatcgttggagatagtgtcttccttatgtagaggatttgaaatatcttataatgacttgataacttactttccagataggaaataccataaatatatttataaagtatttgaacatgtagatttatcggaggaattaagtatggaattccatgatacaactctgagagatttagtctatcttagattgtacaagtattccaagtgtatacggccgtgttataaattaggagataatctaaaaggcatagttgttataaaggacaggaatatttatattagggaagcaaatgatgacttgatagaatatctcctcaaggaatacactcctcagatttatacatattctaatgagcgcgtccccataactggttcaaaattaattctttgtggattttctcaagttacatttatggcgtatacaacgtcgcatataacaacaaataaaaaggtagatgttctcgtttccaaaaaatgtatagatgaactagtcgatccaataaattatcaaatacttcaaaatttatttgataaaggaagcggaacaataaacaaaatactcaggaagatattttattcggtaacaggtggccaaactccataggtagctttttctatttcggattttagaatttccaaattcaccagcgatttatcggttttggtgaaatccaaggatttattaatgtccacaaatgccatttgttttgtctgtggattgtatttgaaaatggaaacgatgtagttagatagatgcgctgcgaagtttcctattagggttccgcgcttcacgtcacccagcatacttgaatcaccatcctttaaaaaaaatgataagatatcaacatggagtatatcatactcgaattttaattcttctactgactcactgacattttcacaaatactacaatacggtttaccgaaaataatcagtacgttcttcatttatgggtatcaaaaacttaaaatcgttactgctggaaaataaatcactgacgatattagatgataatttatacaaagtatacaatggaatatttgtggatacaatgagtatttatatagccgtcgccaattgtgtcagaaacttagaagagttaactacggtattcataaaatacgtaaacggatgggtaaaaaagggagggcatgtaaccctttttatcgatagaggaagtataaaaattaaacaagacgttagagacaagagacgtaaatattctaaattaaccaaggacagaaaaatgttagaattagaaaagtgtacatccgaaatacaaaatgttaccggatttatggaagaagaaataaaggcagaaatgcaattaaaaatcgataaactcacatttcaaatatatttatctgattctgataacataaaaatatcattgaatgagatactaacacatttcaacaataatgagaatgttacattattttattgtgatgaacgagacgcagaattcgttatgtgtctcgaggctaaaacacatttctctaccacaggagaatggccgttgataataagtaccgatcaggatactatgctatttgcatctgctgataatcatcctaagatgataaaaaacttaactcaactgtttaaatttgttccctcggcagaggataactatttagcaaaattaacggcgttagtgaatggatgtgatttctttcctggactctatggggcatctataacacccaccaacttaaacaaaatacaattgtttagtgattttacaatcgataatatagtcactagtttggcaattaaaaattattatagaaagactaactctaccgtagacgtgcgtaatattgttacgtttataaacgattacgctaatttagacgatgtctactcgtatattcctccttgtcaatgcactgttcaagaatttatattttccgcattagatgaaaaatggaatgaatttaaatcatcttatttagaaagcgtgccgttaccctgccaattaatgtacgcgttagaaccacgcaaggagattgatgtttcagaagttaaaactttatcatcttatatagatttcgaaaatactaaatcagatatcgatgttataaaatctatatcctcgatcttcggatattctaacgaaaactgtaacacgatagtattcggcatctataaggataatttactactgagtataaataattcattttactttaacgatagtctgttaataaccaatactaaaagtgataatataataaatataggttactagattaaaaatggtgttccaactcgtgtgctctacatgcggtaaagatatttctcacgaacgatataaattgattatacgaaaaaaatcattaaaggatgtactcgtcagtgtaaagaacgaatgttgtaggttaaaattatctacacaaatagaacctcaacgtaacttaacagtgcaacctctattggatataaactaatatggatccggttaattttatcaagacatatgcgcctagaggttctattatttttattaattataccatgtcattaacaagtcatttgaatccatcgatagaaaaacatgtgggtatttattatggtacgttattatcggaacacttggtagttgaatctacctatagaaaaggagttcgaatagtcccattggatagtttttttgaaggatatcttagtgcaaaagtatacatgttagagaatattcaagttatgaaaatagcagctgatacgtcattaactttattgggtattccgtatggatttggtcatgatagaatgtattgttttaaattggtagctgactgttataaaaatgccggtattgatacatcgtctaaacgaatattgggcaaagatatttttctgagccaaaacttcacagacgataatagatggataaagatatatgattctaataatttaacattttggcaaattgattaccttaaagggtgagttaatatgcataactactcctccgttgttttttccctcgttctttttcttaacgttgtttgccatcactctcataatgtaaagatattctaaaatggtaaacttttgcatatcggacgcagaaattggtataaatgttgtaattgtattatttcccgtcaatggactagtcacagctccatcagttttatatcctttagagtatttctcactcgtgtctaacattctagagcattccatgatctgtttatcgttgatattggccggaaagatagattttttattttttattatattactattggcaattgtagatataacttctggtaaatatttttctaccttttcaatctcttctattttcaagccggctatatattctgctatattgttgctagtatcaataccttttctggctaagaagtcatatgtggtattcactatatcagttttaactggtagttccattagcctttccacttctgcagaataatcagaaattggttctttaccagaaaatccagctactataataggctcaccgatgatcattggcaaaatcctatattgtaccagattaatgagagcatatttcatttccaataattctgctagttcttgagacattgatttatttgatgaatctagttggttctctagatactctaccatttctgccgcatacaataacttgttagataaaatcagggttatcaaagtgtttagcgtggctagaatagtgggcttgcatgtattaaagaatgcggtagtatgagtaaaccgttttaacgaattatatagtctccagaaatctgtggcgttacatacatgagccgaatgacatcgaagattgtccaatatttttaatagctgctctttgtccattatttctatatttgactcgcaacaattgtagataccattaatcaccgattcctttttcgatgccggacaatagcacaattgtttagctttggactctatgtattcagaattaatagatatatctctcaatacagattgcactatacattttgaaactatgtcaaaaattgtagaacgacgctgttctgcagccatttaactttaaataatttacaaaaatttaaaatgagcatccgtataaaaatcgataaactgcgccaaattgtggcatatttttcagagttcagtgaagaagtgtctataaatgtagactcgacggatgagttaatgtatatttttgccgccttgggcggatctgtaaacatttgggcaattatacctctaagtgcatcagtgttttaccgaggagccgaaaatattgtgtttaatcttcctgtgtccaaggtaaaatcgtgtttgtgtagttttcacaatgatgccatcatagatatagaacctgatctggaaaataatctagtaaaactttctagttatcatgtagtaagtgtcgattgtaacaaggaactgatgcctattaggacagatactactatttgtctaagtatagatcaaaagaaatcttacgtgtttaattttcacaagtatgaagaaaaatgttgtggtagaaccgtcattcatctagaatggttgttgggctttatcaagtgtattagtcagcatcagcatctggctattatgtttaaagatgacaatattattatgaagactcctggtaatactgatgcgttttccagggaatattctatgactgaatgttctcaagaactacaaaagttttctttcaaaatagctatctcgtctctcaacaaactacgaggattcaaaaagagagtcaatgtttttgaaactagaatcgtaatggataatgacgataacattttaggaatgttgttttcggatagagttcaatcctttaagatcaacatctttatggcgtttttagattaatactttcaatgagataaatatgggtggcggagtaagtgttgagctccctaaacgggatccgcctccgggagtacccactgatgagatgttattaaacgtggataaaatgcatgacgtgatagctcccgctaagcttttagaatatgtgcatataggaccactagcaaaagataaagaggataaagtaaagaaaagatatccagagtttagattagtcaacacaggacccggtggtctttcggcattgttaagacaatcgtataatggaaccgcacccaattgctgtcgcacttttaatcgtactcattattggaagaaggatggaaagatatcagataagtatgaagagggtgcagtattagaatcgtgttggccagacgttcacgacactggaaaatgcgatgttgatttattcgactggtgtcagggggatacgttcgatagaaacatatgccatcagtggatcggttcagcctttaataggagtaatagaactgtagagggtcaacaatcgttaataaatctgtataataagatgcaaacattatgtagtaaagatgctagtgtaccaatatgcgaatcatttttgcattatttacgcgcacacaatacagaagatagcaaagagatgatcgattatattctaagacaacagtctgcggactttaaacagaaatatatgagatgtagttatcccactagagataagttagaagagtcattaaaatatgcggaacctcgagaatgttgggatccagagtgttcgaatgccaatgttaatttcttactaacacgtaattataataatttaggactttgcaatattgtacgatgtaataccagcgtgaacaacttacagatggataaaacttcctcattaagattgtcatgtggattaagcaatagtgatagattttctactgttcccgtcaatagagcaaaagtagttcaacataatattaaacactcgttcgacctaaaattgcatttgatcagtttattatctctcttggtaatatggatactaattgtagctatttaaatgggtgccgcggcaagcatacagacgacggtgaatacactcagcgaacgtatctcgtctaaattagaacaagaagcgaacgctagtgctcaaacaaaatgtgatatagaaatcggaaatttttatatccgacaaaaccatggatgtaacctcactgttaaaaatatgtgctctgcggacgcggatgctcagttggatgctgtgttatcagccgctacagaaacatatagtggattaacaccggaacaaaaagcatacgtgccagctatgtttactgctgcgttaaacattcagacgagtgtaaacactgttgttagagattttgaaaattatgtgaaacagacttgtaattctagcgcggtcgtcgataacaaattaaagatacaaaacgtaatcatagatgaatgttacggagccccaggatctccaacaaatttggaatttattaatacaggatctagcaaaggaaattgtgccattaaagcgttgatgcaattgacgactaaggccactactcaaatagcacctagacaagttgctggtacaggagttcagttttatatgattgttatcggtgttataatattggcagcgttgtttatgtactatgccaagcgtatgttgttcacatccaccaatgataaaatcaaacttattttagccaataaggaaaacgtccattggactacttacatggacacattctttagaacttctccgatggttattgctaccacggatatgcaaaactgaaaatatattgataatattttaatagattaacatggaagttatcgctgatcgtctagacgatatagtgaaacaaaatatagcggatgaaaaatttgtagattttgttatacacggtctagagcatcaatgtcctgctatacttcgaccattaattaggttgtttattgatatactattatttgttatagtaatttatatttttacggtacgtctagtaagtagaaattatcaaatgttgttggtggtgctagtcatcacattaactattttttattactttatactataatagtactagactgacttctaacaaacatctcacctgccataaataaatgcttgatattaaagtcttctatttctaacactattccatctgtggaaaataatactctgacattatcgctaattgacacatcggtgagtgatatgcctataaagtaataatcttctttgggcacatataccagtgtaccaggttctaacaacctatttactggtgctcctgtagcatactttttctttaccttgagaatatccatcgtttgcttggtcaatagcgatatgtgattttttatcaaccactcaaaaaagtaattggagtgttcatatcctctacgggctattgtctcatggccgtgtatgaaatttaagtaacacgactgtggtagatttgttctatagagccgattgccgcaaatagatagaactaccaatatgtctgtacaaatgttaaacattaattgattaacagaaaaaacaatgttcgttctgggaatagaaaccagatcaaaacaaaattcgttagaatatatgccacgtttatacatggaatataaaataactacagtttgaaaaataacagtatcatttaaacatttaacttgcggggttaatctcacaactttactgtttttgaactgttcaaaatatagcatcgatccgtgagaaatacgtttagccgcctttaatagaggaaatcccaccgcctttctggatctcaccaacgacgatagttctgaccagcaactcatttcttcatcatccacctgttttaacatataataggcaggagatagatatccgtcattgcaatattccttctcgtaggcacacaatctaatattgataaaatctccattctcttctctgcatttattatcttgtctcggtggctgattaggctgtggtcttggtttaggccttggtctatcgttgttgaatctattttggtcattaaatctttcatttcttcctggtatatttctatcacctcgtttggttggatttttgtctatattatcgtttgtaacatcggtacgggtattcatttatcacaaaaaaaacttctctaaatgagtctactgctagaaaacctcatcgaagaagataccatattttttgcaggaagtatatctgagtatgatgatttacaaatggttattgccggcgcaaaatccaaatttccaagatctatgctttctatttttaatatagtacctagaacgatgtcaaaatatgagttggagttgattcataacgaaaatatcacaggagcaatgtttaccacaatgtataatataagaaacaatttgggtctaggagatgataaactaactattgaagccattgaaaactatttcttggatcctaacaatgaagttatgcctcttattattaataatacggatatgactgccgtcattcctaaaaaaagtggtaggagaaagaataagaacatggttatcttccgtcaaggatcatcacctatcttgtgcattttcgaaactcgtaaaaagattaatatttataaagaaaatatggaatccgcgtcgactgagtatacacctatcggagacaacaaggctttgatatctaaatatgcgggaattaatgtcctgaatgtgtattctccttccacatccataagattgaatgccatttacggattcaccaataaaaataaactagagaaacttagtactaataaggaactagaatcgtatagttctagccctcttcaagaacccattaggttaaatgattttctgggactattggaatgtgttaaaaagaatattcctctaacagatattccgacaaaggattgattactataaatggagaatgttcctaatgtatactttaatcctgtgtttatagagcccacgtttaaacattctttattaagtgtttataaacacagattaatagttttatttgaagtattcgttgtattcattctaatatatgtattttttagatctgaattaaatatgttcttcatgcctaaacgaaaaatacccgatcctattgatagattacgacgtgctaatctagcgtgtgaagacgataaattaatgatctatggattaccatggatgacaactcaaacatctgcgttatcaataaatagtaaaccgatagtgtataaagattgtgcaaagcttttgcgatcaataaatggatcacaaccagtatctcttaacgatgttcttcgcagatgatgattcattttttaagtatttggctagtcaagatgatgaatcttcattatctgatatattgcaaatcactcaatatctagactttctgttattattattgatccaatcaaaaaataaattagaagctgtgggtcattgttatgaatctctttcagaggaatacagacaattgacaaaattcacagactttcaagattttaaaaaactgtttaacaaggtccctattgttacagatggaagggtcaaacttaataaaggatatttgttcgactttgtgattagtttgatgcgattcaaaaaagaatcctctctagctaccaccgcaatagatcctgttagatacatagatcctcgtcgcaatatcgcattttctaacgtgatggatatattaaagtcgaataaagtgaacaataattaattctttattgtcatcatgaacggcggacatattcagttgataatcggccccatgttttcaggtaaaagtacagaattaattagacgagttagacgttatcaaatagctcaatataaatgcgtgactataaaatattctaacgataatagatacggaacgggactatggacgcatgataagaataattttgaagcattggaagcaactaaactatgtgatgtcttggaatcaattacagatttctccgtgataggtatcgatgaaggacagttctttccagacattgttgaattagatcgataaaaattaattaattacccgggtaccaggcctagatctgtcgagatccggtggtggtgcaaatcaaagaactgctcctcagtggatgttgcctttacttctaggcctgtacggaagtgttacttctgctctaaaagctgctgcagggggggggggggggtgggggggccggttagggccgccatcccctcagagcgtcgggatatcgggtggcggctcgggacggaggacgcgctagtgttcttctgtgtggcagttcagaatgatggatcaagctagatcagcattctctaacttgtttggtggagaaccattgtcatatacccggttcagcctggctcggcaagtagatggcgataacagtcatgtggagatgaaacttgctgtagatgaagaagaaaatgctgacaataacacaaaggccaatgtcacaaaaccaaaaaggtgtagtggaagtatctgctatgggactattgctgtgatcgtctttttcttgattggatttatgattggctacttgggctattgtaaaggggtagaaccaaaaactgagtgtgagagactggcaggaaccgagtctccagtgagggaggagccaggagaggacttccctgcagcacgtcgcttatattgggatgacctgaagagaaagttgtcggagaaactggacagcacagacttcaccagcaccatcaagctgctgaatgaaaattcatatgtccctcgtgaggctggatctcaaaaagatgaaaatcttgcgttgtatgttgaaaatcaatttcgtgaatttaaactcagcaaagtctggcgtgatcaacattttgttaagattcaggtcaaagacagcgctcaaaactcggtgatcatagttgataagaacggtagacttgtttacctggtggagaatcctgggggttatgtggcgtatagtaaggctgcaacagttactggtaaactggtccatgctaattttggtactaaaaaagattttgaggatttatacactcctgtgaatggatctatagtgattgtcagagcagggaaaatcacctttgcagaaaaggttgcaaatgctgaaagcttaaatgcaattggtgtgttgatatacatggaccagactaaatttcccattgttaacgcagaactttcattctttggacatgctcatctggggacaggtgacccttacacacctggattcccttccttcaatcacactcagtttccaccatctcggtcatcaggattgcctaatatacctgtccagacaatctccagagctgctgcagaaaagctgtttgggaatatggaaggagactgtccctctgactggaaaacagactctacatgtaggatggtaacctcagaaagcaagaatgtgaagctcactgtgagcaatgtgctgaaagagataaaaattcttaacatctttggagttattaaaggctttgtagaaccagatcactatgttgtagttggggcccagagagatgcatggggccctggagctgcaaaatccggtgtaggcacagctctcctattgaaacttgcccagatgttctcagatatggtcttaaaagatgggtttcagcccagcagaagcattatctttgccagttggagtgctggagactttggatcggttggtgccactgaatggctagagggatacctttcgtccctgcatttaaaggctttcacttatattaatctggataaagcggttcttggtaccagcaacttcaaggtttctgccagcccactgttgtatacgcttattgagaaaacaatgcaaaatgtgaagcatccggttactgggcaatttctatatcaggacagcaactgggccagcaaagttgagaaactcactttagacaatgctgctttccctttccttgcatattctggaatcccagcagtttctttctgtttttgcgaggacacagattatccttatttgggtaccaccatggacacctataaggaactgattgagaggattcctgagttgaacaaagtggcacgagcagctgcagaggtcgctggtcagttcgtgattaaactaacccatgatgttgaattgaacctggactatgagaggtacaacagccaactgctttcatttgtgagggatctgaaccaatacagagcagacataaaggaaatgggcctgagtttacagtggctgtattctgctcgtggagacttcttccgtgctacttccagactaacaacagatttcgggaatgctgagaaaacagacagatttgtcatgaagaaactcaatgatcgtgtcatgagagtggagtatcacttcctctctccctacgtatctccaaaagagtctcctttccgacatgtcttctggggctccggctctcacacgctgccagctttactggagaacttgaaactgcgtaaacaaaataacggtgcttttaatgaaacgctgttcagaaaccagttggctctagctacttggactattcagggagctgcaaatgccctctctggtgacgtttgggacattgacaatgagttttaaatgtgatacccatagcttccatgagaacagcagggtagtctggtttctagacttgtgctgatcgtgctaaattttcagtagggctacaaaacctgatgttaaaattccatcccatcatcttggtactactagatgtctttaggcagcagcttttaatacagggtagataacctgtacttcaagttaaagtgaataaccacttaaaaaatgtccatgatggaatattcccctatctctagaattttaagtgctttgtaatgggaactgcctctttcctgttgttgttaatgaaaatgtcagaaaccagttatgtgaatgatctctctgaatcctaagggctggtctctgctgaaggttgtaagtggtcgcttactttgagtgatcctccaacttcatttgatgctaaataggagataccaggttgaaagaccttctccaaatgagatctaagcctttccataaggaatgtagctggtttcctcattcctgaaagaaacagttaactttcagaagagatgggcttgttttcttgccaatgaggtctgaaatggaggtccttctgctggataaaatgaggttcaactgttgattgcaggaataaggccttaatatgttaacctcagtgtcatttatgaaaagaggggaccagaagccaaagacttagtatattttcttttcctctgtcccttcccccataagcctccatttagttctttgttatttttgtttcttccaaagcacattgaaagagaaccagtttcaggtgtttagttgcagactcagtttgtcagactttaaagaataatatgctgccaaattttggccaaagtgttaatcttaggggagagctttctgtccttttggcactgagatatttattgtttatttatcagtgacagagttcactataaatggtgtttttttaatagaatataattatcggaagcagtgccttccataattatgacagttatactgtcggttttttttaaataaaagcagcatctgctaataaaacccaacagatactggaagttttgcatttatggtcaacacttaagggttttagaaaacagccgtcagccaaatgtaattgaataaagttgaagctaagatttagagatgaattaaatttaattaggggttgctaagaagcgagcactgaccagataagaatgctggttttcctaaatgcagtgaattgtgaccaagttataaatcaatgtcacttaaaggctgtggtagtactcctgcaaaattttatagctcagtttatccaaggtgtaactctaattcccattttgcaaaatttccagtacctttgtcacaatcctaacacattatcgggagcagtatcttccataatgtataaagaacaaggtagtttttacctaccacagtgtctgtatcggagacagtgatctccatatgttacactaagggtgtaagtaattatcgggaacagtgtttcccataattttcttcatgcaatgacatcttcaaagcttgaagatcgttagtatctaacatgtatcccaactcctataattccctatcttttagttttagttgcagaaacattttgtggtcattaagcattgggtgggtaaattcaaccactgtaaaatgaaattactacaaaatttgaaatttagcttgggtttttgttacctttatggtttctccaggtcctctacttaatgagatagtagcatacatttataatgtttgctattgacaagtcattttaactttatcacattatttgcatgttacctcctataaacttagtgcggacaagttttaatccagaattgaccttttgacttaaagcagagggactttgtatagaaggtttgggggctgtggggaaggagagtcccctgaaggtctgacacgtctgcctacccattcgtggtgatcaattaaatgtaggtatgaataagttcgaagctccgtgagtgaaccatcattataaacgtgatgatcagctgtttgtcatagggcagttggaaacggcctcctagggaaaagttcatagggtctcttcaggttcttagtgtcacttacctagatttacagcctcacttgaatgtgtcactactcacagtctctttaatcttcagttttatctttaatctcctcttttatcttggactgacatttagcgtagctaagtgaaaaggtcatagctgagattcctggttcgggtgttacgcacacgtacttaaatgaaagcatgtggcatgttcatcgtataacacaatatgaatacagggcatgcattttgcagcagtgagtctcttcagaaaacccttttctacagttagggttgagttacttcctatcaagccagtacgtgctaacaggctcaatattcctgaatgaaatatcagactagtgacaagctcctggtcttgagatgtcttctcgttaaggagatgggccttttggaggtaaaggataaaatgaatgagttctgtcatgattcactattctagaacttgcatgacctttactgtgttagctctttgaatgttcttgaaattttagactttctttgtaaacaaatgatatgtccttatcattgtataaaagctgttatgtgcaacagtgtggagattccttgtctgatttaataaaatacttaaacactgaaaaaaaaaaaaaaaaaaaaaaaaaaaaaaaaaaaaaaaaaaaaaaaaaaaaaaaaaaaaaaaaaaaaaaaaaaaaaaaaagtaccttctgaggcggaaagaaccagccggatctcgacttcgagcttatttatattccaaaaaaaaaaaataaaatttcaatttttaagctttcactaattccaaacccacccgctttttatagtaagtttttcacccataaataataaatacaataattaatttctcgtaaaagtagaaaatatattctaatttattgcacggtaaggaagtagatcataactcgagcatgggagatcccgtcgttttacaacgtcgtgactgggaaaaccctggcgttacccaacttaatcgccttgcagcacatccccctttcgccagctggcgtaatagcgaagaggcccgcaccgatcgcccttcccaacagttgcgcagcctgaatggcgaatggcgctttgcctggtttccggcaccagaagcggtgccggaaagctggctggagtgcgatcttcctgaggccgatactgtcgtcgtcccctcaaactggcagatgcacggttacgatgcgcccatctacaccaacgtgacctatcccattacggtcaatccgccgtttgttcccacggagaatccgacgggttgttactcgctcacatttaatgttgatgaaagctggctacaggaaggccagacgcgaattatttttgatggcgttaactcggcgtttcatctgtggtgcaacgggcgctgggtcggttacggccaggacagtcgtttgccgtctgaatttgacctgagcgcatttttacgcgccggagaaaaccgcctcgcggtgatggtgctgcgctggagtgacggcagttatctggaagatcaggatatgtggcggatgagcggcattttccgtgacgtctcgttgctgcataaaccgactacacaaatcagcgatttccatgttgccactcgctttaatgatgatttcagccgcgctgtactggaggctgaagttcagatgtgcggcgagttgcgtgactacctacgggtaacagtttctttatggcagggtgaaacgcaggtcgccagcggcaccgcgcctttcggcggtgaaattatcgatgagcgtggtggttatgccgatcgcgtcacactacgtctgaacgtcgaaaacccgaaactgtggagcgccgaaatcccgaatctctatcgtgcggtggttgaactgcacaccgccgacggcacgctgattgaagcagaagcctgcgatgtcggtttccgcgaggtgcggattgaaaatggtctgctgctgctgaacggcaagccgttgctgattcgaggcgttaaccgtcacgagcatcatcctctgcatggtcaggtcatggatgagcagacgatggtgcaggatatcctgctgatgaagcagaacaactttaacgccgtgcgctgttcgcattatccgaaccatccgctgtggtacacgctgtgcgaccgctacggcctgtatgtggtggatgaagccaatattgaaacccacggcatggtgccaatgaatcgtctgaccgatgatccgcgctggctaccggcgatgagcgaacgcgtaacgcgaatggtgcagcgcgatcgtaatcacccgagtgtgatcatctggtcgctggggaatgaatcaggccacggcgctaatcacgacgcgctgtatcgctggatcaaatctgtcgatccttcccgcccggtgcagtatgaaggcggcggagccgacaccacggccaccgatattatttgcccgatgtacgcgcgcgtggatgaagaccagcccttcccggctgtgccgaaatggtccatcaaaaaatggctttcgctacctggagagacgcgcccgctgatcctttgcgaatacgcccacgcgatgggtaacagtcttggcggtttcgctaaatactggcaggcgtttcgtcagtatccccgtttacagggcggcttcgtctgggactgggtggatcagtcgctgattaaatatgatgaaaacggcaacccgtggtcggcttacggcggtgattttggcgatacgccgaacgatcgccagttctgtatgaacggtctggtctttgccgaccgcacgccgcatccagcgctgacggaagcaaaacaccagcagcagtttttccagttccgtttatccgggcaaaccatcgaagtgaccagcgaatacctgttccgtcatagcgataacgagctcctgcactggatggtggcgctggatggtaagccgctggcaagcggtgaagtgcctctggatgtcgctccacaaggtaaacagttgattgaactgcctgaactaccgcagccggagagcgccgggcaactctggctcacagtacgcgtagtgcaaccgaacgcgaccgcatggtcagaagccgggcacatcagcgcctggcagcagtggcgtctggcggaaaacctcagtgtgacgctccccgccgcgtcccacgccatcccgcatctgaccaccagcgaaatggatttttgcatcgagctgggtaataagcgttggcaatttaaccgccagtcaggctttctttcacagatgtggattggcgataaaaaacaactgctgacgccgctgcgcgatcagttcacccgtgcaccgctggataacgacattggcgtaagtgaagcgacccgcattgaccctaacgcctgggtcgaacgctggaaggcggcgggccattaccaggccgaagcagcgttgttgcagtgcacggcagatacacttgctgatgcggtgctgattacgaccgctcacgcgtggcagcatcaggggaaaaccttatttatcagccggaaaacctaccggattgatggtagtggtcaaatggcgattaccgttgatgttgaagtggcgagcgatacaccgcatccggcgcggattggcctgaactgccagctggcgcaggtagcagagcgggtaaactggctcggattagggccgcaagaaaactatcccgaccgccttactgccgcctgttttgaccgctgggatctgccattgtcagacatgtataccccgtacgtcttcccgagcgaaaacggtctgcgctgcgggacgcgcgaattgaattatggcccacaccagtggcgcggcgacttccagttcaacatcagccgctacagtcaacagcaactgatggaaaccagccatcgccatctgctgcacgcggaagaaggcacatggctgaatatcgacggtttccatatggggattggtggcgacgactcctggagcccgtcagtatcggcggaattccagctgagcgccggtcgctaccattaccagttggtctggtgtcaaaaataataataaccgggcaggggggatccaattctgtgagcgtatggcaaacgaaggaaaaatagttatagtagccgcactcgatgggacatttcaacgtaaaccgtttaataatattttgaatcttattccattatctgaaatggtggtaaaactaactgctgtgtgtatgaaatgctttaaggaggcttccttttctaaacgattgggtgaggaaaccgagatagaaataataggaggtaatgatatgtatcaatcggtgtgtagaaagtgttacatcgactcataatattatattttttatctaaaaaactaaaaataaacattgattaaattttaatataatacttaaaaatggatgttgtgtcgttagataaaccgtttatgtattttgaggaaattgataatgagttagattacgaaccagaaagtgcaaatgaggtcgcaaaaaaactgccgtatcaaggacagttaaaactattactaggagaattattttttcttagtaagttacagcgacacggtatattagatggtgccaccgtagtgtatataggatctgctcccggtacacatatacgttatttgagagatcatttctataatttaggagtgatcatcaaatggatgctaattgacggccgccatcatgatcctattttaaatggattgcgtgatgtgactctagtgactcggttcgttgatgaggaatatctacgatccatcaaaaaacaactgcatccttctaagattattttaatttctgatgtgagatccaaacgaggaggaaatgaacctagtacggcggatttactaagtaattacgctctacaaaatgtcatgattagtattttaaaccccgtggcgtctagtcttaaatggagatgcccgtttccagatcaatggatcaaggacttttatatcccacacggtaataaaatgttacaaccttttgctccttcatattcagctgaaatgagattattaagtatttataccggtgagaacatgagactgactcgagttaccaaattagacgctgtaaattatgaaaaaaagatgtactaccttaataagatcgtccgtaacaaagtagttgttaactttgattatcctaatcaggaatatgactattttcacatgtactttatgctgaggaccgtgtactgcaataaaacatttcctactactaaagcaaaggtactatttctacaacaatctatatttcgtttcttaaatattccaacaacatcaactgaaaaagttagtcatgaaccaatacaacgtaaaatatctagcaaaaattctatgtctaaaaacagaaatagcaagagatccgtacgcggtaataaatagaaacgtactactgagatatactaccgatatagagtataatgatttagttactttaataaccgttagacataaaattgattctatgaaaactgtgtttcaggtatttaacgaatcatccataaattatactccggttgatgatgattatggagaaccaatcattataacatcgtatcttcaaaaaggtcataacaagtttcctgtaaattttctatacatagatgtggtaatatctgacttatttcctagctttgttagactagatactacagaaactaatatagttaatagtgtactacaaacaggcgatggtaaaaagactcttcgtcttcccaaaatgttagagacggaaatagttgtcaagattctctatcgccctaatataccattaaaaattgttagatttttccgcaataacatggtaactggagtagagatagccgatagatctgttatttcagtcgctgattaatcaattagtagagatgagataagaacattataataatcaataatatatcttatatcttatatcttatatcttatatcttgtttagaaaaatgctaatattaaaatagctaacgctagtaatccaatcggaagccatttgatatctataatagggtatctaatttcctgatttaaatagcggacagctatattctcggtagctactcgtttggaatcacaaacattatttacatctaatttactatctgtaatggaaacgtttcccaatgaaatggtacaatccgatacattgcattttgttatatttttttttaaagaggctggtaacaacgcatcgcttcgtttacatggctcgtaccaacaataatagggtaatcttgtatctattcctatccgtactatgcttttatcaggataaatacatttacatcgtatatcgtctttgttagcatcacagaatgcataaatttgttcgtccgtcatgataaaaatttaaagtgtaaatataactattatttttatagttgtaataaaaagggaaatttgattgtatactttcggttctttaaaagaaactgacttgataaaaatggctgtaatctctaaggttacgtatagtctatatgatcaaaaagagattaatgctacagatattatcattagtcatgttaaaaatgacgacgatatcggtaccgttaaagatggtagactaggtgctatggatggggcattatgtaagacttgtgggaaaacggaattggaatgtttcggtcactggggtaaagtaagtatttataaaactcatatagttaagcctgaatttatttcagaaattattcgtttactgaatcatatatgtattcactgcggattattgcgttcacgagaaccgtattccgacgatattaacctaaaagagttatcgggacacgctcttaggagattaaaggataaaatattatccaagaaaaagtcatgttggaacagtgaatgtatgcaaccgtatcaaaaaattactttttcaaagaaaaaggtttgtttcgtcaacaagttggatgatattaacgttcctaattctctcatctatcaaaagttaatttctattcatgaaaagttttggccattattagaaattcatcaatatccagctaacttattttatacagactactttcccatccctccgttgattattagaccggctattagtttttggatagatagtatacccaaagagaccaatgaattaacttacttattaggtatgatcgttaagaattgtaacttgaatgctgatgaacaggttatccagaaggcggtaatagaatacgatgatattaaaattatttctaataacactaccagtatcaatttatcatatattacatccggcaaaaataatatgattagaagttatatcgtcgcccgacgaaaagatcagaccgctagatctgtaattggtcccagtacatctatcaccgttaatgaggtaggaatgcccgcatatattagaaatacacttacagaaaagatatttgttaatgcctttacagtggataaagttaaacaactattagcgtcaaaccaagttaaattttactttaataaacgattaaaccaattaacaagaatacgccaaggaaagtttattaaaaataaaatacatttattgcctggtgattgggtagaagtagctgttcaagaatatacaagtattatttttggaagacagccgtctctacatagatacaacgtcatcgcttcatctatcagagctaccgaaggagatactatcaaaatatctcccggaattgccaactctcaaaatgctgatttcgacggggatgaggaatggatgatattagaacaaaatcctaaagctgtaattgaacaaagtattcttatgtatccgacgacgttactcaaacacgatattcatggagcccccgtttatggatctattcaagatgaaatcgtagcagcgtattcattgtttaggatacaagatctttgtttagatgaagtattgaacatcttggggaaatatggaagagagttcgatcctaaaggtaaatgtaaattcagcggtaaagatatctatacttacttgataggtgaaaagattaattatccgggtctcttaaaggatggtgaaattattgcaaacgacgtagatagtaattttgttgtggctatgaggcatctgtcattggctggactcttatccgatcataagtcgaacgtggaaggtatcaactttattatcaagtcatcttatgtttttaagagatatctatctatttacggttttggggtgacattcaaagatctgagaccaaattcgacgttcactaataaattggaggccatcaacgtagaaaaaatagaacttatcaaagaagcatacgccaaatatctcaacgatgtaagagacgggaaaatagttccattatctaaagctttagaggcggactatgtggaatccatgttatccaacttgacaaatcttaatatccgagagatagaagaacatatgagacaaacgctgatagatgatccagataataacctcctgaaaatggccaaagcgggttataaagtaaatcccacagaactaatgtatattctaggtacgtatggacaacaaaggattgatggtgaaccagcagagactcgagtattgggtagagttttaccttactatcttccagactctaaggatccagaaggaagaggttacattcttaattctttaacaaaaggattaacgggttctcaatattacttttcgatgctggttgccagatctcaatctactgatatcgtctgtgaaacatcacgtaccggaacactggctagaaaaatcattaaaaagatggaggatatggtggtcgacggatacggacaagtagttataggtaatacgctcatcaagtacgccgccaattataccaaaattctaggctcagtatgtaaacctgtagatcttatctatccagatgagtccatgacttggtatttggaaattagtgctctgtggaataaaataaaacagggattcgtttactctcagaaacagaaacttgcaaagaagacattggcgccgtttaatttcctagtattcgtcaaacccaccactgaggataatgctattaaggttaaggatctgtacgatatgattcataacgtcattgatgatgtgagagagaaatacttctttacggtatctaatatagattttatggagtatatattcttgacgcatcttaatccttctagaattagaattacaaaagaaacggctatcactatctttgaaaagttctatgaaaaactcaattatactctaggtggtggaactcctattggaattatttctgcacaggtattgtctgagaagtttacacaacaagccctgtccagttttcacactactgaaaaaagtggtgccgtcaaacaaaaacttggtttcaacgagtttaataacttgactaatttgagtaagaataagaccgaaattatcactctggtatccgatgatatctctaaacttcaatctgttaagattaatttcgaatttgtatgtttgggagaattaaatccaaacatcactcttcgaaaagaaacagataaatatgtagtagatataatagtcaatagattatacatcaagagagcagaaataaccgaattagtcgtcgaatatatgattgaacgatttatctcctttagcgtcattgtaaaggaatggggtatggagacattcattgaggacgaggataatattagatttactgtctacctaaatttcgttgaaccggaagaattgaatcttagtaagtttatgatggttcttccgggggcagccaacaagggaaagattagtaaattcaagattcctatctctgattatacgggatatgacgacttcaatcaaacaaaaaagctcaataagatgactgtagaactcatgaatctaaaagaattgggttctttcgatttggaaaacgtcaacgtgtatcctggagtatggaatacatacgatatcttcggtatcgaggccgctcgtgaatacttgtgcgaagccatgttaaacacctatggagaagggttcgattatctgtatcagccttgtgatcttctcgctagtttactatgtgctagttacgaaccagaatcagtgaataaattcaagttcggcgcagctagtactcttaagagagctacgttcggagacaataaagcattgttaaacgcggctcttcataaaaagtcagaacctattaacgataatagtagctgccacttttttagcaaggtccctaatataggaactggatattacaaatactttatcgacttgggtcttctcatgagaatggaaaggaaactatctgataagatatcttctcaaaagatcaaggaaatggaagaaacagaagacttttaattcttatcaataacatatttttctatgatctgtcttttaaacgatggattttccacaaatgcgcctctcaagtccctcatagaatgatacacgtataaaaaatatagcataggcaatgactccttatttttagacattagatatgccaaaatcatagccccgcttctatttactcccgcagcacaatgaaccaacacgggctcgtttcgttgatcacatttagataaaaaggcggttacgtcgtcaaaatatttactaatatcggtagttgtatcatctaccaacggtatatgaataatattaatattagagttaggtaatgtatatttatccatcgtcaaatttaaaacatatttgaacttaacttcagatgatggtgcatccatagcatttttataatttcccaaatacacattattggttacccttgtcattatagtgggagatttggctttgtgcatatctccagttgaacgtagtagtaagtatttatacaaacttttcttatccatttataacgtacaaatggataaaactactttatcggtaaacgcgtgtaatttagaatacgttagagaaaaggctatagtaggcgtacaagcagccaaaacatcaacacttatattctttgttattatattggcaattagtgcgctattactctggtttcagacgtctgataatccagtctttaatgaattaacgagatatatgcgaattaaaaatacggttaacgattggaaatcattaacggatagcaaaacaaaattagaaagtgatagaggtagacttctagccgctggtaaggatgatatatttgaattcaaatgtgtggatttcggcgcctattttatagctatgcgattggataagaaaacatatctgccgcaagctattaggcgaggtactggagacgcgtggatggttaaaaaggcggcaaaggtcgatccatctgctcaacaattttgtcagtatttgataaaacacaagtctaataatgttattacttgtggtaatgagatgttaaatgaattaggttatagcggttattttatgtcaccgcattggtgttccgattttagtaatatggaatagtgttagataaatgcggtaacgaatgttcctgtaaggaaccataacagcttagatttaacgttaaagatgagcataaacataataaacaaaattacaatcaaacttataacattaatatcaaacaatccaaaaaatgaaatcagtggagtagtaaacgcgtacataactcctggataacgtttagcagctgccgttcctattctagaccaaaaattcggtttcatgttttcgaaacggtattctgcaacaagtcgaggatcgtgttctacatatttggcggcattatccagtatctgcctattgatcttcatttcgttttcgattctggctatttcaaaataaaatcccgatgatagacctccagactttataatttcatctacgatgttcagcgccgtagtaactctaataatataggctgataagctaacatcataccctcctgtatatgtgaatatggcatgatttttgtccattacaagctcggttttaactttattgcctgtaataatttctctcatctgtaggatatctatttttttgtcatgcattgccttcaagacgggacgaagaaacgtaatatcctcaataacgttatcgttttctacaataactacatattctacctttttattttctaactcggtaaaaaaattagaatcccatagggctaaatgtctagcgatatttcttttcgtttcctctgtacacatagtgttacaaaaccctgaaaagaagtgagtatacttgtcatcatttctaatgtttcctccagtccactgtataaacgcataatccttgtaatgatctggatcatccttgactaccacaacatttcttttttctggcataacttcgttgtcctttacatcatcgaacttctgatcattaatatgctcatgaacattaggaaatgtttctgatggaggtctatcaataactggcacaacaataacaggagttttcaccgccgccatttagttattgaaattaatcatatacaactctttaatacgagttatattttcgtctatccattgtttcacattgacatatttcgacaaaaagatataaaatgcgtattccaatgcttctctgtttaatgaattactaaaatatacaaacacgtcactgtctggcaataaatgatatcttagaatattgtaacaatttattttgtattgcacatgttcgtgatctatgagttcttcttcgaatggcataggatctccgaatctgaaaacgtataaataggagttagaataataatatttgagagtattggtaatatataaactctttagcggtataattagtttttttctctcaatttctatttttagatgtgatggaaaaatgactaattttgtagcattagtatcatgaactctaatcaaaatcttaatatcttcgtcacacgttagctctttgaagtttttaagagatgcatcagttggttctacagatggagtaggtgcaacaattttttgttctacacatgtatgtactggagccattgttttaactataatggtgcttgtatcgaaaaactttaatgcagatagcggaagctcttcgccgcgactttctacgtcgtaattgggttctaacgccgatctctgaatggatactagttttctaagttctaatgtgattctctgaaaatgtaaatccaattcctccggcattatagatgtgtatacatcggtaaataaaactatagtatccaacgatcccttctcgcaaattctagtcttaaccaaaaaatcgtatataaccacggagatggcgtatttaagagtggattcttctaccgttttgttcttggatgtcatataggaaactataaagtccgcactactgttaagaatgattactaacgcaactatatagtttaaattaagcattttggaaacataaaataactctgtagacgatacttgactttcgaataagtttgcagacaaacgaagaaagaacagacctctcttaatttcagaagaaaactttttttcgtattcctgacgtctagagtttatatcaataagaaagttaagaattagtcggttaatgttgtatttcattacccaagtttgagatttcataatattatcaaaagacatgataatattaaagataaagcgctgactatgaacgaaatagctatatggttcgctcaagaatatagtcttgttaaacgtggaaacgataactgtatttttaatcacgtcagcggcatctaaattaaatataggtatatttattccacacactctacaatatgccacaccatcttcataataaataaattcgttagcaaaattattaattttagtgaaatagttagcgtcaactttcatagcttccttcaatctaatttgatgctcacacggtgcgaattccactctaacatcccttttccatgcctcaggttcatcgatctctataatatctagttttttgcgtttcacaaacacaggctcgtctctcgcgatgagatctgtatagtaactatgtaaatgataactagatagaaagatgtagctatatagatgacgatcctttaagagaggtataataactttaccccaatcagatagactgttgttatggtcttcggaaaaagaatttttataaatttttccagtattttccaaatatacgtacttaacatctaaaaaatccttaatgataataggaatggataatccgtctattttataaagaaatacatatcgcacattatacttttttttggaaatgggaataccgatgtgtctacataaatatgcaaagtctaaatattttttagagaatcttagttggtccaaattcttttccaagtacggtaatagatttttcatattgaacggtatcttcttaatctctggttctagttccgcattaaatgatgaaactaagtcactatttttataactaacgattacatcacctctaacatcatcatttaccagaatactgatcttcttttgtcgtaaatacatgtctaatgtgttaaaaaaaagatcatacaagttatacgtcatttcatctgtggtattcttgtcattgaaggataaactcgtactaatctcttctttaacagcctgttcaaatttatatcctatatacgaaaaaatagcaaccagtgtttgatcatccgcgtcaatattctgttctatcgtagtgtataacaatcgtatatcttcttctgtgatagtcgatacgttataaaggttgataacgaaaatatttttatttcgtgaaataaagtcatcgtaggattttggacttatattcgcgtctagtagatatgcttttatttttggaatgatctcaattagaatagtctctttagagtccatttaaagttacaaacaactaggaaattggtttatgatgtataatttttttagtttttatagattctttattctatacttaaaaaatgaaaataaatacaaaggttcttgagggttgtgttaaattgaaagcgagaaataatcataaattatttcattatcgcgatatccgttaagtttgtatcgtaatggcgtggtcaattacgaataaagcggatactagtagcttcacaaagatggctgaaatcagagctcatctaaaaaatagcgctgaaaataaagataaaaacgaggatattttcccggaagatgtaataattccatctactaagcccaaaaccaaacgagccactactcctcgtaaaccagcggctactaaaagatcaaccaaaaaggaggaagtggaagaagaagtagttatagaggaatatcatcaaacaactgaaaaaaattctccatctcctggagtcagcgacattgtagaaagcgtggccgctgtagagctcgatgatagcgacggggatgatgaacctatggtacaagttgaagctggtaaagtaaatcatagtgctagaagcgatctctctgacctaaaggtggctaccgacaatatcgttaaagatcttaagaaaattattactagaatctctgcagtatcgacggttctagaggatgttcaagcagctggtatctctagacaatttacttctatgactaaagctattacaacactatctgatctagtcaccgagggaaaatctaaagttgttcgtaaaaaagttaaaacttgtaagaagtaaatgcgtgcacttttttataaagatggtaaactctttaccgataataattttttaaatcctgtatcagacgataatccagcgtatgaggttttgcaacatgttaaaattcctactcatttaacagatgtagtagtatatgaacaaacgtgggaggaggcgttaactagattaatttttgtgggaagtgattcaaaaggacgtagacaatacttttacggaaaaatgcatgtacagaatcgcaacgctaaaagagatcgtatttttgttagagtatataacgttatgaaacgaattaattgttttataaacaaaaatataaagaaatcgtccacagattccaattatcagttggcggtttttatgttaatggaaactatgttttttattagatttggtaaaatgaaatatcttaaggagaatgaaacagtagggttattaacactaaaaaataaacacatagaaataagtcccgatgaaatagttatcaagtttgtaggaaaggacaaagtttcacatgaatttgttgttcataagtctaatagactatataaaccgctattgaaactgacggatgattctagtcccgaagaatttctgttcaacaaactaagtgaacgaaaggtatacgaatgtatcaaacagtttggtattagaatcaaggatctccgaacgtatggagtcaattatacgtttttatataatttttggacaaatgtaaagtccatatctcctcttccgtcaccaaaaaagttaatagcattaactatcaaacaaactgctgaagtggtaggtcatactccatcaatttcaaaaagagcttatatggcaacgactattttagaaatggtaaaggataaaaattttttagatgtagtatctaaaactacgttcgatgaattcctatctatagtcgtagatcacgttaaatcatctacggatggatgatatagatctttacacaaataattacaagaccgataaatggaaatggataagcgtatgaaatctctcgcaatgacagctttcttcggagagctaagcacattagatattatggcattgataatgtctatatttaaacgccatccaaacaataccattttttcagtggataaggatggtcagtttatgattgatttcgaatacgataattataaggcttctcaatatttggatctgaccctcactccgatatctggagatgaatgcaagactcacgcatcgagtatagccgaacaattggcgtgtgcggatattattaaagaggatattagcgaatatatcaaaactactccccgtcttaaacgatttataaaaaaataccgcaatagatcagatactcgtatcagtcgagatacagaaaagcttaaaatagctctagctaaaggcatagattacgaatatataaaagacgcttgttaataagtaaatgaaaaaaaactagtcgtttataataaaacacgatatggatgccaacgtagtatcattttctactattgcgacgtatatagacgctttagcgaagaatgcttcggaattagaacagaggtctaccgcatacgaaataaataatgaattggaactagtatttattaagccgccattgattactttgacaaatgtagtgaatatctctacgattcaggaatcgtttattcgatttaccgttactaataaggaaggtgttaaaattagaactaagattccattatctaaggtacatggtctagatgtaaaaaatgtacagttagtagatgctatagataacatagtttgggaaaagaaatcattagtgacggaaaatcgtcttcacaaagaatgcttgttgagactatcgacagaggaacgtcatatatttttggattacaagaaatatggatcctctatccgactagaattagtcaatcttattcaagcaaaaacaaaaaactttacgatagactttaagctaaaatattttctaggatccggtgcccagtctaaaagttctttgttgcacgctattaatcatccaaagtcaaggcctaatacatctctggaaatagaattcacacctagagacaatgaaacagttccatatgatgaactaataaaggaattgacgactctctcgcgtcatatatttatggcttctccagagaatgtaattctttctccgcctattaacgcgcctataaaaacctttatgttgcctaaacaagatatagtaggtttggatctggaaaatctatatgccgtaactaagactgacggcattcctataactatcagagttacatcaaacgggttgtattgttattttacacatcttggttatattattagatatcctgttaagagaataatagattccgaagtagtagtctttggtgaggcagttaaggataagaactggaccgtatatctcattaagctaatagagcctgtgaatgcaatcaatgatagactagaagaaagtaagtatgttgaatctaaactagtggatatttgtgatcggatagtattcaagtcaaagaaatacgaaggtccgtttactacaactagtgaagtcgtcgatatgttatctacatatttaccaaagcaaccagaaggtgttattctgttctattcaaagggacctaaatctaacattgattttaaaattaaaaaggaaaatactatagaccaaactgcaaatgtagtatttaggtacatgtccagtgaaccaattatctttggagaatcgtctatctttgtagagtataagaaatttagcaacgataaaggctttcctaaagaatatggttctggtaagattgtgttatataacggcgttaattatctaaataatatctattgtttggaatatattaatacacataatgaagtgggtattaagtccgtggttgtacctattaagtttatagcagaattcttagttaatggagaaatacttaaacctagaattgataaaaccatgaaatatattaactcagaagattattatggaaatcaacataatatcatagtcgaacatttaagagatcaaagcatcaaaataggagatatctttaacgaggataaactatcggatgtgggacatcaatacgccaataatgataaatttagattaaatccagaagttagttattttacgaataaacgaactagaggaccgttgggaattttatcaaactacgtcaagactcttcttatttctatgtattgttccaaaacatttttagacgattccaacaaacgaaaggtattggcgattgattttggaaacggtgctgacctggaaaaatacttttatggagagattgcgttattggtagcgacggatccggatgctgatgctatagctagaggaaatgaaagatacaacaaattaaactctggaattaaaaccaagtactacaaatttgactacattcaggaaactattcgatccgatacatttgtctctagtgtcagagaagtattctattttggaaagtttaatatcatcgactggcagtttgctatccattattcttttcatccgagacattatgctaccgtcatgaataacttatccgaactaactgcttctggaggcaaggtattaatcactaccatggacggagacaaattatcaaaattaacagataaaaagacttttataattcataagaatttacctagtagcgaaaactatatgtctgtagaaaaaatagctgatgatagaatagtggtatataatccatcaacaatgtctactccaatgactgaatacattatcaaaaagaacgatatagtcagagtgtttaacgaatacggatttgttcttgtagataacgttgatttcgctacaattatagaacgaagtaaaaagtttattaatggcgcatctacaatggaagatagaccgtctacaaaaaactttttcgaactaaatagaggagccattaaatgtgaaggtttagatgtcgaagacttacttagttactatgttgtttatgtcttttctaagcggtaaataataatatggtatgggttctgatctcccagttctaaatgcattaaataattccaatagagcgatttttgttcctataggaccttccaactgtggatactctgtattgttaatagatatattaatacttttgtcgggtaacagaggttctacgtcttctaaaaataaaagttttataacatctggcctgttcataaataaaaacttggcgattctatatatactcttattatcaaatctagccattgtcttatagatgtgagctactgtaggtgtaccatttgattttctttctaatactatatatttctctcgaagaagttcttgcacatcatctgggaataaaatactactgttgagtaaatcagttattttttttatatcgatattgatggacatttttatagttaaggataataagtatcccaaagtcgataacgacgataacgaagtatttatacttttaggaaatcacaatgactttatcagattaaaattaacaaaattaaaggagcatgtatttttttctgaatatattgtgactccagatacatatggatctttatgcgtcgaattaaatgggtctagttttcagcacggcggtagatatatagaggtggaggaatttatagatgctggaagacaagttagatggtgttctacatccaatcatatatctaaagatatacccgaagatatgcacactgataaatttgtcatttatgatatttatacgtttgattcgttcaagaataaacgattggtattcgtacaggtacctccgtcgttaggagatgatagtcatttgactaatccgttattgtcaccgtattatcgtaattcagtagccagacaaatggtcaatgatatgatttttaatcaagattcatttttaaaatatttattagaacatctgattagaagccactatagagtttctaaacatataacaatagttagatacaaggataccgaagaattaaatctaacgagaatatgttataatagagataagtttaaggcgtttgtattcgcttggtttaacggcgtttcggaaaatgaaaaggtactagatacgtataaaaaggtatctaatttgatataatgaattcagtgactgtatcacacgcgccatatactattacttatcacgatgattgggaaccagtaatgagtcaattggtagagttttataacgaagtagccagttggctgctacgagacgagacgtcgcctattcctgataagttctttatacagttgaaacaaccgcttagaaataaacgagtatgtgtgtgtggtatagatccgtatccgaaagatggaactggtgtaccgttcgaatcaccaaattttacaaaaaaatcaattaaggagatagcttcatctatatctagattaaccggagtaattgattataaaggttataaccttaatataatagacggggttataccctggaattattacttaagttgtaaattaggagaaacaaaaagtcacgcgatttactgggataagatttccaagttactgctgcagcatataactaaacacgttagtgttctttattgtttgggtaaaacagatttctcgaatatacgggccaagttagaatccccggtaactaccatagtcggatatcatccagcggctagagaccgccaattcgagaaagatagatcatttgaaattatcaacgttttactggaattagacaacaaggcacctataaattgggctcaagggtttatttattaatgctttagtgaaattttaacttgtgttctaaatggatgcggctattagaggtaatgatgttatctttgttcttaagactataggtgtcccgtcagcgtgcagacaaaatgaagatccaagatttgtagaagcatttaaatgcgacgagttagaaagatatattgagaataatccagaatgtacactattcgaaagtcttagggatgaggaagcatactctatagtcagaattttcatggatgtagatttagacgcgtgtctagacgaaatagattatttaacggccattcaagattttattatcgaggtgtcaaactgtgtagctagattcgcgtttacagaatgcggcgccattcatgaaaatgtaataaaatccatgagatctaatttttcattgactaagtctacaaatagagataaaacaagttttcatattatctttttagatacgtataccactatggatacattgatagctatgaaacgaacactattagaattaagtagatcatctgaaaatccactaaccagatcgatagacactgccgtatataggagaaaaacaactcttcgggttgtaggtactaggaaaaatccaaattgcgacactattcatgtaatgcaaccaccgcatgataatatagaagattacctattcacttacgtggatatgaacaacaatagttattacttttctctacaacaacgattggaggatttagttcctgataagttatgggaaccagggtttatttcattcgaagacgctataaaaagagtttcaaaaatattcattaattctataataaactttaatgatctcgatgaaaataattttacaacggtaccactggtcatagattacgtaacaccttgtgcattatgtaaaaaacgatcgcataaacatccgcatcaactatcgttggaaaatggtgctattagaatttacaaaactggtaatccacatagttgtaaagttaaaattgttccgttggatggtaataaactgtttaatattgcacaaagaattttagacactaactctgttttattaaccgaacgaggagaccatatagtttggattaataattcatggaaatttaacagcgaagaacccttgataacaaaactaattttgtcaataagacatcaactacctaaggaatattcaagcgaattactctgtccaagaaaacgaaagactgtagaagctaacatacgagacatgttagtagattcagtggagaccgatacctatccggataaacttccgtttaaaaatggtgtattggacctggtagacggaatgttttactctggagatgatgctaaaaaatatacgtgtactgtatcaaccggatttaaatttgacgatacaaagttcgtcgaagacagtccagaaatggaagagttaatgaatatcattaacgatatccaaccattaacggatgaaaataagaaaaatagagagctatatgaaaaaacattatctagttgtttatgcggtgctaccaaaggatgtttaacattcttttttggagaaactgcaactggaaagtcgacaaccaaacgtttgttaaagtctgctatcggtgacctgtttgttgagacgggtcaaacaattttaacagatgtattggataaaggacctaatccatttatcgctaacatgcatttgaaaagatctgtattctgtagcgaactacctgattttgcctgtagtggatcaaagaaaattagatctgacaatattaaaaagttgacagaaccttgtgtcattggaagaccgtgtttctccaataaaattaataatagaaaccatgcgacaatcattatcgatactaattacaaacctgtttttgataggatagataacgcattaatgagaagaattgccgtcgtgcgattcagaacacacttttctcaaccttctggtagagaggctgctgaaaataatgacgcgtacgataaagtcaaactattagacgaggggttagatggtaaaatacaaaataatatatatagatttgcatttctatacttgttggtgaaatggtacaaaaaatatcatgttcctattatgaaactatatcctacacccgaagagattcctgactttgcattctatctcaaaataggtactctgttggtatctagctctgtaaagcatattccattaatgacggacctctccaaaaagggatatatattgtacgataatgtggtcactcttccgttgactactttccaacagaaaatatccaagtattttaattctagactatttggacacgatatagagagcttcatcaatagacataagaaatttgccaatgttagtgatgaatatctgcaatatatattcatagaggatatttcatctccgtaaatatatgctcatatatttatagaagatatcacatatctaaatgaataccggaatcatagatttatttgataatcatgttgatagtataccaactatattacctcatcagttagctactctagattatctagttagaactatcatagatgagaacagaagcgtgttattgttccatattatgggatcaggtaaaacaataatcgctttgttgttcgccttggtagcttccagatttaaaaaggtttacattctagtgccgaacatcaacatcttaaaaattttcaattataatatgggtgtagctatgaacttgtttaatgacgaattcatagctgagaatatctttattcattccacaacaagtttttattctcttaattataacgataacgtcattaattataacggattatctcgctacaataactctatttttatcgttgatgaggcacataatatctttgggaataatactggagaacttatgaccgtgataaaaaataaaaacaagattccttttttactattgtctggatctcccattactaacacacctaatactctgggtcatattatagatttaatgtccgaagagacgatagattttggtgaaattattagtcgtggtaagaaagtaattcagacacttcttaacgaacgcggtgtgaatgtacttaaggatttgcttaaaggaagaatatcatattacgaaatgcctgataaagatctaccaacgataagatatcacggacgtaagtttctagatactagagtagtatattgtcacatgtctaaacttcaagagagagattatatgattactagacgacagctatgttatcatgaaatgtttgataaaaatatgtataacgtgtcaatggcagtattgggacaacttaatctgatgaataatttagatactttatttcaggaacaggataaggaattgtacccaaatctgaaaataaataatggcgtgttatacggagaagaattggtaacgttaaacattagttccaaatttaaatactttattaatcggatacagacactcaacggaaaacattttatatacttttctaattctacatatggcggattggtaattaaatatatcatgctcagtaatggatattctgaatataatggttctcagggaactaatccacatatgataaacggcaaaccaaaaacatttgctatcgttactagtaaaatgaaatcgtctttagaggatctattagatgtgtataattctcctgaaaacgatgatggtagtcaattgatgtttttgttttcatcaaacattatgtccgaatcctatactctaaaagaggtaaggcatatttggtttatgactatcccagatactttttctcaatacaaccaaattcttggacgatctattagaaaattctcttacgccgatatttctgaaccagttaatgtatatcttttagccgccgtatattccgatttcaatgacgaagtgacgtcattaaacgattacacacaggatgaattaattaatgttttaccatttgacatcaaaaagctgttgtatctaaaatttaagacgaaagaaacgaatagaatatactctattcttcaagagatgtctgaaacgtattctcttccaccacatccatcaattgtaaaagttttattgggagaattggtcagacaatttttttataataattctcgtattaagtataacgataccaagttacttaaaatggttacatcagttataaaaaataaagaagacgctaggaattacatagatgatattgtaaacggtcacttctttgtatcgaataaagtatttgataaatctcttttatacaaatacgaaaacgatattattacagtaccgtttagactttcctacgaaccatttgtttggggagttaactttcgtaaagaatataacgtggtatcttctccataaaactgatgagatatataaagaaataaatgtcgagctttgttaccaatggatacctttccgttacattggaaccacacgagctgacgttagacataaaaactaatattaggaatgccgtatataagacgtatctccatagagaaattagtggtaaaatggccaagaaaatagaaattcgtgaagacgtggaattacctctcggcgaaatagttaataattctgtagttataaacgttccgtgtgtaataacctacgcgtattatcacgttggggatatagtcagaggaacattaaacatcgaagatgaatcaaatgtaactattcaatgtggagatttaatctgtaaactaagtagagattcgggtactgtatcatttagcgattcaaagtactgcttttttcgaaatggtaatgcgtatgacaatggcagcgaagtcactgccgttctaatggaggctcaacaaggtatcgaatctagttttgtttttctcgcgaatatcgtcgactcataaaaaagagaatagcggtaagtataaacacgaatactatggcaataattgcgaatgttttattctcttcgatatatttttgataatatgaaaaacatgtctctctcaaatcggacaaccatctcataaaatagttctcgcgcgctggagaggtagttgccgctcgtataatctctccagaataatatacttgcgtgtcgtcgttcaatttatacggatttctatagttctctgttatataatgcggtttgccctcatgattagacgacgacaatagtgttctaaatttagatagttgatcagaatgaatgtttattggcgttggaaaaattatccatacagcgtctgcagagtggttgatagttgttcctagatatgtaaaataatccaacttactaggcagcaaattgtctagataaaatactgaatcaaacggtgcagacgtattggcggatctaatggaatccaattgattaactatcttttgaaaatatacatttttatgatccaatacttgtaagaatatagaaataatgataagtccatcatcgtgtttttttgcctcttcataagaactatattttttcttattccaatgaacaagattaatctctccagagtatttgtacacatctatcaagtgattggatccataatcgtcttcctttccccaatatatatgtagtgatgataacacatattcattggggagaaaccctccacttatatatcctcctttaaaattaatccttactagttttccagtgttctggatagtggttggtttcgactcattataatgtatgtctaacggcttcaatcgcgcgttagaaattgcttttttagtttctatattaataggagatagttgttgcggcatagtaaaaatgaaatgataactgtttaaaaatagctcttagtatgggaattacaatggatgaggaagtgatatttgaaactcctagagaattaatatctattaaacgaataaaagatattccaagatcaaaagacacgcatgtgtttgctgcgtgtataacaagtgacggatatccgttaataggagctagaagaacttcattcgcgttccaggcgatattatctcaacaaaattcagattctatctttagagtatccactaaactattacggtttatgtactacaatgaactaagagaaatctttagacggttgagaaaaggttctatcaacaatatcgatcctcactttgaagagttaatattattgggtggtaaactagataaaaaggaatctattaaagattgtttaagaagagaattaaaagaggaaagtgatgaacgtataacagtaaaagaatttggaaatgtaattctaaaacttacaacacgggataaattatttaataaagtatatataagttattgcatggcgtgttttattaatcaatcgttggaggatttatcgcatactagtatttacaatgtagaaattagaaagattaaatcattaaatgattgtattaacgacgataaatacgaatatctgtcttatatttataatatgctagttaatagtaaatgaacttttacagatctagtataattagtcagattattaagtataatagacgactagctaagtctattatttgcgaggatgactctcaaattattacactcacggcattcgttaaccaatgcctatggtgtcataaacgagtatccgtgtccgctattttattaactactgataacaaaatattagtatgtaacagacgagatagttttctctattctgaaataattagaactagaaacatgtttagaaagaaacgattatttctgaattattccaattatttgaacaaacaggaaagaagtatactatcgtcatttttttctctagatccagctactactgataatgatagaatagacgctatttatccgggtggcatacccaaaaggggtgagaatgttccagagtgtttatccagggaaattaaagaagaagttaatatagacaattcttttgtattcatagacactcggttttttattcatggcatcatagaagataccattattaataaattttttgaggtaatcttctttgtcggaagaatatctctaacgagtgatcaaatcattgatacatttaaaagtaatcatgaaatcaaggatctaatatttttagatccgaattcaggtaatggactccaatacgaaattgcaaaatatgctctagatactgcaaaacttaaatgttacggccatagaggatgttattatgaatcattaaaaaaattaactgaggatgattgattaaaaaatataaattaatttaccatcgtgtatttttataacgggattgtccggcatatcatgtagatagttaccgtctacatcgtatactcgaccatctacgcctttaaatcctctatttattgacattaatctattagaattggaataccaaatattagtaccctcaattagtttattggtaatattttttttagacgatagatcgatggctcttgaaaccaaggttttccaaccggactcattgtcgatcggtgagaagtctttttcattagcatgaatccattctaatgatgtatgtttaaacactctaaacaattggacaaattcttttgatttgctttgaatgatttcaaataggtcttcgtctacagtaggcataccattagataatctagccattataaagtgcacgtttacatatctacgttctggaggagtaagaacgtgactattgagacgaatggctcttcctactatctgacgaagagacgcctcgttccatgtcatatctaaaatgaagatatcattaattgagaaaaaactaataccctcgcctccactagaagagaatacgcatgttttaatgcattctccgttagtgtttgattcttggttaaactcagccaccgccttgattctagtatcttttgttctagatgagaactctatattagagataccaaagactttgaaatatagtaataagatttctattcctgactgattaacaaatggttcaaagactagacatttaccatgggatgctaatattcccaaacatacatctataaatttgacgcttttctcttttaattcagtaaatagagagatatcagccgcactagcatcccctttcaatagttctccctttttaaaggtatctaatgcggatttagaaaactctctatctcttaatgaatttttaaaatcattatatagtgttgctatctcttgcgcgtattcgcccggatcacgattttgtctttcaggaaagctatcgaacgtaaacgtagtagccatacgtctcagaattctaaatgatgatatacctgtttttatttcagcgagtttagccttttgataaatttcttcttgctttttcgacatattaacgtatcgcattaatactgttttcttagcgaatgatgcagacccttctacgtcatcaaaaatagaaaactcgttattaactatatacgaacatagtcctcctagtttggagactaattctttttcatcgactagacgtttattctcaaatagcgattggtgttgtaaggatcctggtcgtagtaagttaaccaacatggtgaattcttgcacactattgacgataggtgtagccgataaacaaatcatcttatggttttttaacgcaatggtcttagataaaaaattatatactgaacgagtaggacggatcttaccatcttctttgattaatgatttagaaatgaagttatgacattcatcaataatgacgcatattctactcttggaattaatagttttgatattagtaaaaaatttatttctaaaattttgatcatcgtaattaataaaaatacaatccttcgttatctctggagcgtatctgagtatagtgttcatccaaggatcttctatcaaagcctttttcaccaataagataatagcccaattcgtataaatatccttaagatgtttgagaatatatacagtagtcattgttttaccgacacccgtttcatggaacaataaaagagaatgcatactgtctaatcctaagaaaactcttgctacaaaatgttgataatccttgaggcgtactacgtccgaccccatcatttcaacgggcatattagtagttctgcgtaaggcataatcgatataggccgcgtgtgatttactcatttatgagtgataagtaataactatgttttaaaaatcacagcagtagtttaactagtcttctctgatgtttgttttcgatactttttgaatcagaagtcatactagaataaagcaacgagtgaacgtaatagagagcttcgtatactctattcgaaaactctaagaacttattaatgaattccgtatccactggattgtttaaaatactaaattgaacactgttcacatccttccaagaagaagacttagtgacggacttaacatgagacataaataaatccaaattttttttacaaacatcactagccaccataatggcgctatctttcaaccagctatcgcttacgcattttagcagtctaacatttttaaagagactacaatatattctcatagtatcgattacacctctaccgaataaagttggaagtttaataatacaatatttttcgtttacaaaatcaaataatggtcgaaacacgtcgaaggttaacatcttataatcgctaatgtatagattgttttcagtgagatgattattagatttaatagcatctcgttcacgtttgaacagtttattgcgtgcgctgaggtcggcaactacggcgtccgctttagtactcctcccataatactttacgctattaatctttaaaatttcatagactttatctagatcgctttctggtaacatgatatcatgtgtaaaaagttttaacatgtcggtcggcattctatttagatcattaactctagaaatctgaagaaagtaattagctccgtattccagactaggtaatgggcttttacctagagacagattaagttctggcaatgtttcataaaatggaagaaggacatgcgttccctcccggatattttttacaatttcatccatttacaactctatagtttgttttcattattattagttattatctcccataatcttggtaatacttaccccttgatcgtaagataccttatacaggtcattacatacaactaccaattgtttttgtacataatagattggatggttgacatccatggtggaataaactactcgaacagatagtttatctttccccctagatacattagccgtaatagttgtcggcctaaagaatatctttggtgtaaagttaaaagttagggttcttgttccattattgctttttgtcagtagttcattataaattctcgagatgggtccgttctctgaatatagaacatcatttccaaatctaacttctagtctagaaataatatcggtcttattcttaaaatctattcccttgatgaagggatcgttaatgaacaaatccttggcctttgattcggctgatctattatctccgttatagacgttacgttgactagtccaaagacttacaggaatagatgtatcgatgatgttgatactatgtgatatgtgagcaaagattgttctcttagtggcatcactatatgttccagtaatggcggaaaactttttagaaatgttatatataaaagaattttttcgtgttccaaacattagcagattagtatgaagataaacactcatattatcaggaacattatcaatttttacatacacatcagcatcttgaatagaaacgataccatcttctggaacctctacgatctcggcagactccggataaccagtcggtgggccatcgctaacaataactagatcatccaacaatctactcacatatgcatctatataatctttttcatcttgtgagtaccctggatacgaaataaatttattatccgtatttccataataaggtttagtataaacagagagagatgttgccgcatgaacttcagttacagtcgccgttggttggtttatttgacctattactctcctaggtttctctataaacgatggtttaatttgtacattcttaaccatatatccaataaagctcaattcaggaacataaacaaattctttgttgaacgtttcaaagtcgaacgaagagtcacgaataacgatatcggatactggattgaaggttaccgttacggtaatttttgaatcggatagtttaagactgctgaatgtatcttccacatcaaacggagttttaatataaacgtatactgtagatggttctttaatagtgtcattaggagttaggccaatagaaatatcattaagttcactagaatatccagagtgtttcaaagcaattgtattattgatacaattattatataattcttcgccctcaatttcccaaataacaccgttacacgaagagatagatacgtgattaatacatttatatccaacatatggtacgtaactgaatcttcccatacctttaacttctggaagttccaaactcagaaccaaatgattaagcgcagtaatatactgatccctaatttcgaagctagcgatagcctgattgtctggaccatcgtttgtcataactccggatagagaaatatattgcggcatatacaaagttggaatttgactatcgactgcgaagacattagaccgtttaatagagtcatccccaccgatcaaagaattaatgatagtattattcattttctatttaaaatggaaaaagcttacaataaactccgtagagaaatatctataatttgtgagttttccttaaagtaacagcttccgtaaacgccgtctttatctcttagtaggtttattgtatttatgaccttttccttatcttcatagaatactaaaggcaacaaagaaatttttggttcttctctaagagctacgtgagacttaaccatagaagccaacgaatccctacatattttagaacagaaataccctacttcaccacccttgtatgtctcaatactaataggtctaaaaaccaaatcttgattacaaaaccaacacttatcaattacactatttgtcttaatagacacatctgccatagatttataatactttggtagtatacaagcgagtgcttcttctttagcgggcttaaagactgctttaggtgctgaaataaccacatctggaaggcttactcgcttagccatttaattacggaactatttttttatacttctaatgagcaagtagaaaacctctcatctacaaaaacgtactcgtgtccataatcctctaccatagttacacgttttttagatctcatatgtgctaaaaagttttcccatactaattggttactattatttttcgtataatttttaacagtttgaggttttagatttttagttacagaagtgatatcgaatattttatccaaaaagaatgaataattaattgtcttagaaggagtgttttcttggcaaaagaataccaagtgcttaaatatttctactacttcattaatcttttctgtactcagattcagtttctcatcttttacttgattgattatttcaaagactaacttataatcctttttatttattctctcgttagccttaagaaaactagatacaaaatttgcatctacatcatccgtggatatttgatttttttccatgatatccaagagttccgagataatttctccagaacattgatgagacaataatctccgcaatacatttctcaaatgaataagtttattagacacgtggaagtttgactttttttgtacctttgtacatttttgaaataccgactcgcaaaaaatacaatattcatatccttgttcagatactataccgttatgtctacaaccgctacataatcgtagattcatgttaacactctacgtatctcgtcgtccaatattttatataaaaacattttatttctagacgttgccagaaaatcctgtaatatttttagttttttgggctgtgaataaagtatcgccctaatattgttaccgtcttccgccaatatagtagttaaattatccgcacatgcagaagaacaccgcttaggcggattcagtacaatgttatatttttcgtaccaactcatttaaatatcataatctaaaatagttctgtaatatgtctagcgctaatatattgatcataatcctgtgcataaattaagatacaacaatgtctcgaaatcatcgacatggcttcttccatagttagaagatcgtcgtcaaagttagcaacgtgattcatcaacatttgctgttttgaggcagcaaatactgaaccgtcgccattcaaccattcataaaaaccatcgtctgaatccattgataatttcttgtactggtttttgagagctcgcatcaatctagcatttctagctcccggattgaaaacagaaagaggatcgtacatccagggtccattttctgtaaatagaatcgtataatgtcccttcaagaagatatcagacgatccacaatcaaagaattggtctccgagtttgtaacaaactgcggactttaacctatacatgataccgtttagcataatttctggtgatacgtcaatcggagtatcatctattagagatctaaagccggtgtaacattctccaccaaacatattcttattctgacgtcgttctacataaaacatcattgctccattaacgataacaggggaatgaacagcactacccatcacattagttcccaatggatcaatgtgtgtaactccagaacatcttccatagcctatgttaggaggagcgaacaccactcttccactattgccatcgaatgccatagaataaatatccttggaattgatagaaatcggactgtcggatgttgtgatcatcttcataggattaacaactatgtatggtgccgcctgaagtttcatatcgtaactgatgccgtttataggtctagccacagaaaccaacgtaggtctaaatccaactatagacaaaatagaagccaatatctgttcctcatctgtcataacttgagagcatccagtatgaataatcttcattagatggggatctaccgcatcatcatcgttacaataaaaaattcccattctaatgttcataattgcttttctaatcatggtatgcatgtttgctctctgaatctctgtggaaattagatctgatacacctgtaatcactatcggattatcctccgtaagacgattaaccaacaacatataattataagactttacttttctaaattcataaagttgctggattaggctataggtgtctccatgtacatacgcgttctcgagcgcaggaagtttaataccgaatagtgccatcagaataggatgaatatagtaattagtttctggttttctataaataaaagacaaatcttgtgaactagacatatcggtaaaatgcatggattggaatcgtgtagtcgacagaagaatatgatgattagatggagagtatattttatctaactctttgagttggtcaccgattctaggactagctcgagaatgaataagtactaaaggatgagtacatttcacagaaacactagcattgttcaatgtgctctttacatgggtaaggagttgaaatagctcgtttctatttgttctgacaatatttagtttattcataatgttaagcatatcctgaatagtaaagttagatgtgtcatacttgttagtagttagatatttagcaattgcattcccatcatttctcaatctcgtactccaatcatgcgtggatgctacttcgtcgatggaaaccatacaatcctttttgataggctgttgagattgatcatttcctgcacgtttaggtttggtacgttgatttctagcccctgcggatataaagtcatcgtctacaatttgggacaatgaattgcatacactacaagacaaagatttatcagaagtgtgaatatgatcttcatctaccaaagaaagagtttgattagtataactagattttagtcctgcgttagatgttaaaaaaacatcgctattgaccacggcttccattatttatattcgtagtttttactcgaaagcgtgattttaatatccaatcttattacttttggaatcgttcaaaacctttgactagttgtagaatttgatctattgccctacgcgtatactcccttgcatcatatacgttcgtcaccagatcgtttgtttcggcctgaagttggtgcatatctctttcaacattcgacatgagatccttaagggccatatcgtctagattttgttgagatgctgctcctggatttggattttgttgtgctgttgtacatactgtaccaccagtaggtgtaggagtacatacagtggccacaataggaggttgagaaagtgtaaccgttggagtagtacaagaaatacttccatccgattgttgtgtacatgtagttgttggtaacgtctgagaaggttgggtagatggcggcgtcgtcgttttttgatctttattaaatttagagataatatcctgaacagcattgctcggcgtcaacgctggaaggagtgaactcgccggcgcatcagtatcttcagacagccaatcaaaaagattagacatatcagatgatgtattagtttgttgtcgtggttttggtgtaggagcagtactactaggtagaagaataggagccgatgtagctgttggaaccggctgtggagttatatgaatagttggttgtagcggttggataggctgtctgctggcggccatcatattatctctagctagttgttctcgcaactgtctttgataatacgactcttgagactttagtcctatttcaatcgcttcatcctttttcgtatccggatccttttcttcagaataatagattgacgactttggtgtagaggattctgccagcctctgtgagaacttgttaaagaagtccatttaaggctttaaaattgaattgcgattataagattaaatggcagacacagacgatattatcgactatgaatccgatgatctcaccgaatacgaggatgatgaagaagaggaagaagatggagagtcactagaaactagtgatatagatcccaaatcttcttataagattgtagaatcagcatccactcatatagaagatgcgcattccaatcttaaacatatagggaatcatatatctgctcttaaacgacgctatactagacgtataagtctatttgaaatagcgggtataatagcagaaagctataacttgcttcaacgaggaagattacctctagtttcagaattttctgacgaaacgatgaagcaaaatatgctacatgtaattatacaagagatagaggagggttcttgtcctatagtcatcgaaaagaacggagaattgttgtcggtaaacgattttgacaaagatggtctaaaattccatctagactatattatcaaaatttggaaacttcaaaaacgatattagaatttatacgaatatcgttctctaaatgtcacaatcaagtctcgcatgttcagcaatttattgtcgtactttatatcgtgttcattaacgatatcttgcaaaatagtaatgattctatcttccttcgatagatattcttcagagattattgtcttatattctttcttgttatcagatatgaatttgataagactttgaacattattgatacccgtctgtttaattttttctacagatattttagttttggcagattctatcgtatctgtcaatagacatccaacatcgacattcgacgtcaattgtctataaatcaacgtataaattttagaaataacattagcgaattgttgtgcgttgatgtcgttattctgaaacagtatgattttaggtagcattttcttaacaaagagaacgtatttattgttactcagttgaacagatgatatatccagattactaacgcatctgattccgtataccaaactttcagaagaaatggtatacaattgtttgtattcattcaatgtctctttttcagaaattagtttagagtcgaatactgcaataattttcaagagatagttttcatcagataagattttatttagtgtagatatgataaaactattgttttgttggagaacttgatacgccgcgttctctgtagtcgacgctctcaaatgggaaacaatctccattatttttttggaatcggatactatatcttcggtatcttgacgcagtctagtatacatagagttaagagagattagagtttgtacattaagcaacatgtctctaaatgtggctacaaacttttcctttttcacatcatctagtttattatataccgatttcacaacggcaccagatttaaggaaccagaatgaaaaactctgataactacaatatttcatcatagttacgattttatcatcttctatagttggtgtaatagcgcatacctttttctccaagactggaaccaacgtcataaaaatgtttaaatcaaaatccatatcaacatctgatgcgctaagaccagtctcgcgttcaagattatctttactaatggtgacgaactcatcgtataaaactctaagtttgtccattatttatttacagatttagttgtttaatttatttgtgctcttccagagttgggatagtatttttctaacgtcggtattatattattaggatctacgttcatatgtatcataatattaatcatccacgttttgataaatctatctttagcttctgaaataacgtatttaaacaaaggagaaaaatatttagctacggcatcagacgcaataacattttttgtaaatgtaacgtatttagacgacagatcttcgttaaaaagttttccatctatgtagaatccatcggttgttaacaccattcccgcgtcagattgaataggagtttgaatagtttgttttggaaatagatccttcaataacttatagttgggtgggaaaaaatcgattttatcactagactctttcttttttactatcattacctcatgaactatttcttgaatgagtatatgtattttctttcctatatcggacgcgttcattggaaaatataccatgtcgttaactataagaatatttttatcctcgtttacaaactgaataatatcagatgtagttcgtaaacgaactatatcatcaccagcacaacatctaactatatgatatccactagtttcctttagccgtttattatcttgttccatattagcagtcattccatcatttaagaaggcgtcaaaaataatagggagaaatgacattttggattctgttacaactttaccaaaattaaggatatacggacttactatctttttctcaacgtcaatttgatgaacacacgatgaaaatgtgcttctatgagattgatcatgtagaaaacaacaagggatacaatatttccgcatatcatgaaatatattaagaaatcccaccttattatatttccccaaaggatccatgcacgtaaacattatgccgttatcattaataaagacttctttctcatcggatctgtaaaagttgttactgatttttttcattccaggatctagataattaataatgatgggttttctattcttattctttgtattttggcatatcctagaccagtaaacagtttccactttggtaaaatcagcagacttttgaacgctattaaacatggcattaatggcaataactaaaaatgtaaaatatttttctatgttaggaatatggtttttcactttaatagatatatggtttttggccaaaatgatagatatttttttatccgaggatagtaaaatattattagtcgccgtctctataaaaatgaagctagtctcgatatccaattttattctagaattgataggagtcgccaaatgtaccttatacgttatatctcccttgatgcgttccatttgtgtatctatatcggacacaagatctgtaaatagttttacgttattaatcatcacggtatcgccgtcgctagataacgctaatgtaccatccaagtcccaaatggagagatttaactgttcatcgtttagaataaaatgattaccggtcatattaataaagtgttcatcgtatctagataacaacgacttataattaatgtccaagtcttgaactcgctgaatgatcttttttaacccagttagttttagattggtacgaaatatattgttaaactttgattctacagtaatgtccaaatctagttgtggaaatacttccatcaacattgtttcaaacttgataatattattatctacatcttcgtacgatccaaattccggaatagatgtatcgcacgctctggccacccagataaccaaaaagtcacacgctccaggatatacattgtataaaaagctatcgttttttagtagggtttttttctgcgtgtatacgaagggattaaaaatagtattatcaacgtaactatattccaaattattcttatgagaatagataataatatcgtccttaatatctaacaaatttcctaaatatccctttaattgagtcattcgaagcgtcaatagaatatgtctcttaactatttccggctgttgtatatttaaatgacttcgtaaaaaataatatatgggcgacttctcatctatgtaatcatatggagtgagatatagggctcgttctacctcctgccccttacccacctgtaataccaattgcggacttactatatatcgcatatttatatcgtggggtaaagtgaaaatctactaccgatgatgtaagtcttacaatgttcgaaccagtaccagatcttaatttggaggcctccgtagaactaggggaggtaaatatagatcaaacaacacctatgataaaggagaatagcggttttatatcccgcagtagacgtctattcgcccatagatctaaggatgatgagagaaaactagcactacgattctttttacaaagactttattttttagatcatagagagattcattatttgttcagatgcgttgacgctgtaaaagacgtcactattaccaaaaaaaataacattatcgtggcgccttatatagcacttttaactatcgcatcaaaaggatgcaaacttacagaaacaatgattgaagcattctttccagaactatataatgaacatagtaagaaatttaaattcaactctcaagtatccatcatccaagaaaaactcggataccagtttggaaactatcacgtttatgattttgaaccgtattactctacagtagctctggctattcgagatgaacattcatctggcatttttaatatccgtcaagagagttatctggtaagttcattatctgaaataacatatagattttatctaattaatctaaaatctgatcttgttcaatggagtgctagtacgggcgctgtaattaatcaaatggtaaatactgtattgattacagtgtatgaaaagttacaactggtcatagaaaatgattcacaatttacatgttcattggctgtggaatcaaaacttccaataaaattacttaaagatagaaatgaattatttacaaaattcattaacgagttaaaaaagaccagttcattcaagataagcaaacgcgataaggatacgctactaaaatattttacttaggactggagttagaatttatagacgactcatttcgtttatcattgttactattattactattactatcattattagtgttggcattattagtattcttcttgtcatcttgttcagaaatatacagcaatgctatacctaatactaaatacattatcatgctcgcaatggctctaacaacaacgaaccaaaatgaatttggtcgtagcttttgttcacaaaaatacataaagaaatgtctacataaatctatggcgccattggctacttgaaatagcgccagtcctcctacagattttaatatagctgtataacatgacatttattcatcatcaaaagagacagagtcaccatctgtcatatttagattttttttcatgtgttcaaagtatcctctactcatttcattataatagtttatcatacttagaattttaggacggatcaatgagtaagacttgactagatcgtcagtagtaatttgtgcatcgtctattctgcatccgcttcgtcgaataatgtatagcatcgctttgagattctccatagctatcaagtctttatacaatgacatggaaatatctgtgaatactttatacttctccaacatcgatgccttaacatcatcgcctactttagcattgaaaatacgttctattgtgtagatggatgtagcaagatttttaaacaacaatgccatcttacacgatgattgcctcaagtctccaatcgtttgtttagaacgattagctacagagtccaatgcttggctgactagcatattattatctttagaaattgtattcttcaatgaggcgtttatcatatctgtgatttcgttagtcatattacagtctgactgggttgtaatgttatccaacatatcacctatggatacggtacacgtaccagcatttgtaataatcctatctaagatgttgtatggcattgcgcagaaaatatcttctcctgtaatatctccactctcgataaatctactcagattattcttaaatgccttattctctggagaaaagatatcagtgtccatcatttcattaatagtatacgcagaaaagataccacgagtatcaattctatccaagatacttatcggttccgagtcacagataatggtttcctctccttcgggagatcctgcatagaaatatctaggacaatagtttctatactgtctgtaactctgataatctctaaagtcactaactgataccatgaaattgagaagatcaaacgctgaagtaattaatttttctgcctcgtttttactacaactagttttcatcaatgtagtgacgatgtattgtttagttacttttggtctaatactgatgatagagatattattgcttcccataatggatcttctagtagtcaccttaaagcccattgatgcgaatagcagatagataaagtcttggtatgactcctttctaatatagtacggactacctttgtcacccaactttatacccacataagccataacaacctctttaatagccgtttcatgaggtttatcagccatgagcctgagtagttggaagaatctcatgaatcccgtctcagaaagtcctatatgcatgatagatttatctttcctgggaaactctcgtatagtcatagatgaaatactctttaaagtttctgaaataagattagtaacagtcttacctccgactactctaggtaacaaacaaactctaataggtgttttctctgcggagataatatcagaaaggatagagcaataagtagtattattgtgattataaagaccgaatacataacaggtagaatttataaacatcatgtcctgaaggtttttagacttgtattcctcgtaatccataccgtcccaaaacatggatttggtaactttgatagccgtagatctttgttccttcgccaacaggttaaagaaattaataaagaatttgttgtttctatttatgtccacaaattgcacgtttggaagcgccacggttacattcactgcagcattttgaggatcgcgagtatgaagtacgatgttattgtttactggtatatctggaaagaaatctaccagtctaggaataagagattgatatcgcatagaaatagtaaagtttataatctcatcatcgaagagcattttgttaccattgtaataaatatccactctgtcatatgtataaatgaagtactgttcaaacatgatgagatgtttatatgttggcatagtagtgagatcgacgtttggtaatggcaatgtattaagattaactccataatgtctagcagcatctgcgatgttataagcgtcgtcaaagcggggtcgatcttgtattgttatatattgtctaacacctataagattatcaaaatcttgtctgcttaatacaccgttaacaatttttgccttgaattcttttattggtgcattaataacatccttatagaggatgttaaacaaataagtgttatcaaagttaagatctggatatttcttttctgctagaacatccattgagtcggagccatctggtttaatataaccaccgataaatctagctctgtattctgtatccgtcaatctaatattaagaaggtgttgagtgaaaggtggaagatcgtaaaagctgtgagtattaatgataggattagtttccgaactaatgttaattggggtattaataatatctatatttccagcgttaagtgtaacattaaacagttttaattcacgtgacgtggtatcaattaaataattaatgcccaatttggatatagcagcctgaagctcatcttgtttagttacggatcctaatgagttattaagcaatatatcgaacggatgaacgaaggttgttttaagttggtcacatactttgtaatctagacatagatgcggaagaacggtagaaactatacgaaataaatattcagagtcctctaattgatcaagagtaactattgacttaataggcatcatttatttagtattaaatgacgaccgtaccagtgacggatatacaaaacgatttaattacagagttttcagaagataattatccatctaacaaaaattatgaaataactcttcgtcaaatgtctattctaactcacgttaacaacgtggtagatagagaacataatgccgccgtagtgtcatctccagaggaaatatcctcacaacttaatgaagatctatttccagatgatgattcaccggccactattatcgaacgagtacaacctcatactactattattgacgatactccacctcctacgtttcgtagagagttattaatatcggaacaacgtcaacaacgagaaaaaagatttaatattacagtatcgaaaaatgctgaagcaataatggaatctagatctatgataacttctatgccaacacaaacaccatccttgggagtagtttatgataaagataaaagaattcagatgttagaggatgaagtggttaatcttagaaatcaacgatctaatacaaaatcatctgataatttagataattttaccaaaatactatttggtaagactccgtacaaatcaacagaagttaataagcgtatagccatcgttaattatgcaaatttgaacgggtcccccttatcagtcgaggacttggatgtttgttcggaggatgaaatagatagaatctataaaacgattaaacaatatcacgaaagtagaaaacgaaaaattatcgtcactaacgtgattattattgtcataaacattatcgagcaggcattgctaaaactcggatttgaagaaatcaaaggactgagtaccgatatcacttcagaaattatcgatgtggagatcggagatgactgcgatgctgtagcatctaaactaggaatcggtaacagtccggttcttaatattgtattgtttatactcaagatattcgttaaacgaattaaaattatttaatttaatacattcccatatccagacaacaatcgtctggattaatctgttcctgtcgtctcataccggacgacatattaatctttttattagtgggcatctttttagatggtttctttttcccagcattaactgagtcgatacctagaagatcgtgattgatctctccgaccattccacgaacttctaattggccgtctctgacggtaccataaactattttaccagcattagtaacagcttggacaatctgaccatccatcgcattgtacgatgtagtagtaactgttgttctacgtctaggagcaccagaagtatttttggagcccttggatgttgatgtagaagaagacgaggattttgattttggtttacatgtaatacattttgaactctttgattttgtatcacatgcgccggcagtcacatctgtttgagaattaagattattgttgcctcctttgacggctgcatctccaccgatttgcgctagtagatttttaagctgtggtgtaatcttattaactgtttcgatataatcatcgtaactgcttctaacggctaaattttttttatccgccatttagaagctaaaaatatttttatttatgcagaagatttaactagattatacaatgaactaatatgatccttttccagattatttacaaacttggtattttttggttctggaggaggcgaatttaaattcggacttggattcggattttgtaagttcttgatcttattatacatcgagtataggatggcgacagtaactgctacacaaataccgatcaaaagaagaataccaatcatttattgacaataacttcactattgatcaagtatgcaatatatcatcttttcactaaataagtagtaataatgattcaacaatgtcgagatatatggacgataataatttagttcatggaaatatcgctatgattggtgtgaatgactccgctaactctgtggggtgcgcagtgctttccccacatagaataaattagcattccgactgtgataataataccaagtataaacgccataatactcaatactttccatgtacgagtgggactggtagacttactaaagtcaataaaggcgaagatacacgaaagaatcaaaagaatgattccagcgattagcacgccggaaaaataatttccaatcataagcatcatgtccatttaactaataaaaattttaaatcgccgaatgaacaaagtggaatataaaccatataaaaacaatagtttgtactgcaaaaataatatctatttttgttttcgaagatatggtaaaattaaatagtagtacacagcatgttataactaacagcagcaacggctcgtaattacttatcatttactagacgaaaaggtggtgggatattttcttgctcaaataatacgaatatatcacccatccattttatgcgatgtttatatactctaatctttaatagatctatagacgacgggtttaccaacaatatagattttatcgattcatctaatttaaacccttccttaaacgtgaatgatctattatctggcataacgatgaccctacctgatgaatcggacaatgtactgggccatgtagaataaattatcaacgaattatcgtctacgaacatttatatcatttgttttaattttaggacgcgaataaatggatataaaatagaaaataacagatattacaaccagtgttatggccgcgcccaaccaggtaggcagttttattttatcttttactacaggttctcctggatgtacgtcaccaacggcggacgtagttctagtacaattagacgtaagttccgcttgggaattttttaacgctaaagagttaacgttaatcgtgcacccaacgtatttacatctagttcgttgaacatcttgattataatataaccattttctatctctagattcgtcagtgcactcatgtaaccaacataccctaggtcctaaatatttatctccggaattagattttggataattcgcgcaccaacaatttctatttcctttatgatcgttacaaaagacgtataatgccgtatccccaaaagtaaaataatcaggacgaataattctaataaactcagaacaatatctcgcatccatatgtttggagcaaatatcggaataagtagacatagccggtttccgttttgcacgtaaccattctaaacaattggggtttccaggatcgtttctacaaaatccagtcatgaaatcgtcacaatgttctgtcttgtaattattattaaatatttttggacagtgtttggtatttgtcttagaacaacattttgccacgctatcactatcgcccaggagataatccttttttataaaatgacatcgttgcccggatgctatataatcagtagcgtgttttaaatccttaatatattcaggagttacctcgttctgataatagattaatgatccaggacgaaatttgaaagaactacatggttctccatgaattaatacatattgtttagcaaattcaggaactataaaactactacaatgatctatcgacataccatctatcaaacaaaacttgggtttaatttctcccggagatgtttcataatagtacgtataactttcttctgcaaacttaacagctctattatattcaggataattaaaacctaattccatatatttgtctcgtatatctgctattcctggtgctattttgattctattaagagtaacagctgcccccattcttaataatcgtcagtatttaaactgttaaatgttggtatatcaacatctaccttatttcccgcagtataaggtttgttgcaggtatactgttcaggaatggttacatttatacttcttctatagtcctgtctttcgatgttcatcacatatgcaaagaacagaataaacaaaataatgtaagaaataatattaaatatctgtgaattcgtaaatacattgattgccataataattacagcagctacaatacacacaatagacattcccacagtgttgccattacctccacgatacatttgagttactaagcaataggtaataactaagctagtaagaggcaatagaaaagatgagataaatatcatcaatatagagattagaggagggctatatagagccaagacgaacaaaatcaaaccgagtaacgttctaacatcattatttttgaagattcccaaataatcattcattcctccataatcgttttgcatcatacctccatctttaggcataaacgattgctgctgttcctctgtaaataaatctttatcaagcactccagcacccgcagagaagtcgtcaagcatattgtaatatcttaaataactcatttatatattaaaaaatgtcactattaaagatggagtataatctttatgccgaactaaaaaaaatgacttgtggtcaacccctaagtctttttaacgaagacggggatttcgtagaagttgaaccgggatcatcctttaagtttctgatacctaagggattttacgcctctccttccgtaaagacgagtctagtattcgagacattaacaacgaccgataataaaatcactagtatcaatccaacaaatgcgccaaagttatatcctcttcaacgcaaagtcgtatctgaagtagtttctaatatgaggaaaatgatcgaatcaaaacgtcctctatacatcactcttcacttggcgtgtggatttggtaagactattaccacgtgttatcttatggctacacacggtagaaaaaccgtcatttgcgtacccaataaaatgttaatacatcaatggaagacacaggtagaggcagtcggattggaacataagatatccatagatggagtaagtagtctattaaaggaactaaagactcaaagtccggatgtattaatagtagtcagtagacatctgacaaacgatgccttttgtaaatatatcaataagcattatgatttgttcatcttggatgaatcacatacgtataatctgatgaacaatacagcagttacaagatttttagcgtattatcctccgatgatgtgttattttttaactgctacacctagaccatctaaccgaatttattgtaacagtattattaatattgccaagttatccaatctaaaaaaaactatctatgcagtagatagtttttttgagccatattccacagataatattagacatatggtaaaacgactagatggaccatctaataaatatcatatatataccgagaagttattatctgtagacgagcctagaaatcaacttattcttgataccctggtagaagaattcaagtcaggaactattaatcgcattttagttattactaaactacgtgaacatatggtattattctacaaacgattattagattttttcggaccagaggttgtatttataggagacgcccaaaatagacgtactccagatatggtcaaatcaatcaaggaactaaatagatttatattcgtatccaccttattttattccggtactggtttagatattcctagtttggattcgttgttcatttgctcggcagtaatcaacaatatgcaaatagagcaattactagggagggtatgtcgagaaacagaactattagataggacggtatatgtatttcctaacacatccatcaaagaaataaagtacatgataggaaatttcatgcaacgaattattagtctgtctgtagataaactaggatttaaacaaaaaagttatcggaaacatcaagaatccgatcccacttctgcatgtacaacatcatccagagaagaacgtgtattaaatagaatatttaactcgcaaaatcgttaagaagtttaagcgacgatccgcatgctgcgcaggccagtgtattacccctcatagtattaatataatccaatgatacttttgtgatgtcggaaatcttaaccaatttagactgacaggcagaacacgtcatgcaatcatcatcgtcatcgataactgtagtcttgggcttctttttgcgactcttcattccggaacgcacattggtgctatccatttaggtagtaaaaaataagtcagaatatgccctataacacgatcgtgcaaaacctggtatatcgtctctatctttatcacaatatagtgtatcgacatttttattattattgacctcgtttatcttggaacatggaatgggaacatttttgttatcaacggccatctttgccttaattccagatgttgtaaaattataactaaacagtctatcatcgacacaaatgaaattcttgtttagacgtttgtagtttacgtatgcggctcgttcgcgtctcattttttcagatattgcaggtactataatattaaaaataagaatgaaataacataggattaaaaataaagttatcatgacttctagcgctgatttaactaacttaaaagaattacttagtctgtacaaaagtttgagattttcagattctgcggctatagaaaagtataattctttggtagaatggggaacatctacttactggaaaataggcgtgcaaaaggtagctaatgtcgagacgtcaatatctgattattatgatgaggtaaaaaataaaccgtttaatattgatccgggctattacattttcttaccggtatattttgggagcgtctttatttattcgaagggtaaaaatatggtagaacttggatctggaaactcttttcaaataccagatgatatgcgaagtgcgtgtaacaaagtattagacagcgataacggaatagactttctgagatttgttttgttaaacaatagatggataatggaagatgctatatcaaaatatcagtctccagttaatatatttaaactagctagtgagtacggattaaacatacccaaatatttagaaattgaaatagaggaagacacattatttgacgacgagttatactctattatagaacgctctttcgatgataaatttccaaaaatatccatatcgtatattaagttgggagaacttagacggcaagttgtagactttttcaaattctcattcatgtatattgagtccatcaaggtagatcgtataggagataatatttttattcctagcgttataacaaaatcaggaaaaaagatattagtaaaagatgtagaccatttaatacgatccaaggttagagaacatacatttgtaaaagtaaaaaagaaaaacacattttccattttatacgactatgatggaaacggaacagaaactagaggagaagtaataaaacgaattatagacactataggacgagactattatgttaacggaaagtatttctctaaggttggtagtgcaggcttaaagcaattgactaataaattagatattaatgagtgcgcaactgtcgatgagttagttgatgagattaataaatccggaactgtaaaacgaaaaataaaaaaccaatcagcatttgatttaagcagagaatgtttgggatatccagaagcggattttataacgttagttaataacatgcggttcaaaatagaaaattgtaaggttgtaaatttcaatattgaaaatactaattgtttaaataacccgagtattgaaactatatatggaaactttaaccagttcgtctcaatctttaatgtcgtcaccgatgtcaaaaaaagattattcgagtgaaataatatgcgcctttgatataggtgcaaaaaatcctgccagaactgttttagaagtcaaggataactccgttagggtattggatatatcaaaattagactggagttctgattgggaaaggcgcatagctaaagatttgtcacaatatgaatacactacagttcttctagaacgtcagcctagaaggtcgccgtatgttaaatttatctattttattaaaggctttttatatcatacatcggctgccaaagttatttgcgtctcgcctgtcatgtctggtaattcatatagagatcgaaaaaagagatcggtcgaagcatttcttgattggatggacacattcggattgcgagactccgttccggatagacgcaaattagacgatgtagcggatagtttcaatttggctatgagatacgtattagataaatggaatactaattatacaccttataataggtgtaaatctagaaattacataaaaaaaatgtaataacgttagtaacgccattatggataatctatttacctttctacatgaaatagaagatagatatgccagaactatttttaactttcatctaataagttgcgatgaaataggagatatatatggtcttatgaaagaacgcatttcctcagaggatatgtttgataatatagtgtataataaagatatacatcctgccattaagaaactagtgtattgcgacatccaacttactaaacacattattaatcagaatacgtatccggtatttaacgattcttcacaagtgaaatgttgtcattatttcgacataaactcagataatagcaatattagctctcgtacagtagagatatttgagagggaaaagtcatctcttgtatcatatattaaaactaccaataagaagagaaaggtcaattacggcgaaataaagaaaactgttcatggaggcactaatgcaaattacttttccggtaaaaagtctgacgagtatctgagtactacagttagatccaacattaatcaaccttggatcaaaaccatctctaagaggatgagagttgatatcattaatcactctatagtaacgcgtggaaaaagctctatattacaaactatagaaattatttttactaatagaacatgtgtgaaaatattcaaggattctactatgcacattattctatccaaggacaaggatgaaaaggggtgtatacacatgattgacaaattattctatgtctattataatttatttctgttgttcgaagatatcatccaaaacgagtactttaaagaagtagctaatgttgtaaaccacgtactcacggctacggcattagatgagaaattattcctaattaagaaaatggctgaacacgatgtttatggagttagcaatttcaaaatagggatgtttaacctgacatttattaagtcgttggatcataccgttttcccctctctgttagatgaggatagcaaaataaagttttttaaggggaaaaagctcaatattgtagcattacgatctctggaggattgtataaattacgtgactaaatccgagaatatgatagaaatgatgaaggaaagatcgactattttaaatagcatagatatagaaacggaatcggtagatcgtctaaaagaattgcttctaaaatgaaaaaaaacactaattcagaaatggatcaacgactagggtataagtttttggtgcctgatcctaaagccggagttttttatagaccgttacatttccaatatgtatcgtattctaattttatattgcatcgattgcatgaaatcttgaccgtcaagcggccactcttatcgtttaagaataatacagaacgaattatgatagaaattagcaatgttaaagtgactcctccagattactcacctataatcgcgagtattaaaggtaagagttatgacgcattagccacgttcactgtaaatatctttaaagaggtaatgaccaaagagggtatatccatcactaaaataagtagttatgagggaaaagattctcatttgataaaaattccgctactaataggatacgggaataaaaatccacttgatacagccaagtatcttgttcctaatgtcataggtggagtctttatcaataaacaatctgtcgaaaaagtaggaattaatctagtagaaaagattacaacatggccaaaatttagggttgttaagccaaactcattcactttctcgttttcctccgtatcccctcctaatgtattaccgacaagatatcgccattacaagatatctctggatatatcacaattggaagcgttgaatatatcatcgacaaagacatttataacggtcaatattgttttgctgtctcaatatttatctagagtgagtctagaattcattagacgtagtttatcatacgatatgcctccagaagttgtctatctagtaaacgcgataatagatagtgctaaacgaattactgaatctattactgactttaatattgatacatacattaatgacctggtggaagctgaacacattaaacaaaaatctcagttaacgatcaacgagttcaaatatgaaatgctgcataactttttacctcatatgaactatacacccgatcaactaaagggattttatatgatatctttactaagaaagtttctctactgtatcttccacacttctagatatccagatagagattcgatggtttgtcatcgcatcctaacgtacggcaaatattttgagacgttggcacatgatgaattagagaattacataggcaacatccgaaacgatatcatgaacaatcacaagaacagaggcacttacgcggtaaacattcatgtactaacaactcccggacttaatcacgcgttttctagcttattgagtggaaagttcaaaaagtcagacggtagttatcgaacacatcctcactattcatggatgcagaatatttctattcctaggagtgttggattttatccggatcaagtaaagatttcaaagatgttttctgtcagaaaataccatccaagtcaatatctttacttttgttcatcagacgttccggaaagaggtcctcaggtaggtttagtatctcaattgtctgtcttgagttccattacaaatatactaacgtctgagtatttggatttggaaaagaaaatttgtgagtatatcagatcatattataaagatgatataagttactttgaaacaggatttccaatcactatagaaaatgctctagtcgcatctcttaatccaaatatgatatgtgattttgtaactgactttagacgtagaaaacggatgggattcttcggtaacttggaggtaggtattactttagttagggatcacatgaatgaaattcgcattaatattggagcgggaagattagtcagaccattcttggttgtggataacggagagctcatgatggatgtgtgtccggagttagaaagcagattagacgacatgacattctctgacattcagaaagagtttccgcatgtcatcgaaatggtagatatagaacaatttacttttagtaacgtatgtgaatcggttcaaaaatttagaatgatgtcaaaggatgaaagaaagcaatacgatttatgtgactttcctgccgaatttagagatggatatgtagcatcttcattagtgggaatcaatcacaattctggacccagagctattcttggatgtgctcaagctaaacaagctatctcttgtctgagctcggatatacgaaataaaatagacaatggaattcatttgatgtatccagagaggccaatcgtgattagtaaggctttagaaacttcaaagattgcggctaattgcttcggccaacatgttactatagcattaatgtcgtacaaaggtatcaatcaagaggatggaattatcatcaaaaaacaatttattcagagaggcggtctcgatattgttacagccaagaaacatcaagtagaaattccattggaaaactttaataacaaagaaagagataggtctaacgcctattcaaaattagaaagtaatggattagttagactgaatgctttcttggaatccggagacgctatggcacgaaatatctcatcaagaactcttgaagatgattttgctagagataatcagattagcttcgatgtttccgagaaatataccgatatgtacaaatctcgcgttgaacgagtacaagtagaacttactgacaaagttaaggtacgagtattaaccatgaaagaaagaagacccattctaggagacaaatttaccactagaacgagtcaaaagggaacagtcgcgtatgtcgcggatgaaacggaacttccatacgacgaaaatggtatcacaccagatgtcattattaattctacatccatcttctctagaaaaactatatctatgttgatagaagttattttaacagccgcatattctgctaagccgtacaacaataagggagaaaaccgacctgtctgttttcctagtagtaacgaaacatccatcgatacatatatgcaattcgctaaacaatgttatgagcattcaaatccgaaattgtccgatgaagaattatcggataaaatcttttgtgaaaagattctctatgatcctgaaacggataagccttatgcatccaaagtattttttggaccaatttattacttgcgtctgaggcatttaactcaggacaaggcaaccgttagatgtagaggtaaaaagacgaagctcattagacaggcgaatgagggacgaaaacgtggaggaggtatcaagttcggagaaatggagagagactgtttaatagcgcatggtgcagccaatactattacagaagttttgaaagattcggaagaagattatcaagatgtgtatgtttgtgaaaattgtggagacatagcagcacaaatcaagggtattaatacatgtcttagatgttcaaaacttaatctctctcctctcttaacaaaaattgataccacgcacgtatctaaagtatttcttactcaaatgaacgccagaggcgtaaaagtcaaattagatttcgaacgaaggcctccttcgttttataaaccattagataaagttgatctcaagccgtcttttctggtgtaatattctagtttggtagtagatacatatcaatatcatcaaattcgagatccgaattataaaatgggcgtggattgttaactatagaatcggacgtctgatattcgaaaatctgtggagtttcaggttttggtggaggtgtaactgctacttgggatactgaagtctgatattcagaaagctgtggatgttctggttcggcatccaccgatggtgtcacatcactaatcggttcggtaacgtctgtggatggaggtgctacttctacagaacctgtagcctcagttgtcaacggagatacatttttaatgcgagaaaatgtataatttggtaatggtttcttatgtggatctgaagaagaggtaagatatctactagaaagataccgatcacgttctagttctcttttgtagaacttaactttttctttctccgcatctagttgatattccaacctcttcacgttactacgttcagattccaattcacgttcgcatgggttacctccgcagtttttacgagcgatttcacgttcagccttcatgcgtctctccctctctctatcgagtttatcagagcagtctttctgaaggcgatcgaactccataaatttctccaacgctttgattgtttccatagatttccgaagttcagcttttaggactgtgattctttttctttcgaattcacagctggatgtacaaccgtttccattaccgccatctctaagtttcttttctagatcggcaacatttcatccccatgccttttacattcctcgagtctactgtcgtcgaaatatcgttccagctccttttcgacatcaataactttagcacgttgtctctcaagctctcttttgtagttatctgattccctggcacgtttaagatcttcatgcaattgagtcagctcttaacttcctctcttgcttcttcgtcatagtacgcgcaatcactgtgagatccattgttaccacgtctacactcggcgagctcgcgtttaagagattcaatttcccgtttgtattggtccatgtttccattgctaccaccattagatttacaggctgctagttgtcgttcgagatcagaaatacgggttttcttggaattgatttcgtcgatgtacttggcatcgaaacacttattaagttctttttccaattctacgattttatttctttcgcgagtcaattccctcctgtagtaactatctgttttgtcagattcacgctctctacgtagactttcttgcaagttactaatttgttccctagcacgtccgagtttagttttatatgctgaatagagttctgattcatcctttgagcagatctctagcgatcgtttaagattcctaattctagtctttagcctatttacctcctcagaagatgttccgttaccgttgcgtttacactcgttaagctgtctatcaagatccatgattctatctctaagacgttgcatctctctttccatatcagcattgctttcattattacgtctgcagtcactcaactgtctttcaatatctgagattctatctctaagacgtcgcatctctctctgtttcggcattggtttcattattacgtttacagtcgttcaactgtctttcaagatctgatattctagattggagtctgctaatctctgtagcattttcacggcattcactcagttgtctttcaagatctgaaattttagattggagtctgctaatctctgtaagatttcctcctccgctctcgatgcagtcggtcaacttattctctagttctctaatacgcgaacgcagtgcatcaacttcttgcgtgtcttcctggttgcgtgtacattcatcgagatctctaacgcgtcgtcgttcttcctcaagttctctgcgtactacagaaagcgtgtccctatcttgttgatatttagcaatttctgattctagagtactgattttgcttacgtagttactaatagttgtcttggccttatcaagatcctccttgtatttgtcgcattccttgatatccctacgaagtctggacagttcccattcgacattacgacgtttatcgatttcagctcggagatcgtcatcgcgttgttttagccacatacgactgagttcaagttctcgttgacaagatccatctacttttccattcctaatagtatccagttccttttctagttctgaacgcatttctcgttccctatcaagcgattctctcaattctcggatagtcttcttatcaatttctaataaatctgaaccatcatctgtcccattttgaatatccctgtgttctttgatctcttttgtaagtcggtcgattctttcggttttataaacagaatccctttccaaagtcctaatcttactgagtttatcactaagttctgcattcaattcggtgagttttctcttggcttcttccaactctgttttaaactctccactatttccgcattcttcctcgcatttatctaaccattcaattagtttattaataactagttggtaatcagcgattcctatagccgttcttgtaattgtgggaacataattaggatcttctaatggattgtatggcttgatagcatcatctttatcattattagggggatggacaaccttaattggttggtcctcatctcctccagtagcgtgtggttcttcaataccagtgttagtaataggcttaggcaaatgcttgtcgtacgcgggcacttcctcatccatcaagtatttataatcgggttctacttcagaatattcttttctaagagacgcgacttcgggagttagtagaagaactctgtttctgtatctatcaacgctggaatcaatactcaagttaaggatagcgaatacctcatcgtcatcatccgtatcttctgaaacaccatcatatgacatttcatgaagtctaacgtattgataaatagaatcagatttagtattaaacagatccttaacctttttagtaaacgcatatgtatattttagatctccagatttcataatatgatcacatgccttaaatgtcagtgcttccatgatataatctggaacactaatgggtgacgaaaaagatacagcaccatatgctacgttgataaataaatctgaaccactaagtagataatgattaatgttaagaaagaggaaatattcagtgtataggtatgtcttggcgtcatatcttgtactaaacacgctaaacagtttgttaatgtgatcaatttccaatagattaattagagcagcgggaataccaacaaacatattaccacatccgtattttctatgaatatcacatatcatgttaaaaaatcttgatagaagagcgaatatctcgtctgacttaatgagtcgtagttcagcagcaacataagtcataactgtaaatagaacatactttcctgtagtgttgattctagactccacatcaacaccattattaaaaatagttttatatacatctttaatctgctctccgttaatcgtcgaacgttctagtatacggaaacactttgatttcttatctgtagttaatgacttagtgatatcacgaagaatattacgaattacatttcttgtttttcttgagagacctgattcagaactcaactcatcgttccatagtttttctacctcagtggcgaaatctttggagtgcttggtacatttttcaataaggttcgtgacctccatttattataaaaaatttattcaaaacttaactacaatcgggtaattataagatcgtagatctcccatgtggcggaatactaccatctatcgcatgtggatggacagtaggtaatggccatgggaacagtaatgtttgcatatttatctttcttgctagtattactgcatattgtcccaatgtttcgatgtgatgttctaacctatcaactgccgctgtatcacaacaatagtgtccgatgaaattaagattatgatccaatgtgtttaatatatgattatcaagtcttatacgatccgcgtcttttttgacaggatcaggttcttctacaggaagaagtttcggcctcttatgatattcatgtctgggaaacggtggtctagggtgaggctccggtatcggagtgggttttggattataatcatcatcgtctatgacatcatcttcgacttcgatatttattttgctatcttgatgatgtcctgtatcagttgcattttcagcactcgactgaatattagcgcattcattgtctattattaccatatttctaaacccaaaatgtatgtgttgaacatcagtactatcgttgatgagtcttatagcatgaattcgcttatcgttatcgggtttatcttctgtcaccttagcaattccttttttattaaactctacataatcatatccatttctattgtttgttctaatataaacgagtatagcatcattgctaaatttttcaatagtatcaaaaacagaatatcctaaaccatataatatatattcaggaacactcaaactaaatgtccaggattctcctaaatacgtaaactttaatagtgcgaaatcattcaaaaatctaccacttatagatagatagtacataaatgcgtatagtagtctacctatctctttattatgaaaaccggcattacgatcatatatgtcgtgatatacctgtgatccgtttacgttaaaccataaatacatgggtgatcctataaacatgaatttatttctaattctcagagctatagttaattgaccgtgtaatatttgcttacatgcatacttgatacgcttattaataagatttttatcattgctcgttatttcagaatcgtatatataaggagtaccatcgtgattcttaccagatattatacaaaatactatatataaaatatattgacccacgttagtaatcatataaatgtttaacgttttaaattttgtattcaatgatccattatcatacgctatcatggtcttgtaatattcattctttaaaatataatattgtgttagccattgcattggagctcctaatggagattttctattctcatccattttaggataggctttcataaagtccctaataacttcgtgaataatgtttctatgttttctactgatgcatgtatttgcttcgatttttttatcccatgtttcatctatcatagatttaaacgcagtaatgctcgcaacattaacatcttgaaccgttggtacaattccgttccataaatttataatgttcgccatttatataactcattttttgaatatacttttaattaacaaaagagttaagttactcatatggacgccgtccagtctgaacatcaatctttttagccagagatatcatagccgctcttagagtttcagcgtgattttccaacctaaatagaacttcatcgttgcgtttacaacacttttctatttgttcaaactttgttgttacattagtaatctttttttccaaattagttagccgttgtttgagagtttcctcattgtcgtcttcatcggctttaacaattgcttcgcgtttagcctctggctttttagcagcctttgtagaaaaaaattcagttgctggaattgcaagatcgtcatctccggggaaaagagttccgtccatttaaagtacagattttagaaactgacactctgcgttatttatatttggtacaacacatggattataaatattgatgttaataacatcagaaaatgtaaagtctatacattgttgcatcgtgttaaattttctaatggatctagtattattgggtccaacttctgcctgaaatccaaatatggaagcggatacaaaaccgtttcctggataaaccacacatctccacttttgctttacatcagaaattgtgtcgttgacatcttgaactctcctatctaatgccggtgttccacctatagattttgaatattcgaatgctgcatgagtagcattaaattccttaatattgccataattttcatatattgagtaaccctggataaaaagtaaacacaccgcagccgtcgctaccacaataaaaaaaattgatagagagttcatttataatctattagaagctgacaaaatttttttacacgcatcagacaatgctttaataaatagttcaacatctacttttgtcatatcgaaccgatggtatgattctaacctagaattacatccgaaaaagttgactatgttcatagtcattaagtcattaacaaacaacattccagactctggattataagacgatactgtttcgtcacaattacctaccttaatcatgtgattatgaatattggctattagagcaccttctaagaaatctataatatctttgaaacacgatttaaaatcaaaccacgaatatacttctacgaagaaagttagtttacccataggagaaataactataaatggagatctaaatacaaaatccggatctatgatagttttaacattattatattctctattaaatacctccacatctaaaaatgttaattttgaaactatgtcttcgtttattaccgtacctgaactaaacgctataagctctattgtttgagaactctttaaacgatattcttgaaatacatgtaacaaagtttcctttaactcggtcggtttatctaccatagttacagaatttgtatccttatctataatataataatcaaaatcgtataaagttatataattatcgcgttcagattgtgatcttttcaaatagactaaaaaccccatttctctagtaagtatcttatgtatatgtttgtaaaatatcttcatggtgggaatatgctctaccgcagttagccattcctcattgacagcggtagatgtattagacaaaactattccaatgtttaacaagggccattttacgagattattaaatccttgtttgataaatgtagccaatgagggttcgagttcaacgacgattgaattctcttcccgcggatgctgcatgatgaacgacgggatgttgttcgattgatttggaattctttttcgactttttgtttatattaaatattttaaaatttatagcggatagcaattcatgtaccacggataatgtagacgcgtattgcgcatcgatatctttattattagataaatttatcaataaatgtgagaagtttgcctcgttaaggtcttccatttaaatattatataaacatttgtgtttgtatcttattcgtcttttatggaatagttttttactagtaaagctgcaattacacactttgtccgtaaaacataaatataaacaccagcttttatcaatcgttccaaaaagtcgacggcggacatttttaacatggcatctattttaaatacacttaggtttttggaaaaaacatcattttataattgtaacgattcaataactaaagaaaagattaagattaaacataagggaatgtcatttgtattttataagccaaagcattctaccgttgttaaatacttgtctggaggaggtatatatcatgatgatttggttgtattggggaaggtaacaattaataatctaaagatgatgctattttacatggatttatcatatcatggagtgacaagtagtggagcaatttacaaattgggatcgtctatcgatagactttctctaaataggactattgttacaaaagttaataattatgatgatacattttttgacgacgatgattgatcgctattgcacaattttgtttttgtactttctaatatagtgtttaggttctttttcatatgagaatattgatttactaaaatatctatgtttaacttttgttctatgacgtccttatcggcggtatcggtacatatacgtaattcaccttcacaaaatacggagtcttcgataataatagccaatcgattattggatctagctgtctgtatcatattcaacatgtttaatatatcctttcgtttcccctttacaggcatcgatcgtagcatattttccgcgtctgatatggaaatgttaaaactacaaaaatgcgtaatgttagcccgtcctaatattggtacgtgtctataagtttggcatagtagaataatagacgtgtttaaatgccttccaaagtttaagaattctattagagtattgcattttgatagtttatcgcctacatcatcaaaaataagtaaaaagtgtgctgattttttatgattttgtgcgacagcaatacatttttctatgttacttttagttcgtatcagattatattctagagattcctgactactaacgaaattaatatgatttggccaaatgtatccatcataatctgggttataaacgggtgtaaacaagaatatatgtttatattttttaactagtgtagaaaacagagatagtaaatagatagtttttccagatccagatcctcctgttaaaaccattctaaacggcatttttaataaattttctcttgaaaattgtttttcttggaaacaattcataattatatttacagttactaaattaatttgataataaatcaaaatatggaaaactaaggttgttagtagggaggagaacaaagaaggcacatcgtgatataaataacatttattatcatgatgacaccagaaaacgacgaagagcagacatctgtgttctccgctactgtttacggagacaaaattcagggaaagaataaacgcaaacgcgtgattggtctatgtattagaatatctatggttatttcactactatctatgattaccatgtccgcgtttctcatagtgcgcctaaatcaatgcatgtctgctaacgaggctgctattactgacgccgctgttgccgttgctgctgcatcatctactcatagaaaggttgcgtctagcactacacaatatgatcacaaagaaagctgtaatggtttatattaccagggttcttgttatatattacattcagactaccagttattctcggatgctaaagcaaattgcactgcggaatcatcaacactacccaataaatccgatgtcttgactacctggctcattgattatgttgaggatacatggggatctgatggtaatccaattacaaaaactacatccgattatcaagattctgatgtatcacaagaagttagaaagtatttttgtgttaaaacaatgaactaatatttatttttgtacattaataaatgaaatcgcttaatagacaaactgtaagtaggtttaagaagttgtcggtgccggccgctataatgatgatactctcaaccattattagtggcataggaacatttctgcattacaaagaagaactgatgcctagtgcttgcgccaatggatggatacaatacgataaacattgttatttagatactaacattaaaatgtctacagataatgcggtttatcagtgtcgtaaattacgagctagattgcctagacctgatactagacatctgagagtattgtttagtattttttataaagattattgggtaagtttaaaaaagaccaatgataaatggttagatattaataatgataaagatatagatattagtaaattaacaaattttaaacaactaaacagtacgacggatgctgaagcgtgttatatatacaagtctggaaaactggttaaaacagtatgtaaaagtactcaatctgtactatgtgttaaaaaattctacaagtgacaacaaaaaatgaattaataataagtcgttaacgtacgccgccatggacgccgcgtttgttattactccaatgggtgtgttgactataacagatacattgtatgatgatctcgatatctcaatcatggactttataggaccatacattataggtaacataaaaactgtccaaatagatgtacgggatataaaatattccgacatgcaaaaatgctactttagctataagggtaaaatagttcctcaggattctaatgatttggctagattcaacatttatagcatttgtgccgcatacagatcaaaaaataccatcatcatagcatgcgactatgatatcatgttagatatagaagataaacatcagccattttatctattcccatctattgatgtttttaacgctacaatcatagaagcgtataacctgtatacagctggagattatcatctaatcatcaatccttcagataatctgaaaatgaaattgtcgtttaattcttcattctgcatatcagacggcaatggatggatcataattgatgggaaatgcaatagtaattttttatcataaaagttgtaaagtaaataataaaacaataaatattgaactagtagtacgtatattgagcaatcagaaatgatgctggtacctcttatcacggtgaccgtagttgcgggaacaatattagtatgttatatattatatatttgtaggaaaaagatacgtactgtctataatgacaataaaattatcatgacaaaattaaaaaagataaagagttctaattccagcaaatctagtaaatcaactgatagcgaatcagactgggaggatcactgtagtgctatggaacaaaacaatgacgtagataatatttctaggaatgagatattggacgatgatagcttcgctggtagtttaatatgggataacgaatccaatgttatggcgcctagcacagaacacatttacgatagtgttgctggaagcacgctgctaataaataatgatcgtaatgaacagactatttatcagaacactacagtagtaattaatgaaacggagactgttgaagtacttaatgaagataccaaacagaatcctaactattcatccaatcctttcgtaaattataataaaaccagtatttgtagcaagtcaaatccgtttattacagaacttaacaataaatttagtgagaataatccgtttagacgagcacatagcgatgattatcttaataagcaagaacaagatcatgaacacgatgatatagaatcatcggtcgtatcattggtgtgattagtttcctttttataaaattgaagtaatatttagtattattgctgccgtcacgttgtacaaatggagatattccctgtattcggcatttctaaaattagcaattttattgctaataatgactgtagatattatatagatacagaacatcaaaaaattatatctgatgagatcaatagacagatggatgaaacggtacttcttaccaacatcttaagcgtagaagttgtaaatgacaatgagatgtaccatcttattcctcatagattatcgacgattatactctgtattagttctgtcggaggatgtgttatctctatagataatgacatcaatggcaaaaatattctaacctttcccattgatcatgctgtaatcatatccccactgagtaaatgtgtcgtagttagcaagggtcctacaaccatattggttgttaaagcggatatacctagcaaacgattggtaacatcgtttacaaacgacatactatatgtaaacaatctgtcactgattaattatttgccgttgtctgtattcattattagacgagtcaccgactatttggatagacacatatgcgatcagatatttgctaataataagtggtattcccttataaccatcgacgataagcaatatcctattccatcaaactgtataggtatgtcctctgccaagtacataaattctagcatcgagcaagatactttaatccatgtttgtaacctcgagcatccgttcgactcagtatacaaaaaaatgcagtcgtacaattctctacctatcaaggaacaaatattgtacggtagaattgataatataaatatgagcattagtatttctgtggattaatagatttctagtatggggatcattaatcatctctaatctctaaatacctcataaaacgaaaaaaaagctattatcaaatactgtacggaatggattcattctcttctctttttatgaaactctgttgtatatctactgataaaactggaagcaaaaaatctgatagaaagaataagaataagatcaaggattatatggaacacgattattataaaataacaatagttcctggttcctcttccacgtctactagctcgtggtattatacacatgcctagtaatagtctctttgcgttgacggaaagcagactagaaataacaggctaaaatgttcagacaccataatagttcccaacccagataataacagagttccatcaacacattcctttaaactcaatcccaaacccaaaaccgttaaaatgtatccggccaattgatagtagataatgaggtgtacagcgcatgataatttacacagtaaccaaaatgaaaatactttagtaattataagaaatatagacggtaatgtcatcatcaacaatccgataatatgcctgagagtaaacattgacggataaaacaaaaatgctccgcataactctatcatggcaataacacaaccaaatacttgtaagattcctaaattagtagaaaatacaacgaatatcgatgtataagtgatctcgagaaataataagaataaagtaatgcccgtaaagataaacatcaacattgtttggtaatcattaaaccaattagtatgaagttgaactaatttcacagtagattttattccagtgttatcctcgcatgtataagtacctggtaagatatctttatattccataatcaatgagacatcactatctgataacgaatgaagtctagcactagtatgccatttacttaatattgtcgtcttggaagttttattataagttaaaatatcatggttatccaatttccatctaatatactttgtcggattatctatagtacacggaataatgatggtatcattacatgctgtatactctatggtctttgtagttgttataacaaccaacgtatagaggtatatcaacgatattctaactcttgacattttttatttatttaaaatgatacctttgttatttattttattctattttgctaacggtattgaatggcataagtttgaaacgagtgaagaaataatttctacttacttattagacgacgtattatacacgggtgttaatggggcggtatacacattttcaaataataaactaaacaaaactggtttaactaataataattatataacaacatctataaaagtagaggatgcggataaggatacattagtatgcggaaccaataacggaaatcccaaatgttggaaaatagacggttcagacgacccaaaacatagaggtagaggatacgctccttatcaaaatagcaaagtaacgataatcagtcacaacggatgtgtactatctgacataaacatatcaaaagaaggaattaaacgatggagaagatttgacggaccatgtggttatgatttattcacggcggataacgtaattccaaaagatggtttacgaggagcattcgtcgataaagacggtacttatgacaaagtttacattcttttcactgatactatcggctcaaagagaattgtcaaaattccgtatatagcacaaatgtgcctaaacgacgaaggtggtccatcatcattgtctagtcatagatggtcgacgtttctcaaagtcgaattagaatgtgatatcgacggaagaagttatagacaaattattcattctagaactataaaaacagataatgatacgatactatatgtattcttcgatagtccttattccaagtccgcattatgtacctattctatgaataccattaaacaatctttttctacgtcaaaattggaaggatatacaaagcaattgccgtctccagctcctggtatatgtttaccagctggaaaagttgttccacataccacgtttgaagtcatagaacaatataatgtactagatgatattataaagcctttatctaaccaacctatcttcgaaggaccgtctggtgttaaatggttcgatataaaggagaaggaaaatgaacatcgggaatatagaatatacttcataaaagaaaattctatatattcgttcgatacaaaatctaaacaaactcgtagctcgcaagtcgatgcgcgactattttcagtaatggtaactgcgaaaccgttatttatagcagatatagggataggagtaggaatgccacaaatgaaaaaaatacttaaaatgtaatcttaatcgagtacaccacacgacaatgaacaaacataagacagattatgctggttatgcttgctgcgtaatatgcggtctaattgtcggaattatttttacagcgacactattaaaagttgtagaacgtaaattagttcatacaccattaatagataaaacgataaaagatgcatatattagagaagattgtcctactgactggataagctataataataaatgtatccatttatctactgatcgaaaaacctgggaggaaggacgtaatgcatgcaaagctctaaattcaaattcggatctaattaagatagagactccaaacgagttaagttttttaagaagccttagacgaggctattgggtaggagaatccgaaatattaaaccagacaaccccatataattttatagctaagaatgccacgaagaatggaactaaaaaacggaaatatatttgtagcacaacgaatactcccaaactgcattcgtgttacactatataacaattacactacatttttatcataccactacttcggttagatgttttagaaaaaaataaatatcgccgtaccgttcttgtttttataaaaataacaattaacaattatcaaattttttctttaatattttacgtggttgaccattcttggtggtaaaataatctcttagtgttggaatggaatgctgtttaatgtttccacactcatcgtatattttgacgtatgtagtcacatcgtttacgcaatagtcagactgtagttctatcatgcttcctacatcagaaggaggaacagttttaaagtctcttggttttaatctattaccgttagttttcatgaaatcctttgttttatccacttcacattttaaataaatgtccactatacattcttttgttaattttactagatcgtcatgggtcatagaatttataggttccgtagtccatggatccaaactagcaaacttcgcgtatacggtatcgcgattagtgtatacaccaactgtatgaaaattaagaaaacagtttaataaatcaacagaaatatttaatcctccgtttgatacagatgcgccatatttatggatttcggattcacacgttgtttgtctgaggtgttcgtctagtgttgcttctacgtaaacttcgattcccatatattctttattgtcagaatcgcataccgatttatcatcatacactgtttgaaaactaaatggtatacacatcaaaataataaataataacgagtacattctgcaatattgttatcgtaattggaaaaatagtgttcgagtgagttggattatgtgagtattggattgtatattttattttatattttgtaataagaataaaatgctaatgtcaagtttattccaatagatgtcttattaaaaacatatataataaataacaatggctgaatggcataaaattatcgaggatatctcaaaaaataataagttcgaggatgccgccatcgttgattacaagactacaaagaatgttctagctgctattcctaacagaacatttgccaagattaatccgggtgaaattattcctctcatcactaatcgtaatattctaaaacctcttattggtcagaaatattgtattgtatatactaactctctaatggatgagaacacgtatgctatggagttgcttactgggtacgcccctgtatctccgatcgttatagcgagaactcataccgcacttatatttttgatgggtaagccaacaacatccagacgtgacgtgtatagaacgtgtagagatcacgctacccgtgtacgtgcaactggtaattaaaataaaaagtaatattcatatgtagtgtcaattttaaatgatgatgatgaaatggataatatccatattgacgatgtcaataatgccggtattggcatacagttcatcgatttttagatttcattcagaggatgtggaattatgttatgggcatttgtattttgataggatctataatgtagtaaatataaaatataatccgcatattccatatagatataattttattaatcgcacgttaaccgtagatgaactagacgataatgtcttttttacacatggttattttttaaaacacaaatatggttcacttaatcctagtttgattgtctcattatcaggaaacttaaaatataatgatatacaatgctcagtaaatgtatcgtgtctcattaaaaatttggcaacgagtacatctactatattaacatctaaacataagacttattctctacatcggtccacgtgtattactataataggatacgattctattatatggtataaagatataaatgacaagtataatgacatctatgattttactgcaatatgtatgctaatagcgtctacattgatagtgaccatatacgtgtttaaaaaaataaaaatgaactcttaattatgctatgctattagaaatggataaaatcaaaattacggttgattcaaaaattggtaatgttgttaccatatcgtataacttggaaaagataactattgatgtcacacctaaaaagaaaaaagaaaaggatgtattattagcgcaatcagttgctgtcgaagaggcaaaagatgtcaaggtagaagaaaaaaatattatcgatattgaagatgacgatgatatggatgtagaaagcgcgtaatacgatctataaaaataagtatataaatactttttatttactgtactcttactgtgtagtggtgataccctactcgattatttttttaaaaaaaaaatacttattctgattcttctagccatttccgtgttcgtttgaatgccacatcgacgtcaaagataggggagtagttgaaatctagttctgcattgttggtacgcacctcaaatgtagtgttggatatcttcaacgtatagttgttgagtagtgatggttttctaaatagaattctcttcatatcattcttgcacgcgtacatttttagcatccatcttggaatcctagatccttgttctattcccaatggtttcatcaatagaagattaaacatatcgtacgaacacgatggagagtaatcgtagcaaaagtaagcatttcctttaatcttagatcccggatactggatatattttgcagccaacacgtgcatccatgcagcatttcctacatatacccggctatgcaccgcgtcatcatcgactgtacgatacataatgttaccgtgttgcttacattgctcgtaaaagactttcatcaatttgtctccttctccgtaaattccagtgggtcttaggcaacaagtatacaattttgctccattcatgattacggaattattggctttcataaccagttgctcggccatacgtttactttttgcgtatacatgtcctggtgatatatcataaagggtatgctcatggccgatgaatggatcaccgtgtttattgggtcctattgcttccatgctactagtatagatcaaatacttgattcctaggtccacacaagctgccaaaatagtctgtgttccataatagtttactttcatgatttcattatcggtgtattttccaaatacatccactagagcagccgtatgaataatcagatttaccccatctagcgcttctctcaccttatcaaagtcgtttatatcacattgtatatagtttataaccttaactttcgaggttattggttgtggatcttctacaatatctatgactctgatttcttgaacatcatctgcactaattaacagttttactatatacctgcctagaaatccggcaccaccagtaaccgcgtacacggccattgctgccactcataatatcagactacttattctattttactaaataatggctgtttgtataatagaccacgataatatcagaggagttatttactttgaaccagtccatggaaaagataaagttttaggatcagttattggattaaaatccggaacgtatagtttgataattcatcgttacggagatattagtcaaggatgtgattccataggcagtccagaaatatttatcggtaacatctttgtaaacagatatggtgtagcatatgtttatttagatacagatgtaaatatatttacaattattggaaaggcgttatctatttcaaaaaatgatcagagattagcgtgtggagttattggtatttcttacataaatgaaaagataatacattttcttacaattaacgagaatggcgtttgatatatcagttaatgcgtctaaaacaataaatgcattagtttacttttctactcagcaaaataaattagtcatacgtaatgaagttaatgatacacactacactgtcgaatttgatagggacaaagtagttgacacgtttatttcatataatagacataatgacaccatagagataagaggggtgcttccagaggaaactaatattggttgcgcggttagtatgacttacttgtataataagtatagttttaaactgattttagcagaatatataagacacagaaatactatatccggcaatatttattcggcattgatgacactagatgatttggctattaaacagtatggagacattgatctattatttaatgagaaacttaaagtagactccgattcgggactatttgactttgtcaactttgtaaaggatatgatatgttgtgattctagaatagtagtagctctatctagtctagtatctaaacattgggaattgacaaataaaaaatataggtgtatggcattagccgaacatatatctgatagtattccaatatctgagctatctagactacgatacaatctatgtaagtatctacgcggacacactgagagcatagaggataaatttgattattttgaagacgatgattcgtctacatgttctgccgtaaccgacagggaaacggatgtataattttttttatagcgtgaaggatatgataaaaaatataattgttgtatttatcccattccaatcaccttatatgattctgtaacacaataaaggagtcttatagatgtatagaggtcagatactggtttgataaactgtttattccacataagtatgtttgactttatggttagacccgcatactttaacaaatcactgaaaattggagttaggtattgacctctcagaatcagttgccgttctggaacattaaatgtattttttatgatatactccaacgcatttatgtgggcatacaacaagtcattactaatggaatattccaagagttttagttgtctagtatttaacaagagaagagatttcaacagactgtttatgaactcgaatgccgcctcattgtcgcttatattgatgatgtcgaattctcccaatatcatcaccgatgagtagctcatcttgttatcgggatccaagttttctaaagatgtcattaaaccctcgatcatgaatggatttatcatcatcgtttttatgttggacatgagcttagtccgtttgtccacatctatagaagatgatttctgaattatttcatatatctctctctttaactccaggaacttgtcaggatggtctactttaatatgttctcgtctaagagatgaaaatctttggatggttgcacgcgacttttctctaaaggatgacgttgcccaagatcctctcttaaatgaatccatcttatccttggacaagatggacagtctattttccttagatggtttaatatttttgttacccatgatctataaaggtagacctaatcgtctcggatgaccatatatttattttcagttttattatacgcataaattgtaaaaaatatgttaggtttacgaaaatgtctcgtggggcattaatcgtttttgaaggattggacaaatctggaaaaacaacacaatgtatgaacatcatggaatcaataccttcaaacacaataaaataccttaactttcctcagagatccactgtcactggaaagatgatagatgactatctaactcgtaaaaaaacctataatgatcatatagttaatctattattttgtgcaaatagatgggagtttgcatcttttatacaagaacaactagaacagggaattactttaatagttgatagatacgcattttctggagtagcgtatgccgccgctaaaggcgcgtcaatgactctcagtaagagttatgaatctggattgcctaaacccgacttagttatattcttggaatctggtagcaaagaaattaatagaaacgtcggtgaggaaatttatgaagatgttacattccaacaaaaggtattacaagaatataaaaaaatgattgaagaaggagatattcattggcaaattatttcttctgaattcgaggaagatgtaaagaaggagttgattaagaatatagttatagaggctatacacacggttactggaccagtggggcaactgtggatgtaatagtgaaattacattttttataaatagatgttagtacagtgttataaatggatgaagcatattactctggcaacttggaatcagtactcggatacgtgtccgatatgcataccgaactcgcatcaatatctcaattagttattgccaagatagaaactatagataatgatatattaaacaaggacattgtaaattttatcatgtgtagatcaaacttggataatccatttatctctttcctagatactgtatatactattatagatcaagagaactatcagactgagttgattaattcattagacgacaatgaaattatcgattgtatagttaataagtttatgagcttttataaggataacctagaaaatatagtagatgctatcattactctaaaatatataatgaataatccagattttaaaactacgtatgccgaagtactcggttccagaatagccgatatagatattaaacaagtgatacgtaagaatatactacaattgtctaataatatccgcgaacgatatttgtgaaaatattaaaaaaaaatactttttttattaaatgacgtcttttcgtgaatttagaaaattatgctgtgctatatatcacgcatcaggatataaagaaaaatctaaattaattagagactttataacagatagggatgataaatatttgatcattaagctattgcttcccggattagacgatagaatttataacatgaacgataaacaaattataaaattatatagtataatatttaaacaatctcaggaagatatgctacaagatttaggatacggatatataggagacactattaggactttcttcaaagagaacacagaaatccgtccacgagataaaagcattttaactttagaagaagtggatagttttttaactacgttatcatccgtaactaaagaatcgcatcaaataaaattattgactgatgtagcatctgtttgtacatgtaatgatttaaaatgtgtagtcatgcttattgataaagatctaaaaattaaagcgggtcctcggtacgtacttaacgctattagtcctaatgcctatgatgtgtttagaaaatctaataacttgaaagagataatagaaaattcatctaaacaaaatctagactctatatctatttctgttatgactccaattaatcccatgttagcggaatcgtgtgattctgtcaataaggcgtttaaaaaatttccatcaggaatgtttgcggaagtcaaatacgatggtgaaagagtacaagttcataaaaataataacgagtttgccttctttagtagaaacatgaaaccagtactctctcataaagtggattatctcaaagaatacataccgaaagcatttaaaaaagctacgtctatcgtattggattctgaaattgttcttgtagacgaacataatgtaccgctcccgtttggaagtttaggtatacacaaaaagaaagaatataaaaactctaacatgtgtttgttcgtgtttgactgtttgtactttgatggattcgatatgacggacattccattgtacgaacgaagatcttttctcaaagatgttatggttgaaatacccaatagaatagtattctcagagttgacgaatattagtaacgagtctcagttaactgacgtattggatgatgcactaacgagaaaattagaaggattggtcttaaaagatattaatggagtatacgaaccgggaaagagaagatggttaaaaataaagcgagactatttgaacgagggttccatggcagattctgccgatttagtagtactaggtgcctactatggtaaaggagcaaagggtggtatcatggcagtctttctaatgggttgttacgacgatgaatccggtaaatggaagacggttaccaagtgttcaggacacgatgataatacgttaagggagttgcaagaccaattaaagatgattaaaattaacaaggatcccaaaaaaattccagagtggttagtagttaataaaatctatattcccgattttgtagtagaggatccgaaacaatctcagatatgggaaatttcaggagcagagtttacatcttccaagtcccataccgcaaatggaatatccattagatttcctagatttactaggataagagaggataaaacgtggaaagaatctactcatctaaacgatttagtaaacttgactaaatcttaatagttacatacaaactgaaaattaaaataacactatttagttggtggtcgccatggatggtgttattgtatactgtctaaacgcgctagtaaaacatggcgaggaaataaatcatataaaaaatgatttcatgattaaaccatgttgtgaaagagtttgtgaaaaagtcaagaacgttcacattggcggacaatctaaaaacaatacagtgattgcagatttgccatatatggataatgcggtatccgatgtatgcaattcactgtataaaaagaatgtatcaagaatatccagatttgctaatttgataaagatagatgacgatgacaagactcctactggtgtatataattattttaaacctaaagatgccattcctgttatcatatctataggaaaggataaagatgtctgtgaactattaatctcatcagacatatcgtgtgcatgcgtggagttaaattcatatcacgtagccattcttcccatggatgtttccttttttaccaaaggaaatgcatcattgattattctcctgtttgatttctctatcgatgcggcacctctcttaagaagtgtaaccgataataatgttattatatctagacaccagcgtctacatgacgagcttccgagttccaattggttcaagttttacataagtataaagtccgactattgttctatattatatatggttgttgatggatctgtgatgcatgcgatagctgataatagaactcacgcaattattagcaaaaatatattagacaatactacgattaacgatgagtgtagatgctgttattttgaaccacagattaggattcttgatagagatgagatgctcaatggatcatcgtgtgatatgaacagacattgtattatgatgaatttacctgatgtaggcgaatttggatctagtatgttggggaaatatgaacctgacatgattaagattgctctttcggtggctggtaatttaataagaaatcgagactacattcccgggagacgaggatatagctactacgtttacggtatagcctctagataatttttttaagcacgaaataaaaaacataattttaaaccaatctatttcatactattttgtgtgatcaccatggacataaagatagatattagtatttctggtgataaatttacggtgactactaggagggaaaatgaagaaagaaaaaaatatctacctctccaaaaagaaaaaactactgatgttatcaaacctgattatcttgagtacgatgacttgttagatagagatgagatgtttactattctagaggaatattttatgtacagaggtctattaggcctcagaataaaatatggacgactctttaacgaaattaaaaaattcgacaatgatgcggaagaacaattcggtactatagaagaactcaagcagaaacttagattaaattctgaagagggagcagataactttatagattatataaaggtacaaaaacaggatatcgtcaaacttactgtatacgattgcatatctatgataggattgtgtgcatgcgtggtagatgtttggagaaatgagaaactgttttctagatggaaatattgtttacgagcgattaaactgtttattgatgatcacatgcttgataagataaaatctatactgcagaatagactagtatatgtggaaatgtcatagaaagttaaaagttaatgagagcaaaaatatataaggttgtattccatatttgttatttttttctgtaatagttagaaaaatacattcgatggtctatctatcagattattatgtgttataaggtactttttctcataataaactagagtatgagtaagatagtgtttttcaaaacatataaatctaaaattgatggatgagatatacagctattaatttcgaaaatatattttaatctgataactttaaacatggatttttaatggtggtttaacgttttaaaaaaagattttgttattgtagtatatgataatattaaaagatggatataaagaatttgctgactgcatgtactattttttacattactacattggctacggcagatatacctacttcgtcactgccacacgctccggtaaacggggcatgtgacgagggagaatatcttgataagaggcataatcaatgttgtaatcagtgtccacctggagaatttgccaaggttagatgtaatggtaacgataacacaaaatgtgaacgctgcccacctcatacatataccgcaatccccaattactctaatggatgtcatcaatgtagaaaatgcccaacaggatcatttgataaggtaaagtgtaccggaacacagaacagtaaatgttcgtgtcttcctggttggtattgcgctactgattcttcacagactgaagattgtcgagattgtataccaaaaaggagatgtccatgcggatactttggtggaatagatgaacaaggaaatcctatttgtaaatcgtgttgtgttggtgaatattgcgactacctacgtaattatagacttgatccatttcctccatgcaaactatctaaatgtaattaattatgattttgatgataatgttaccatacattatatcgctacttggttagtgtattattcagtatgaagacctattaataattacttatcttttgacgatcttgttataattataatataaaaatacttatggcatagtaactcataattgctgacgcgataaattcgtaataatctgttttgttcaaatttttataaggaatctacaggcataaaaataaaaatataatttataatatactcttacagcgcgccatcatgaataacagcagtgaattgattgctgttattaatggatttagaaatagtggacgattttgtgatattaatatagttattaatgatgaaaggataaacgctcacagactcatcctatctggagcctccgaatatttttccattctgttttccaataattttatcgattctaatgaatacgaagttaatctaagtcatttagattatcaaagtgttaacgatttgatcgattacatttatgggatacctttgagcctaactaacgataacgtgaaatatattctttcaaccgctgattttttacaaattggatctgctattacggagtgtgaaaattacatacttaaaaatctttgttctagaaactgtatcgatttctacatatacgctgataaatataataacaagaaaatagaatcagcgtcgtttaacacaatattacaaaatattttgagactcatcaacgatgaaaactttaaatacttaacagaggaatcaatgataaaaattttaagcgatgatatgttaaatataaaaaatgaggatttcgccccactaattctcattaaatggttagagagtactcaacaaccatgcaccgtcgagttacttaaatgcctcagaatatcattgctttccccacaagttataaaatcactttatagtcatcgactggttagttcaatctacgaatgtataacattcttaaacaatatagcattcttggatgaatcatttcctagataccatagcatcgagttgatatctatcggtataagtaattcgcatgataagatttccataaactgctacaatcataaaaaaaatacatgggaaatgatatcttcacgtagatataggtgtagtttcgcagtggccgtcctggataatattatctatatgatgggtggatatgatcagtccccgtatagaagttcaaaggttatagcgtacaatacatgtacaaattcttggatatatgatataccagagctaaaatatcctcgttctaattgtgggggactggctgatgacgaatacatttattgtataggcggcatacgcgatcaggattcatcgttgacatctagtattgatagatggaagccatcaaaaccatattggcagaagtatgctaaaatgcgcgaaccaaaatgtgatatgggggttgcgatgttaaacggattaatatatgttataggtggaatcgttaaaggtgacacgtgtaccgacgcactagagagtttatcagaagatggatggatgaagcatcaacgtcttccaataaaaatgtccaatatgtcgacgattgttcatgatggcaagatttatatatctggaggttacaacaatagtagtgtagttaatgtaatatcgaatctagtccttagctataattcgatatatgatgaatggaccaaattatcatcattaaacattcctagaattaatcccgctctatggtcagcgcataataaattatatgtaggaggaggaatatctgatgatgttcgaactaatacatctgagacatacgacaaagaaaaagattgttggacattggataatggtcacgtgttaccacgcaattatataatgtataaatgcgaaccgattaaacataaatatccattggaaaaaacacagtacacgaatgattttctaaagtatttggaaagttttataggtagttgatagaacaaaatacataattttgtaaaaataaatcactttttatactaatatgacacgattaccaatacttttgttactaatatcattagtatacgctacaccttttcctcagacatctaaaaaaataggtgatgatgcaactctatcatgtaatcgaaataatacaaatgactacgttgttatgagtgcttggtataaggagcccaattccattattcttttagctgctaaaagcgacgtcttgtattttgataattataccaaggataaaatatcttacgactctccatacgatgatctagttacaactatcacaattaaatcattgactgctagagatgccggtacttatgtatgtgcattctttatgacatcaactacaaatgacactgataaagtagattatgaagaatactccacagagttgattgtaaatacagatagtgaatcgactatagacataatactatctggatctacacattcaccggaaactagttctgagaaacctgattatatagataattctaattgctcgtcggtattcgaaatctaagctcaaaaattgaaaaactagcgtctttttttgctcgaagtcgaccaccatggtgggtgaggatagcgtgctgatcaccgagaacatgcacatgaaactgtacatggagggcaccgtgaacgaccaccacttcaagtgcacatccgagggcgaaggcaagccctacgagggcacccagaccatgaagatcaaggtggtcgagggcggccctctccccttcgccttcgacatcctggctaccagcttcatgtacggcagcaaaacctttatcaaccacacccagggcatccccgacttctttaagcagtccttccctgagggcttcacatgggagaggatcaccacatacgaagacgggggcgtgctgaccgctacccaggacaccagcctccagaacggctgcctcatctacaacgtcaagatcaacggggtgaacttcccatccaacggccctgtgatgcagaagaaaacactcggctgggaggccagcaccgagatgctgtaccccgctgacagcggcctgagaggccatagccagatggccctgaagctcgtgggcgggggctacctgcactgctccctcaagaccacatacagatccaagaaacccgctaagaacctcaagatgcccggcttctacttcgtggacaggagactggaaagaatcaaggaggccgacaaagagacctacgtcgagcagcacgagatggctgtggccaggtactgcgacctgcctagcaaactggggcacagctgattaattaatttttatcgatctaattcaacaatgtctggagagcttcgcaggatcccgactccggaaccaattactgataaagaagatcatacagttacagacactgtctcatacactacagtaagtacatcatctggaattgtcactactaaatcaaccaccgatgatgcggatctttatgatacgtacaatgataatgatacagtaccaccaactactgtaggcggtagtacaacctctattagcaattataaaaccaaggactttgtagaaatatttggtattaccgcattaattatattgtcggccgtggcaattttctgtattacatattatatatataataaacgttcacgtaaatacaaaacagagaacaaagtctagatttttgacttacataaatgtctgggatagtaaaatctatcatattgagcggaccatctggtttaggaaagacagccatagccaaaagactatgggaatatatttggatttgtggtgtcccataccactagatttcctcgtcctatggaacgagaaggtgttgattaccattacgttaacagagaggccatctggaagggaatagccgccggaaactttctagaacatactgagtttttaggaaatatttacggaacttctaaaacagctgtgaatacagcggctattaataatcgtatttgtgtgatggatctaaacatcgacggtgttagaagtcttaaaaatacgtacctaatgccttactcggtgtatataagacctacctctcttaaaatggttgagaccaagcttcgtcgtagaaacactgaagctaacgatgagattcatcgtcgtgtgatgttggcaaaaactgacatggatgaggcaggtgaagccggtctattcgacactattatcattgaagatgatgtgaatttagcatatagtaagttaattcagatactacaggaccgtattagaatgtattttaacactaattagagacttaagacttaaaacttgataattaataatataactcgtttttatatgtgtctatttcaacgtctaatgtattagttaaatattaaaacttaccacgtaaaacttaaaatttaaaatgatatttcattgacagatagatcacacattatgaactttcaaggacttgtgttaactgacaattgcaaaaatcaatgggtcgttggaccattaataggaaaaggtggattcggtagtatttatactactaatgacaataattatgtagtaaaaatagagcccaaagctaacggatcattatttaccgaacaggcattttatactagagtacttaaaccatccgttatcgaagaatggaaaaaatctcacaatataaagcacgtaggtcttatcacgtgcaaggcatttggtctatacaaatccattaatgtggaatatcgattcttggtaattaatagattaggtgcagatctagatgcggtgatcagagccaataataatagactaccaaaaaggtcggtgatgttgatcggaatcgaaatcttaaataccatacaatttatgcacgagcaaggatattctcacggagatattaaagcgagtaatatagtcttagatcaaatagataagaataaattatatctagtggattacggattggtttctaaattcatgtctaatggcgaacatgttccatttataagaaatccaaataaaatggataacggtactctagaatttacacctatagattcgcataaaggatacgttgtatctagacgtggagatctagaaacacttggatattgtatgattagatggttgggaggtatcttaccatggactaagatatctgaaacaaagaattgtgcattagtaagtgccacaaaacagaaatatgttaacaatactgcgactttgttaatgaccagtttgcaatatgcacctagagaattgctgcaatatattaccatggtaaactctttgacatattttgaggaacccaattacgacaagtttcggcacatattaatgcagggtgtatattattaagtgtggtgtttggtcgataaaaattaaaaaataacttaatttattattgatctcgtgtgtacaaccgaaatcatggcgatgttttacgcacacgctctcggtgggtacgacgagaatcttcatgcctttcctggaatatcatcgactgttgccaatgatgtcaggaaatattctgttgtgtcagtttataataacaagtatgacattgtaaaagacaaatatatgtggtgttacagtcaggtgaacaagagatatattggagcactgctgcctatgtttgagtgcaatgaatatctacaaattggaaatccgatccatgatcaagaaggaaatcaaatctctatcatcacatatcgccacaaaaactactatgctctaagcggaatcgggtacgagagtctagacttgtgtttggaaggagtagggattcatcatcacgtacttgaaacaggaaacgctgtatatggaaaagttcaacatgattattctactatcaaagagaaggccaaagaaatgagtgcacttagtccaggacctatcatcgattaccacgtctggataggagattgtatctgtcaagttactgctgtggacgtacatggaaaggaaattatgaaaatgagattcaaaaagggtgcggtgcttccgatcccaaatctggtaaaagttaaacttggggagaatgatacagaaaatctttcttctactatatcggcggcaccatcgaggtaaccacctctctggaagacagcgtgaatcatgtactcatgaaacgtttggaaactatacgccatatgtggtctgttgtatatgatcattttgatattgtgaatggtaaagaatgctgttatgtgcatacgcattcatctaatcaaaatcctataccgagtactgtaaaaacaaatttgtacatgaagactatgggatcatgcattcaaatggattccatggaagctctagagtatcttagcgaactgaaggaatcaggtggatggagtcccagaccagaaatgcaggaatttgaatatccagatggagtggaagacactgaatcaattgagagattggcagaggagttcttcaatagatcagaacttcaggctggtgaatcagtcaaatttggtaattctattaattgttaaacatacatctgtttcagctaagcaactaagaacacgtatacggcagcagcttccttctatactctcatcttttaccaacacaaagggtggatatttgttcattggagttgataataatacacacaaagtatttggattcacggtgggttacgactacctcagactgatagagaatgatatagaaaagcatatcaaaagacttcgtgttgtgcatttctgtgagaagaaagaggacatcaagtacgcgtgtcgattcatcaaggtatataaacctggggatgagactacctcgacatacgtgtgcgctatcaaagtggaaagatgctgttgtgctgtgtttgcagattggccagaatcatggtatatggatactaatggtatcaagaagtattctccagatgaatgggtgtcacatataaaattttaattaatgtaactatagagaacaaataataaggttgtaatatcatatagacaataactaacaattaattagtaactgttatctcttttttaactaaccaactaactatatacctattaatacatcgtaattatagttcttaacatctattaatcattaattcgcttctttaattttttataaactaacattgttaattgaaaagggataacatgttacagaatataaattatatatggatttttttaaaaaggaaatacttgactggagtatatatttatctcttcattatatagcacgcgtgttttccaatttttccacatcccatataatacaggattataatctcgttcgaacatacgagaaagtggataaaacaatagttgattttttatctaggttgccaaatttattccatattttagaatatggggaaaatattctacatatttattctatggatgatgctaatacgaatattataattttttttctagatagagtattaaatattaataagaacgggtcatttatacacaatctcgggttatcatcatccattaatataaaagaatatgtatatcaattagttaataatgatcatccagataataggataagactaatgcttgaaaatggacgtagaacaagacattttttgtcctatatatcagatacagttaatatctatatatgtattttaataaatcatggattttatatagatgccgaagacagttacggttgtacattattacatagatgtatatatcactataagaaatcagaatcagaatcatacaatgaattaattaagatattgttaaataatggatcagatgtagataaaaaagatacgtacggaaacacaccttttatcctattatgtaaacacgatatcaacaacgtggaattgtttgagatatgtttagagaatgctaatatagactctgtagactttaatagatatacacctcttcattatgtctcatgtcgtaataaatatgattttgtaaagttattaatttctaaaggagcaaatgttaatgcgcgtaataaattcggaactactccattttattgtggaattatacacggtatctcgcttataaaactatatttggaatcagacacagagttagaaatagataatgaacatatagttcgtcatttaataatttttgatgctgttgaatctttagattatctattatccagaggagttattgatattaactatcgtactatatacaacgaaacatctatttacgacgctgtcagttataatgcgtataatacgttggtctatctattaaacaaaaatggtgattttgagacgattactactagtggatgtacatgtatttcggaagcagtcgcaaacaacaacaaaataataatggaagtactattgtctaaacgaccatctttgaaaattatgatacagtctatgatagcaattactaaacataaacagcataatgcagatttattgaaaatgtgtataaaatatactgcgtgtatgaccgattatgatactcttatagatgtacagtcgctacagcaatataaatggtatattttaagatgtttcgatgaaatagatatcatgaagagatgttatataaaaaataaaactgtattccaattagttttttgtatcaaagacattaatactttaatgagatacggtaaacatccttctttcgtgaaatgcactagtctcgacgtatacggaagtcgtgtacgtaatatcatagcatctattagatatcgtcagagattaattagtctattatccaagaagctggatcctggagataaatggtcgtgttttcctaacgaaataaaatataaaatattggaaaactttaacgataacgaactatccacatatctaaaaatcttataaacattattaaaatataaaatctaagtaggataaaatcacactacatcattgtttccttttagtgctcgacagtgtatactatttttaacgctcataaataaaaatgaaaacgatttccgttgttacgttgttatgcgtactacctgctgttgtttattcaacatgtactgtacccactatgaataacgctaaattaacgtctaccgaaacatcgtttaatgataaccagaaagttacgtttacatgtgatcagggatatcattctttggatccaaatgctgtctgtgaaacagataaatggaaatacgaaaatccatgcaaaaaaatgtgcacagtttctgattatgtctctgaactatataataaaccgctatacgaagtgaattccaccatgacactaagttgcaacggcgaaacaaaatattttcgttgcgaagaaaaaaatggaaatacttcttggaatgatactgttacgtgtcctaatgcggaatgtcaacctcttcaattagaacacggatcgtgtcaaccagttaaagaaaaatactcatttggggaatatatgactatcaactgtgatgttggatatgaggttattggtgcttcgtacataagttgtacagctaattcttggaatgttattccatcatgtcaacaaaaatgtgatatgccgtctctatctaacggattaatttccggatctacattttctatcggtggcgttatacatcttagttgtaaaagtggttttacactaacggggtctccatcatccacatgtatcgacggtaaatggaatcccatactcccaatatgtgtacgaactaacgaaaaatttgatccagtggatgatggtcccgacgatgagacagatttgagcaaactctcgaaagacgttgtacaatatgaacaagaaatagaatcgttagaagcaacttatcatataatcatagtggcgttgacaattatgggcgtcatatttttaatctccgttatagtattagtttgttcctgtgacaaaaataatgaccaatataagttccataaattgctaccgtaaatataaatccgttaaaataattaataatttaataacaaacaagtatcaaaagattaaagacttatagctagaatcaattgagatgtcttcttcagtggatgttgatatctacgatgccgttagagcatttttactcaggcactattataacaagagatttattgtgtatggaagaagtaacgccatattacataatatatacaggctatttacaagatgcgccgttataccgttcgatgatatagtacgtactatgccaaatgaatcacgtgttaaacaatgggtgatggatacacttaatggtataatgatgaatgaacgcgatgtttctgtaagcgttggcaccggaatactattcatggaaatgtttttcgattacaataaaaatagtatcaacaatcaactaatgtatgatataattaatagcgtatctataattctagctaatgagagatatagaagcgcttttaacgacgatggtatatacatccgtagaaatatgattaacaagttgtacggatacgcatctctaactactattggcacgatcgctggaggtgtttgttattatctgttgatgcatctagttagtttgtataaataattatttcaatatactagttaaaattttaagattttaaatgtataaaaaactaataacgtttttatttgtaataggtgcattagcatcctattcgaataatgagtacactccgtttaataaactgagtgtaaaactctatatagatggagtagataatatagaaaattcatatactgatgataataatgaattggtgttaaattttaaagagtacacaatttctattattacagagtcatgcgacgtcggatttgattccatagatatagatgttataaacgactataaaattattgatatgtataccattgactcgtctactattcaacgcagaggtcacacgtgtagaatatctaccaaattatcatgccattatgataagtacccttatattcacaaatatgatggtgatgagcgacaatattctattactgcagagggaaaatgctataaaggaataaaatatgaaataagtatgatcaacgatgatactctattgagaaaacatactcttaaaattggatctacttatatatttgatcgtcatggacatagtaatacatattattcaaaatatgatttttaaaaatttaaaatatattatcacttcagtgacagtagtcaaataacaaacaacaccatgagatatattataattctcgcagttttgttcattaatagtatacatgctaaaataactagttataagtttgaatccgtcaattttgattccaaaattgaatggactggggatggtctatacaatatatcccttaaaaattatggcatcaagacgtggcaaacaatgtatacaaatgtaccagaaggaacatacgacatatccgcatttccaaagaatgatttcgtatctttctgggttaaatttgaacaaggcgattataaagtggaagagtattgtacgggactatgcgtcgaagtaaaaattggaccaccgactgtaacattgactgaatacgacgaccatatcaatttgtacatcgagcatccgtatgctactagaggtagcaaaaagattcctatttacaaacgcggtgacatgtgtgatatctacttgttgtatacggctaacttcacattcggagattctaaagaaccagtaccatatgatatcgatgactacgattgcacgtctacaggttgcagcatagactttgtcacaacagaaaaagtgtgcgtgacagcacagggagccacagaagggtttctcgaaaaaattactccatggagttcgaaagtatgtctgacacctaaaaagagtgtatatacatgcgcaattagatccaaagaagatgttcccaatttcaaggacaaaatggccagagttatcaagagaaaatttaatacacagtctcaatcttatttaactaaatttctcggtagcacatcaaatgatgttaccacttttcttagcatgcttaacttgactaaatattcataactaatttttattaatgatacaaaaacgaaataaaactgcatattatacactggttaacgcccttataggctctaaccattttcaagatgaggtccctgattatagtccttctgttcccctctatcatctactccatgtctattagacgatgtgagaagactgaagaggaaacatggggattgaaaatagggttgtgtataattgccaaagatttctatcccgaaagaactgattgcagtgttcatctcccaactgcaagtgaaggattgataactgaaggcaatggattcagggatatacgaaacaccgataaattataaaaaaagcaatgtgtccgctgtttccgttaataatactattttcgtaactggcggattattcataaataactctaatagcacgatcgtggttaacaatatggaaaaacttgacatttataaagacaaacaatggtcgattatagaaatgcctatggctagggtatatcacggcattgactcgacatttggaatgttatattttgccggaggtctatccgttaccgaacaatatggtaatttagagaaaaacaacgagatatcttgttacaatcctagaacgaataagtggtttgatatttcatatactatttataagatatccatatcatcattgtgtaaactaaataacgtcttctatgtatttagtaaggacattggatatgtggaaaagtatgatggtgcatggaagttagtacatgatcgtctccccgctataaaggcattatcaacttctccttattgattgaaaatgaaaatataaatagtttttatgtatagcagtattaccctatagttttattgcttactactaacatggatacagatgttacaaatgtagaagatatcataaatgaaatagatagagagaaagaagaaatactaaaaaatgtagaaattgaaaataataaaaacattaacaagaatcatcccaatgaatatattagagaagcactcgttattaataccagtagtaatagtgattccattgataaagaagttatagaatgtatcagtcacgatgtaggaatatagatcatatctactaatttttataatcgatacaaaacataaaaaacaactcgttattacatagcaggcatggaatccttcaagtattgttttgataacgatggcaagaaatggattatcggaaatactttatattctggtaattcaatactctataaggtcagaaaaaatttcactagttcgttctacaattacgtaatgaagatagatcacaaatcacacaagccattgttgtctgaaatacgattctatatatctgtattggatcctttgactatcgacaactggacacgggaacgtggtataaagtatttggctattccagatctgtatggaattggagaaaccgatgattatatgttcttcgttataaagaattcgggaagagtattcgccccaaaggatactgaatcagtcttcgaagcatgcgtcactatgataaacacgttagagtttatacactctcgaggatttacccatggaaaaatagaaccgaggaatatactgattagaaataaacgtctttcactaattgactattctagaactaacaaactatacaagagtggaaactcacatatagattacaacgaggacatgataacttcaggaaatatcaattatatgtgtgtagacaatcatcttggagcaacagtttcaagacgaggagatttagaaatgttgggatattgcatgatagaatggttcggtggcaaacttccatggaaaaacgaaagtagtataaaagtaataaaacaaaaaaaagaatataaaaaatttatagctactttctttgaggactgttttcctgaaggaaatgaacctctggaattagttagatatatagaattagtatacacgttagattattctcaaactcctaattatgacagactacgtaaactgtttatacaagattgaaattatattcttttttttatagagtgtggtagtgttacggatatctaatattaatattagactatctctatcgcgctacacgaccaatatcgattactatggatatcttctatgaaaggagagaatgtatttatttctccagcgtcaatctcgtcagtattgacaatactgtattatggagctaatggatccactgctgaacagctatcaaaatatgtagaaacggaggagaacacggataaggttagcgctcagaatatctcattcaaatccatgaataaagtatatgggcgatattctgccgtgtttaaagattcctttttgagaaaaattggcgataagtttcaaactgttgacttcactgattgtcgcactatagatgcaatcaacaagtgtgtagatatctttactgaggggaaaatcaatccactattggatgaaccattgtctcctagcaattagtgccgtatactttaaagcaaaatggttgacgccattcgaaaaggaatttaccagtgattatcccttttacgtatctccgacggaaatggtagacgtaagtatgatgtctatgtacggcaaggcatttaatcacgcatctgtaaaagaatcattcggcaacttttcaatcatagaactgccatatgttggagatactagtatgatggtcattcttccagacaagattgatggattagaatccatagaacaaaatctaacagatacaaattttaagaaatggtgtgactttatggatgctatgtttatagatgttcacattcccaagtttaaggtaacaggctcgtataatctggtggatactctagtaaagtcaggactgacagaggtgttcggttcaactggagattatagcaatatgtgtaatttagatgtgagtgtcgacgctatgatccacaaaacgtatatagatgtcaatgaagagtatacagaagcagctgcagcaacttctgtactagtggcagactgtgcatcaacaattacaaatgagttctgtgcagatcatccgttcatctatgtgattaggcatgttgatggaaaaattcttttcgttggtagatattgctctccgacaactaattgttaaccattttttttaaaaaaaatagaaaaaacatgtggtattagtgcaggtcgttgttcttccaattgcaattggtaagatgacggccaactttagtacccacgtcttttcaccacagcactgtggatgtgacagactgaccagtattgatgacgtcaaacaatgtttgactgaatatatttattggtcgtcctatgcataccgcaacaggcaatgcgctggacaattgtattccacactcctctcttttagagatgatgcggaattagtgttcatcgacattcgcgagctggtaaaaaatatgccgtgggatgatgtcaaagattgtacagaaatcatccgttgttatataccggatgagcaaaaaaccatcagagagatttcggccatcatcggactttgtgcatatgctgctacttactggggaggtgaagaccatcccactagtaacagtctgaacgcattgtttgtgatgcttgagatgctaaattacgtggattataacatcatattccggcgtatgaattgatgagttgtacatcttgacattttctttcttctcttctccctttcttctcttctcccttcctccctcttctccctttcccagaaacaaacttttttacccactataaaataaaatgagtatactacctattatatttcttcctatatttttttattcttcattcgttcagacttttaacgcgtctgaatgtatcgacaaagggcaatattttgcatcattcatggagttagaaaacgagccagtaatcttaccatgtcctcaaataaatacgctatcatccggatataatatattagatattttatgggaaaaacgaggagcggataatgatagaattataccgatagataatggtagcaatatgctaattctgaacccgacacaatcagactctggtatttatatatgcattaccacgaacgaaacctactgtgacatgatgtcgttaaatttgacaatcgtgtctgtctcagaatcaaatatagatcttatctcgtatccacaaatagtaaatgagagatctactggcgaaatggtatgtcccaatattaatgcatttattgctagtaacgtaaacgcagatattatatggagcggacatcgacgccttagaaataagagacttaaacaacggacacctggaattattaccatagaagatgttagaaaaaatgatgctggttattatacatgtgttttagaatatatatacggtggcaaaacatataacgtaaccagaattgtaaaattagaggtacgggatagaataataccttctactatgcaattaccagatggcattgtaacttcaataggtagtaatttgactattgcatgcagagtatcgttgagacctcccacaacggacaccgacgtcttttggataagtaatggtatgtattacgaagaagatgatggggacggaaacggtagaataagtgtagcaaataaaatctatatgaccgataagagacgtgttattacatcccggttaaacattaatcctgtcaaggaagaagatgctacaacgtttacgtgtatggcgtttactattcctagcatcagcaaaacagttactgttagtataacgtgaatgtatgttgttacatttccatgtcaattgagtttataagaatttttatacattatcttccaacaaacaattgacgaacgtattgctatgattaactcccacgatactatgcatattattaatcattaacttgcagactatacctagtgctattttgacatactcgtgttcttgtgtaattgcggtatctatattattaaagtacgtaaatctagctatagttttattatttaattttagataatataccgtctccttatttttaaaaattgccacatcctttattaaatcatgaatgggaatttctatgtcatcgttagtatattgtgaacaacaagagcagatatctataggaaagggtggaatgcgatacattgatctatgtagttttaaaacacacgcgaactttgaagaatttatataaatcattccatcgatacatccttctatgttgacatgtatatatccaggaattcttttattaatgtcaggaaatgtataaactaaaacattgcccgaaagcggtgcctctatctgcgttatatccgttcttaacttacaaaatgtaaccaatacctttgcatgacttgttttgttcggcaacgttagtttaaacttgacgaatggattaattacaatagcatgatccgcgcatctattaagtttttttactttaacgcccttgtatgtttttacagagactttatctaaatttctagtgcttgtatgtgttataaatataacgggatatagaaccgaatcacctaccttagatacccaattacattttatcagatccagataataaacaaattttgtcgccctaactaattctatattgttatatattttacaattggttatgatatcatgtaataacttggagtctaacgcgcatcgtcgtacgtttatacaattgtgatttagtgtagtatatctacacatgtatttttccgcactatagtattctggactagtgataaaactatcgttatatctgtcttcaatgaactcatcgagatattgctctctgtcatattcatacacctgcataaactttctagacatcttacaatccgtgttattttaggatcatatttacatatttacgggtatatcaaagatgttagattagttaatgggaatcgtctataataatgaatattaaacaattatatgaggacttttaccacaaagcatcataaaaatgagtcgtcgtctgatttatgttttaaatatcaaccgcaaatcaactcataaaatacaagagaatgaaatatatacatattttagtcattgcaatatagaccatacttctacagaacttgattttgtagttaaaaactatgatctaaacagacgacaacctgtaactgggtatactgcactacactgctatttgtataataattactttacaaacgatgtactgaagatattattaaatcatgacgtaaatgtaacgatgaaaaccagtagcggacgtatgcctgtttatatattgcttactagatgttgtaatatttcacatgatgtagtgatagatatgatagacaaagataaaaaccacttattacatagagactattccaacctattactagagtatataaaatctcgttacatgttattgaaggaagaggatatcgatgagaacatagtatccactttattagataagggaatcgatcctaactttaaacaagacggatatacagcgttacattattattatttgtgtctcgcacacgtttataaactaggtgagtgtagaaaaccgataacgataaaaaaggccaagcgaattatttctttgtttatacaacatggagctaatctaaacgcgttagataattgtggtaatacaccattccatttgtatcttagtattgaaatgtgtaataatattcatatgactaaaatgctgttgacttttaatccgaatttcaaaatatgtaataatcatggattaacgcctatactatgttatataacttccgactacatacaacacgatattcttgttatgttaatacatcactatgaaacaaatgttggagaaatgccgatagatgagcgtcgtatgatcgtattcgagtttatcaaaacatattctacacgtccggcagattcgataacttatttgatgaataggtttaaaaatataaatatttatacccgctatgaaggaaagacattattacacgtagcatgtgaatataataatacacaagtaatagattatcttatacgtatcaacggagatataaatgcgttaaccgacaataacaaacacgctacacaactcattatagataacaaagaaaattccccatataccattaattgtttactgtatatacttagatatattgtagataagaatgtgataagatcgttggtggatcaacttccatctctacctatcttcgatataaaatcatttgagaaattcatatcctactgtatacttttagatgacacattttacgataggcacgttaagaatcgcgattctaaaacgtatcgatacgcattttcaaaatacatgtcgtttgataaatacgatggtataataactaaatgtcacgacgaaacaatgttactcaaactgtccactgttctagacactacactatatgcagttttaagatgtcataattcgagaaagttaagaagatacctcaacgagttaaaaaaatataataacgataagtcctttaaaatatattctaatattatgaatgagagataccttaatgtatattataaagatatgtacgtgtcaaaggtatatgataaactatttcctgttttcacagataaaaattgtctactaacattactaccttcagaaattatatacgaaatattatacatgctgacaattaacgatctttataatatatcgtatccacctaccaaagtatagttgtatttttctcatgcgatgtgtgtaaaaaaactgatattatataaatattttagtgccgtataataaagatgacgatgaaaatgatggtacatatatatttcgtatcattattgttattgctattccacagttacgccatagacatcgaaaatgaaatcacagaattcttcaataaaatgagagatactctaccagctaaagactctaaatggttgaatccagcatgtatgttcggaggcacaatgaatgatatagccgctctaggagagccattcagcgcaaagtgtcctcctattgaagacagtcttttatcgcacagatataaagactatgtggttaaatgggagaggctagaaaagaatagacggcgacaggtttctaataaacgtgttaaacatggtgatttatggatagccaactatacatctaaattcagtaaccgtaggtatttgtgcaccgtaactacaaagaatggtgactgtgttcagggtatagttagatctcatattaaaaaacctccttcatgcattccaaaaacatatgaactaggtactcatgataagtatggcatagacttatactgtggaattctttacgcaaaacattataataatataacttggtataaagataataaggaaattaatatcgacgacattaagtattcacaaacgggaaaggaattaattattcataatccagagttagaagatagcggaagatacgactgttacgttcattacgacgacgttagaatcaagaatgatatcgtagtatcaagatgtaaaatacttacggttataccgtcacaagaccacaggtttaaactaatactagatccgaaaatcaacgtaacgataggagaacctgccaatataacatgcactgctgtgtcaacgtcattattgatcgacgatgtactgattgaatgggaaaatccatccggatggcttataggattcgattttgatgtatactctgttttaactagtagaggcggtatcaccgaggcgaccttgtactttgaaaatgttactgaagaatatataggtaatacatataaatgtcgtggacacaactattattttgaaaaaacccttacaactacagtagtattggagtaaatatacaatgcatttttatatacattactgaattattattactgaattattattactgaattattattaattatatcgtatttgtgctatagaatggatgaagatacgcgactatctaggtatttgtatctcaccgatagagaacatataaatgtagactctattaaacagttgtgtaaaatatcagatcctaatgcatgttatagatgtggatgtacggctttacatgagtacttttataattatagatcagtcaacggaaaatacaagtatagatacaacggttactatcaatattattcatctagcgattatgaaaattataatgaatattattatgatagaactggtatgaacagtgagagtgataatatatcaatcaaaacagaatatgaattctatgatgaaacacaagatcaaagtacacaactagtaggttacgacattaaactcaaaaccaatgaggatgattttatggctatgatagatcagtgggtgtccatgattatatagatgaatcaattaataaagtagtatatggaagagagtctcacgtaagatggcgggatatatggcaagaacataatgatggcgtatacagtataggaaaggagtgcatagataatatatacgaagacaaccataccgtagacgaattctacaagatagacagcgtatcagatgtagatgacgcggaacacatatctccgataactaaaaaaccatagaatcagttgatgataatacctacatttctaatcttccgtataccatcaaatacaaaatattcgagcaacaataagtattttttatacctttaaaactgataaataaattttttctagtgatattttggcaagatgagaatcctatttctcatcgctttcatgtatgggtgtgttcactcatatgttaacgcggttgaaaccaaatgtccaaatctagacattgtaacatcttctggagaatttcattgttcaggatgtgtggaacatatgcctgagtttagctatatgtattggttggcaaaggatatgaaatcggacgaggataccaagtttatagaacatctgggtgatggcatcaaagaagatgaaaccgttcgtaccacagatagtggaatcgtcactctacgtaaagtccttcatgtgactgatactaataaatttgataattataggttcacttgtgtcctcgctacgctagatggcatttataaaaagaatgtttgctgaagtagttgtgtgctactatttttatttatgatataatctaatggaattaatttgaattgatatttatccaatactaaagattatattagaatcaaattaatcttttatacgagaaaaaataacgacatacgtcgtcaacaaattaaactttttatttattagttaactagcttatagaacttgctcattgttatgtttctaaaacgggtacggcatataggacaattatccgacgcaccggtttctcttcgtgttctatgccatatattgatgcatgttatgcaaaatatatgagtacacgaatccaataaaccaaagtatctatcgttttgagtaaacaacttcatagcaaattccacattctttttctttacttactctatacacgtcctcgtatttatttagtattttgatgatatccaactcagaaatggttgttgtattattgggtgtatttggagtataggtattattagctatgtaccaatttaccaaccctcttaatattgattgataatcacatcggttatccaattaataactaaattgtagtgtatatatagaccatatatgtttctatttttttgacagttacgtatagtttcagtaagttttgattgttgtattcctgtatctctagataagttagtcatatagtcccttccggcgatacgttttttccaagcccgaaattgattagccaaatgtgtatttatttttgtgatattgatataatatttcggataatgcatactgttagtcttatatcatttggttcatctatgtattgtaatattgttacatgatctatagatgatgtattgattttggcaggatcgaattccatatccgcgactaaacagtgaaaaaaatgtaaatactttttaaattttaaattagtaaaacttttttttattttttatgattccaaaaatactgaatacaaagtcctaaattataaatatggagatcatactaccacaacttattattatgtatacaaggccggtgtaatagatagatatatataattctattacaccggcagacaattaccgaccggtatttgtcgttaccaacataccgtataatatgtaatatacaattccataacccattgacagttgttatacatcaaaattgcaattcttttgattacgatgttataagaatgtagttaattgatgtatgatgttaatgtgtcctctttcctcttataacatcgtaatcaaaaacttttttataatatatacctaataatgtgtcttaatagttctcgtgattcgtcaaacaatcattcttataaaatataataaagcaacgtaaaaacacataaaaataagcgtaactaataagacaatggatatttacgacgataaaggtctacagactattaaactgtttaataatgaatttgattgtataaggaatgacatcagagaattatttaaacatgtaactgattccgatagtatacaacttccgatggaagacaattctgatattatagaaaatatcagaaaaatactatatagacgattaaaaaatgtagaatgtgttgacatcgataacacaataacttttatgaaatacgatccaaatgatgataataagcgtacgtgttctaattgggtacccttaactaataactatatggaatattgtctagtaatatatttggaaacaccgatatgtggaggcaaaataaaattataccaccctacaggaaatataaagtcggataaggatattatgtttgcaaagactctagactttaaatcaacgaaagtgttaactggacgtaaaacaattgccgttctagacatatccgtttcatataatagatcaatgactactattcactacaacgacgacgttgatatagatatacatactgataaaaatggaaaagagttatgttattgttatataacaatagatgatcattacttggttgatgtggaaactataggagttatagtcaatagatctggaaaatgtctgttagtaaataaccatctaggtataggtatcgttaaagataaacgtataagcgatagttttggagatgtatgtatggatacaatatttgacttttctgaagcacgagagttattttcattaactaatgatgataacaggaatatagcatgggacactgataaactagacgatgatacagatatatggactcccgtcacagaagatgattacaaatttctttctagactagtattgtatgcaaaatctcaatcggatactgtatttgactattatgttcttactggtgatacggaaccacccactgtattcattttcaaggtaactagattttactttaatatgccgaaataaaaaatttttgtataatatctagaggtagaggtattgtttagataaatacaaataacatagatacatcgcatacttagcatttttataaatatacataagacatacactttatacatttttgtaaaaatactcataaaaaaatttataaaaattatggcacaaccatatcttgtataggtagtttagttcgtcgagtgaacctataaacagataatagacaacacataataatgcctactaatacaagcataataccgggagatgggatatatgacgttgtagtgtttgggttttctgaacgttgatagtctactaatactacatgctgacatctaatgcctgtataaccatgagagcatctacaatacataccgtcaatatctctagcgtggatacagtcaccgtgtaaacaatatccatctccctctggaccgcataatctgatagctggaatatctgttgtagcgtttgtaatttctggcaatgtcgtttcgatagcgttaccactatcggcgaatgatctgattatcatagcagcgaacaacaacatcagataatttatcaacatttttgatggattctgtgtttatgctgtttctcagtgtgtgtttatgacaagattgggaattttatattattaattcagtaatataaactaataatatattgttaattgtgtaaataatataaaaataacaatacaatattgaatgtgttgctgttaaaaatgtatgtgttaatataatagaataaaataaatgagtatgatcattttagataacgattgattttatcattaccgcttcattcttatattctttgcttacggaacctatatttagaaacatctactaacaattttttatgcttgcattattaatggtatgtaatatgattgattgtgtacgcaataccaatttgttaagtatgaatacggggtacaaacataaattgaaatttaacattatttatttatgatatatatcgttatcgttaggtctataccatggatatctttaaagaactaatcttaaaacaccctgatgaaaatgttttgatttctccagtttccattttatctactttatctattctaaatcatggagcagctggttctacagctgaacaactatcaaaatatatagagaatatgaatgagaatacacccgatgacaataatgatgacatggaggtagatattccgtattgtgcgacactagctaccgcaaataaaatatacggtagcgatagtatcgagttccacgcctccttcctacaaaaaataaaagacgattttcaaactgtaaactttaataatgctaaccaaacaaaggaactaatcaacgaatgggttaagacaatgacaaatggtaaaattaattccttattgactagtccgctatccattaatactcgtatgacagttgttagcgccgtccattttaaagcaatgtggaaatatccattttctaaacatcttacatatacagacaagttttatatttctaagaatatagttaccagcgttgatatgatggtgggtaccgagaataacttgcaatatgtacatattaatgaattattcggaggattctctattatcgatattccatacgagggaaactctagtatggtaattatactaccggacgacatagaaggtatatataacatagaaaaaaatataacagatgaaaaatttaaaaaatggtgtggtatgttatctactaaaagtatagacttgtatatgccaaagtttaaagtggaaatgacagaaccgtataatctggtaccgattttagaaaatttaggacttactaatatattcggatattatgcagattttagcaagatgtgtaatgaaactatcactgtagaaaaatttctacatacgacgtttatagatgttaatgaggagtatacagaagcatcggccgttacaggagtatttacgattaacttttcgatggtatatcgtacgaaggtctacataaaccatccattcatgtacatgattaaagacaccacaggacgtatactttttatagggaaatactgctatccgcaataaatataaacaaatagacttttataaagagtcttcaacgataagtatatcgacatactacttatgctgcgaaagattctgaacgagaacgactatctcaccctcttggatcatatccgcactgctaaatactaaatctccactacactttttatcatcttatgaggaatgattgccttcgtgaaataggaataattagcaccagaatagctatggattattgtggtagagagtgcactattctatgtcgtctactggatgaagatgtgacgtacaaaaaaataaaactagaaattgaaacgtgtcacaacttatcaaaacatatagatagacgaggaaacaatgcgctacattgttacgtctccaataaatgcgatacagacattaagattgttctctcgcggagtcgagagactttgtagaaacaacgaaggattaactccgctaggagtatacagtaagcatagatacgtaaaatctcagattgtgcatctactgatatccagctattcaaattcctctaacgaactcaagtcgaatataaatgatttcgatctgtattcggataatatcgacttacgtctgctaaaatacctaattgtggataaacggatacgtccgtccaagaatacgaattatgcaatcaatggtctcggattggtggatatatacgtaacgacgcctaatccgagaccagaagtattgctatggcttcttaaatcagaatgttacagcaccggttacgtatttcgtacctgtatgtacgacagtgatatgtgtaagaactctcttcattactatatatcgtctcatagagaatctcaatctctatccaaggatgtaattaaatgtttgatcgataacaatgtttccatccatggcagagacgaaggaggatctttacccatccaatactactggtctttctcaaccatagatatagagattgttaaattattattaataaaggatgtggacacgtgtagagtatacgacgtcagccctatattagaggcgtattatctaaacaagcgatttagagtaaccccatataatgtagacatggaaatcgttaatcttcttattgagagacgtcatactcttgtcgacgtaatgcgtagtattacttcgtacgattccagagaatataaccactacatcatcgataacattctaaagagatttagacaacaggatgaatccatcgtacaagccatactgataaactacttacattacggcgatatggtcgttcgatgcatgttagataacggacaacaactatcctctacacgactactttgttaataataatctcgtcgatgtaaacgtcgtaaggtttatcgtggaaaatatggacacgcggctgtaaatcacgtatcgaacaatggccgtctatgtatgtacggtctgatattatcgagatttaataattgcgggtatcactgttatgaaaccatactgatagatgtatttgatatactaagcaagtacatggatgatatagatatgatcgataactctactatattacgcggtcgatgtcaataatatacaatttgcaaagcggttattggaatatggagcgagtatcacgctcgataatcaatacggccatccagaaaagcagttacagaagagaaaacaaaacgaaatcgttgttctacaagatgtctctccctacgacgattactacgtaaaaaagatactagcctactgcctattaagggacgagtcattcgcggaactacatagtaaattctgtttaaacgaggactataaaagtgtatttatgaaaaatatatcattcgataagatagattccatcatcgtgacataagtcgcctcaaagagattcgaatctccgacaccgacctgtatacggtatcacagctatcttaaagccatacattcagacagtcacatttcatttcccatgtacgacgatctcatagaacagtgccatctatcgatggagcgtaaaagtaaactcgtcgacaaagcactcaataaattagagtctaccatcggtcaatctagactatcgtatttgcctccggaaattatgcgcaatatcatctaaacagtatgttgtacggaaagaaccattacaaatattatccatgatagaaagaaaatatctatatgattggagaagtaggaaacaggaacaagacaacgattactacattattaaatcatgaagtccgtattatactcgtatatattgtttctctcatgtataataataaacggaagagatatagcaccgcatgcaccatccgatggaaagtgtaaagacaacgaatacaaacgccataatttgtgtccgggaacatacgcttccagattatgcgatagcaagactaacacacgatgtacgccgtgtggttcgggtaccttcacatctcgcaataatcatttacccgcttgtctaagttgtaacggaagacgcgatcgtgtaacacgactcacaatagaatctgtgaatgctctcccggatattattgtcttctcaaaggatcatccggatgcaaggcatgtgtttcccaaacaaaatgtggaataggatacggagtatccggagacgtcatctgttctccgtgtggtctcggaacatattctcacaccgtctcttccgcagataaatgcgaacccgtacccagaaatacgtttaactatatcgatgtggaaattaacctgtatccagttaacgacacgtcgtgtactcggacgaccactaccggtctcagcgaatccatctcaacgtcggaactaactattactatgaatcataaagactgtaatcccgtatttcgtgatggatacttctccgttcttaataaggtagcgacttcaggtttctttacaggagaaaggtgtgcactctgaatttcgagattaaatgcaataacaaagattcttcctccaaacagttaacgaaagcaaagaatgatactatcatgccgcattcggagacagtaactctagtgggcgacatctatatactatatagtaataccaatactcaagactacgaaactgatacaatctcttatcatgtgggtaatgttctcgatgtcgatagccatatgcccggtagttgcgatatacataaactgatcactaattccaaacccacccactttttatagtaagtttttcacccataaataataaatacaataattaatttctcgtaaaagtagaaaatatattctaatttattgcacggtaaggaagtagaatcataaagaacagtactcaatcaatagcaattatgaaacaatatatcgtcctggcatgcatgtgcctggcggcagctgctatgcctgccagtcttcagcaatcatcctcatcctcctcctcgtgtacggaagaagaaaacaaacatcatatgggaatcgatgttattatcaaagtcacaaagcaagaccaaacaccgaccaatgataagatttgccaatccgtaacggaaattacagagtccgagtcagatccagatcccgaggtggaatcagaagatgattccacatcagtcgaggatgtagatcctcctaccacttattactccatcatcggtggaggtctgagaatgaactttggattcaccaaatgtcctcagattaaatccatctcagaatccgctgatggaaacacagtgaatgctagattgtccagcgtgtccccaggacaaggtaaggactctcccgcgatcactcatgaagaagctcttgctatgatcaaagactgtgaagtgtctatcgacatcagatgtagcgaagaagagaaagacagcgacatcaagacccatccagtactcgggtctaacatctctcataagaaagtgagttacgaagatatcatcggttcaacgatcgtcgatacaaaatgcgtcaagaatctagagtttagcgttcgtatcggagacatgtgcaaggaatcatctgaacttgaggtcaaggatggattcaagtatgtcgacggatcggcatctgaaggtgcaaccgatgatacttcactcatcgattcaacaaaactcaaagcgtgtgtctgaatcgataactctattcatctgaaattggatgagtagggttaatcgaacgattcaggcacaccacgaattaaaaaagtgtaccggacactatattccggtttgcaaaacaaaaatgttcttaactacattcacaaaaagttacctctcgcgacttcttctttttctgtctcaatagtgtgatacgattatgacactattcctattcctattcctatttcctttcagagtatcacaaaaatattaaacctctttctgatggtctcataaaaaaagttttacaaaaatatttttattctctttctctctttgatggtctcataaaaaaagttttacaaaaatatttttattctctttctctctttgatggtctcataaaaaaagttttacaaaaatatttttattctctttctctctttgatggtctcataaaaaaagttttacaaaaatatttttattctctttctctctttgatggtctcataaaaaaagttttacaaaaatatttttattctctttctctctttgatggtctcataaaaaaagttttacaaaaatatttttattctctttctctctttgatggtctcataaaaaaagttttacaaaaatatttttattctctttctctctttgatggtctcataaaaaaagttttacaaaaatatttttattctctttctctctttgatggtctcataaaaaaagttttacaaaaatatttttattctctttctctctttgatggtctcataaaaaaagttttacaaaaatatttttattctctttctctctttgatggtctcataaaaaaagttttacaaaaatatttttattctctttctctctttgatggtctcataaaaaaagttttacaaaaatatttttattctctttctctctttgatggtctcataaaaaagttttacaaaaatatttttattctctttctctctttgatggtctcataaaaaagttttacaaaaatatttttattctctttctctctttgatggtctcataaaaaaagttttacaaaaatatttttattctctttctctctttgatggtctcataa

SEQ ID NO: 191 - DNA, 201471 bp, Artificial Sequence
  GLV-1h189
ttatgagaccatcaaagagagaaagagaataaaaatatttttgtaaaactttttttatgagaccatcaaagagagaaagagaataaaaatatttttgtaaaacttttttatgagaccatcaaagagagaaagagaataaaaatatttttgtaaaacttttttatgagaccatcaaagagagaaagagaataaaaatatttttgtaaaactttttttatgagaccatcaaagagagaaagagaataaaaatatttttgtaaaactttttttatgagaccatcaaagagagaaagagaataaaaatatttttgtaaaactttttttatgagaccatcaaagagagaaagagaataaaaatatttttgtaaaactttttttatgagaccatcaaagagagaaagagaataaaaatatttttgtaaaactttttttatgagaccatcaaagagagaaagagaataaaaatatttttgtaaaactttttttatgagaccatcaaagagagaaagagaataaaaatatttttgtaaaactttttttatgagaccatcaaagagagaaagagaataaaaatatttttgtaaaactttttttatgagaccatcaaagagagaaagagaataaaaatatttttgtaaaactttttttatgagaccatcaaagagagaaagagaataaaaatatttttgtaaaactttttttatgagaccatcaaagagagaaagagaataaaaatatttttgtaaaactttttttatgagaccatcaaagagagaaagagaataaaaatatttttgtaaaactttttttatgagaccatcagaaagaggtttaatatttttgtgatactctgaaaggaaataggaataggaataggaatagtgtcataatcgtatcacactattgagacagaaaaagaagaagtcgcgagaggtaactttttgtgaatgtagttaagaacatttttgttttgcaaaccggaatatagtgtccggtacacttttttaattcgtggtgtgcctgaatcgttcgattaaccctactcatccaatttcagatgaatagagttatcgattcagacacacgctttgagttttgttgaatcgatgagtgaagtatcatcggttgcaccttcagatgccgatccgtcgacatacttgaatccatccttgacctcaagttcagatgattccttgcacatgtctccgatacgaacgctaaactctagattcttgacgcattttgtatcgacgatcgttgaaccgatgatatcttcgtaactcactttcttatgagagatgttagacccgagtactggatgggtcttgatgtcgctgtctttctcttcttcgctacatctgatgtcgatagacacttcacagtctttgatcatagcaagagcttcttcatgagtgatcgcgggagagtccttaccttgtcctggggacacgctggacaatctagcattcactgtgtttccatcagcggattctgagatggatttaatctgaggacatttggtgaatccaaagttcattctcagacctccaccgatgatggagtaataagtggtaggaggatctacatcctcgactgatgtggaatcatcttctgattccacctcgggatctggatctgactcggactctgtaatttccgttacggattggcaaatcttatcattggtcggtgtttggtcttgctttgtgactttgataataacatcgattcccatatgatgtttgttttcttcttccgtacacgaggaggaggatgaggatgattgctgaagactggcaggcatagcagctgccgccaggcacatgcatgccaggacgatatattgtttcataattgctattgattgagtactgttctttatgattctacttccttaccgtgcaataaattagaatatattttctacttttacgagaaattaattattgtatttattatttatgggtgaaaaacttactataaaaagtgggtgggtttggaattagtgatcagtttatgtatatcgcaactaccgggcatatggctatcgacatcgagaacattacccacatgataagagattgtatcagtttcgtagtcttgagtattggtattactatatagtatatagatgtcgcccactagagttactgtctccgaatgcggcatgatagtatcattctttgctttcgttaactgtttggaggaagaatctttgttattgcatttaatctcgaaattcagagtgcacacctttctcctgtaaagaaacctgaagtcgctaccttattaagaacggagaagtatccatcacgaaatacgggattacagtctttatgattcatagtaatagttagttccgacgttgagatggattcgctgagaccggtagtggtcgtccgagtacacgacgtgtcgttaactggatacaggttaatttccacatcgatatagttaaacgtatttctgggtacgggttcgcatttatctgcggaagagacggtgtgagaatatgttccgagaccacacggagaacagatgacgtctccggatactccgtatcctattccacattttgtttgggaaacacatgccttgcatccggatgatcctttgagaagacaataatatccgggagagcattcacagattctattgtgagtcgtgttacacgatcgcgtcttccgttacaacttagacaagcgggtaaatgattattgcgagatgtgaaggtacccgaaccacacggcgtacatcgtgtgttagtcttgctatcgcataatctggaagcgtatgttcccggacacaaattatggcgtttgtattcgttgtctttacactttccatcggatggtgcatgcggtgctatatctcttccgtttattattatacatgagagaaacaatatatacgagtataatacggacttcatgatttaataatgtagtaatcgttgtcttgttcctgtttcctacttctccaatcatatagatattttctttctatcatggataatatttgtaatggttctttccgtacaacatactgtttagatgatattgcgcataatttccggaggcaaatacgatagtctagattgaccgatggtagactctaatttattgagtgctttgtcgacgagtttacttttacgctccatcgatagatggcactgttctatgagatcgtcgtacatgggaaatgaaatgtgactgtctgaatgtatggctttaagatagctgtgataccgtatacaggtcggtgtcggagattcgaatctctttgaggcgacttatgtcacgatgatggaatctatcttatcgaatgatatatttttcataaatacacttttatagtcctcgtttaaacagaatttactatgtagttccgcgaatgactcgtcccttaataggcagtaggctagtatcttttttacgtagtaatcgtcgtagggagagacatcttgtagaacaacgatttcgttttgttttctcttctgtaactgcttttctggatggccgtattgattatcgagcgtgatactcgctccatattccaataaccgctttgcaaattgtatattattgacatcgaccgcgtaatatagtagagttatcgatcatatctatatcatccatgtacttgcttagtatatcaaatacatctatcagtatggtttcataacagtgatacccgcaattattaaatctcgataatatcagaccgtacatacatagacggccattgttcgatacgtgatttacagccgcgtgtccatattttccacgataaaccttacgacgtttacatcgacgagattattattaacaaagtagtcgtgtagaggatagttgttgtccgttatctaacatgcatcgaacgaccatatcgccgtaatgtaagtagtttatcagtatggcttgtacgatggattcatcctgttgtctaaatctctttagaatgttatcgatgatgtagtggttatattctctggaatcgtacgaagtaatactacgcattacgtcgacaagagtatgacgtctctcaataagaagattaacgatttccatgtctacattatatggggttactctaaatcgcttgtttagataatacgcctctaatatagggctgacgtcgtatactctacacgtgtccacatcctttattaataataatttaacaatctctatatctatggttgagaaagaccagtagtattggatgggtaaagatcctccttcgtctctgccatggatggaaacattgttatcgatcaaacatttaattacatccttggatagagattgagattctctatgagacgatatatagtaatgaagagagttcttacacatatcactgtcgtacatacaggtacgaaatacgtaaccggtgctgtaacattctgatttaagaagccatagcaatacttctggtctcggattaggcgtcgttacgtatatatccaccaatccgagaccattgattgcataattcgtattcttggacggacgtatccgtttatccacaattaggtattttagcagacgtaagtcgatattatccgaatacagatcgaaatcatttatattcgacttgagttcgttagaggaatttgaatagctggatatcagtagatgcacaatctgagattttacgtatctatgcttactgtatactcctagcggagttaatccttcgttgtttctacaaagtctctcgactccgcgagagaacaatcttaatgtctgtatcgcatttattggagacgtaacaatgtagcgcattgtttcctcgtctatctatatgttttgataagttgtgacacgtttcaatttctagttttatttttttgtacgtcacatcttcatccagtagacgacatagaatagtgcactctctaccacaataatccatagctattctggtgctaattattcctatttcacgaaggcaatcattcctcataagatgataaaaagtgtagtggagatttagtatttagcagtgcggatatgatccaagagggtgagatagtcgttctcgttcagaatctttcgcagcataagtagtatgtcgatatacttatcgttgaagactctttataaaagtctatttgtttatatttattgcggatagcagtatttccctataaaaagtatacgtcctgtggtgtctttaatcatgtacatgaatggatggtttatgtagaccttcgtacgatataccatcgaaaagttaatcgtaaatactcctgtaacggccgatgcttctgtatactcctcattaacatctataaacgtcgtatgtagaaatttttctacagtgatagtttcattacacatcttgctaaaatctgcataatatccgaatatattagtaagtcctaaattttctaaaatcggtaccagattatacggttctgtcatttccactttaaactttggcatatacaagtctatacttttagtagataacataccacaccattttttaaatttttcatctgttatatttttttctatgttatatataccttctatgtcgtccggtagtataattaccatactagagtttccctcgtatggaatatcgataatagagaatcctccgaataattcattaatatgtacatattgcaagttattctcggtacccaccatcatatcaacgctggtaactatattcttagaaatataaaacttgtctgtatatgtaagatgtttagaaaatggatatttccacattgctttaaaatggacggcgctaacaactgtcatacgagtattaatggatagcggactagtcaataaggaattaattttaccatttgtcattgtcttaacccattcgttgattagttcctttgtttggttagcattattaaagtttacagtttgaaaatcgtcttttattttttgtaggaaggaggcgtggaactcgatactatcgctaccgtatattttatttgcggtagctagtgtcgcacaatacggaatatctacctccatgtcatcattattgtcatcgggtgtattctcattcatattctctatatattttgatagttgttcagctgtagaaccagctgctccatgatttagaatagataaagtagataaaatggaaactggagaaatcaaaacattttcatcagggtgttttaagattagttctttaaagatatccatggtatagacctaacgataacgatatatatcataaataaataatgttaaatttcaatttatgtttgtaccccgtattcatacttaacaaattggtattgcgtacacaatcaatcatattacataccattaataatgcaagcataaaaaattgttagtagatgtttctaaatataggttccgtaagcaaagaatataagaatgaagcggtaatgataaaatcaatcgttatctaaaatgatcatactcatttattttattctattatattaacacatacatttttaacagcaacacattcaatattgtattgttatttttatattatttacacaattaacaatatattattagtttatattactgaattaataatataaaattcccaatcttgtcataaacacacactgagaaacagcataaacacagaatccatcaaaaatgttgataaattatctgatgttgttgttcgctgctatgataatcagatcattcgccgatagtggtaacgctatcgaaacgacattgccagaaattacaaacgctacaacagatattccagctatcagattatgcggtccagagggagatggatattgtttacacggtgactgtatccacgctagagatattgacggtatgtattgtagatgctctcatggttatacaggcattagatgtcagcatgtagtattagtagactatcaacgttcagaaaacccaaacactacaacgtcatatatcccatctcccggtattatgcttgtattagtaggcattattatgtgttgtctattatctgtttataggttcactcgacgaactaaactacctatacaagatatggttgtgccataatttttataaatttttttatgagtatttttacaaaaatgtataaagtgtatgtcttatgtatatttataaaaatgctaagtatgcgatgtatctatgttatttgtatttatctaaacaatacctctacctctagatattatacaaaaattttttatttcggcatattaaagtaaaatctagttaccttgaaaatgaatacagtgggtggttccgtatcaccagtaagaacataatagtcaaatacagtatccgattgagattttgcatacaatactagtctagaaagaaatttgtaatcatcttctgtgacgggagtccatatatctgtatcatcgtctagtttatcagtgtcccatgctatattcctgttatcatcattagttaatgaaaataactctcgtgcttcagaaaagtcaaatattgtatccatacatacatctccaaaactatcgcttatacgtttatctttaacgatacctatacctagatggttatttactaacagacattttccagatctattgactataactcctatagtttccacatcaaccaagtaatgatcatctattgttatataacaataacataactcttttccatttttatcagtatgtatatctatatcaacgtcgtcgttgtagtgaatagtagtcattgatctattatatgaaacggatatgtctagaacggcaattgttttacgtccagttaacactttcgttgatttaaagtctagagtctttgcaaacataatatccttatccgactttatatttcctgtagggtggtataattttattttgcctccacatatcggtgtttccaaatatattactagacaatattccatatagttattagttaagggtacccaattagaacacgtacgcttattatcatcatttggatcgtatttcataaaagttattgtgttatcgatgtcaacacattctacattttttaatcgtctatatagtatttttctgatattttctataatatcagaattgtcttccatcggaagttgtatactatcggaatcagttacatgtttaaataattctctgatgtcattccttatacaatcaaattcattattaaacagtttaatagtctgtagacctttatcgtcgtaaatatccattgtcttattagttacgcttatttttatgtgtttttacgttgctttattatattttataagaatgattgtttgacgaatcacgagaactattaagacacattattaggtatatattataaaaaagtttttgattacgatgttataagaggaaagaggacacattaacatcatacatcaattaactacattcttataacatcgtaatcaaaagaattgcaattttgatgtataacaactgtcaatgggttatggaattgtatattacatattatacggtatgttggtaacgacaaataccggtcggtaattgtctgccggtgtaatagaattatatatatctatctattacaccggccttgtatacataataataagttgtggtagtatgatctccatatttataatttaggactttgtattcagtatttttggaatcataaaaaataaaaaaaagttttactaatttaaaatttaaaaagtatttacatttttttcactgtttagtcgcggatatggaattcgatcctgccaaaatcaatacatcatctatagatcatgtaacaatattacaatacatagatgaaccaaatgatataagactaacagtatgcattatccgaaatattatatcaatatcacaaaaataaatacacatttggctaatcaatttcgggcttggaaaaaacgtatcgccggaagggactatatgactaacttatctagagatacaggaatacaacaatcaaaacttactgaaactatacgtaactgtcaaaaaaatagaaacatatatggtctatatatacactacaatttagttattaattggataaccgatgtgattatcaatcaatattaagagggttggtaaattggtacatagctaataatacctatactccaaatacacccaataatacaacaaccatttctgagttggatatcatcaaaatactaaataaatacgaggacgtgtatagagtaagtaaagaaaaagaatgtggaatttgctatgaagttgtttactcaaaacgatagatactttggtttattggattcgtgtactcatatattttgcataacatgcatcaatatatggcatagaacacgaagagaaaccggtgcgtcggataattgtcctatatgccgtacccgttttagaaacataacaatgagcaagttctataagctagttaactaataaataaaaagtttaatttgttgacgacgtatgtcgttattttttctcgtataaaagattaatttgattctaatataatctttagtattggataaatatcaattcaaattaattccattagattatatcataaataaaaatagtagcacacaactacttcagcaaacattctttttataaatgccatctagcgtagcgaggacacaagtgaacctataattatcaaatttattagtatcagtcacatgaaggactttacgtagagtgacgattccactatctgtggtacgaacggtttcatcttctttgatgccatcacccagatgttctataaacttggtatcctcgtccgatttcatatcctttgccaaccaatacatatagctaaactcaggcatatgttccacacatcctgaacaatgaaattctccagaagatgttacaatgtctagatttggacatttggtttcaaccgcgttaacatatgagtgaacacacccatacatgaaagcgatgagaaataggattctcatcttgccaaaatatcactagaaaaaatttatttatcagttttaaaggtataaaaaatacttattgttgctcgaatattttgtatttgatggtatacggaagattagaaatgtaggtattatcatcaactgattctatggttttatgtattctatcatgtttcactattgcgttggaaataatatcatatgcttccacatatattttattttgttttaactcataatactcacgtaattctggattattggcatatctatgaataattttagctccatgatcagtaaatattaatgagaacatagtattaccacctaccattatttttttcatctcattcaattcttaattgcaaagatctatataatcattatagcgttgacttatggactctggaatcttagacgatgtacagtcatctataatcatggcatatttaatacattgttttatagcatagtcgttatctacgatgttagatatttctctcaatgaatcaatcacacaatctaatgtaggtttatgacataatagcattttcagcagttcaatgtttttagattcgttgatggcaatggctatacatgtatatccgttatttgatctaatgttgacatctgaaccggattctagcagtaaagatactagagattgtttattatatctaacagccttgtgaagaagtgtttctcctcgtttgtcaatcatgttaatgtctttaagataaggtaggcaaatgtttatagtactaagaattgggcaagcataagacatgtcacaaagacccttttttgtatgtataagtgtaaaaattataacatccatagttggatttacataggtgtccaatcgggatctctccatcatcgagataattgatggcatctcccttccttttttagtagatatttcatcgtgtaagaatcaatattaatatttctaaagtatccgtgtatagcctctttatttaccacagctccatattccactagagggatatcgccgaatgtcatatactcaattagtatatgttggaggacatccgagttcattgttttcaatatcaaagagatggtttccttatcatttctccatagtggtacaatactacacattattccgtgcggctttccattttccaaaaacaatttgaccaaatctaaatctacatctttattgtatctataatcactatttagataatcagccataattcctcgagtgcaacatgttagatcgtctatatatgaataagcagtgttatctattcctttcattaacaatttaacgatgtctatatctatatgagatgacttaatataatattgaagagctgtacaatagtttttatctataaaagacggcttgattccgtgattaattagacatttaacaacttccggacgcacatatgctctcgtatccgactctgaatacagatgagagatgatatacagatgcaatacggtaccgcaatttcgtagttgataatcatcatacgcgtatcagtactcgtcctcataaagaacactgcagccattttctatgaacaaatcaataattttagaaacaggatcattgtcattacataattttctataactgaacgatggttttcacatttaacactcaagtcaaatccatgttctaccaacacctttatcaagtcaacgtctacatttttggatttcatatagctgaatatattaaagttatttatgttgctaaatccagtggcttctagtagagccatcgctatatccttattaactttaacatgtctactatttgtgtattcttctaatggggtaagctgtctccaatttttgcgtaatggattagtgccactgtctagtagtagtttgacgacctcgacattattacaatgctcattaaaaaggtatgcgtgtaaagcattattcttgaattggttcctggtatcattaggatctctgtctttcaacatctgtttaagttcatcaagagccacctcctcattttccaaatagtcaaacattttgactgaatgagctactgtgaactctatacacccacacaactaatgtcattaaatatcatgtcaaaaacttgtacaattattaataaaaataatttagtgtttaaattttaccagttccagattttacacctccgttaatacctccattaaccccactggacgatcctcctccccacattccaccgccaccagatgtataagttttagatcctttattactaccatcatgtccatggataaagacactccacatgccgccactaccccctttagaagacatattaataagacttaaggacaagtttaacaataaaattaatcacgagtaccctactaccaacctacactattatatgattatagtttctatttttacagtaccttgactaaagtttctagtcacaagagcaatactaccaacctacactattatatgattatagtttctatttttataggaacgcgtacgagaaaatcaaatgtctaatttctaacggtagtgttgataaacgattgttatccgcggatacctcctctatcatgtcgtctattttcttactttgttctattaacttattagcattatatattatttgattataaaacttatattgcttattagcccaatctgtaaatatcggattattaacatatcgtttctttgtaggtttatttaacatgtacatcactgtaagcatgtccttaccatttattttaatttgacgcatatccgcaatttctttttcgcagtcggttataaattctatatatgatggatacatgctacatgtgtacttataatcgactaatatgaagtacttgatacatattttcagtaacgatttattattaccacctatgaataagtacctgtgatcgtctaggtaatcaactgttttcttaatacattcgatggttggtaatttactcagaataatttccaatatcttaatatataattctgctatttctgggatatatttatctgccagtataacacaaatagtaatacatgtaaacccatattttgttattatattaatgtctgcgccattatctattaaccattctactaggctgacactatgcgactcaatacaatgataaagtatactacatccatgtttatctattttgtttatatcatcaatatacggcttacaaagttttagtatcgataacacatccaactcacgcatagagaaggtagggaataatggcataatatttattaggttatcatcattgtcattatctacaactaagtttccattttttaaaatatactcgacaactttaggatctctattgccaaatttttgaaaatatttatttatatgcttaaatctatataatgtagctccttcatcaatcatacatttaataacattgatgtatactgtatgataagatacatattctaacaatagatcttgtatagaatctgtatatcttttaagaattgtggatattaggatattattacataaactattacacaattctaaaatataaaacgtatcacggtcgaataatagttgatcaactatataattatcgattttgtgatttttcttcctaaactgtttacgtaaatagttagatagaatattcattagttcatgaccactatagttactatcgaataacgcgtcaaatatttcccgtttaatatcgcatttgtcaagataataatagagtgtggtatgttcacgataagtataataacgcatctctttttcgtgtgaaattaaatagtttattacgtccaaagatgtagcataaccatcttgtgacctagtaataatataataatagagaactgttttacccattctatcatcataatcagtggtgtagtcgtaatcgtaatcgtctaattcatcatcccaattataatattcaccagcacgtctaatctgttctattttgatcttgtatccatactgtatgttgctacatgtaggtattcctttatccaataatagtttaaacacatctacattgggatttgatgttgtagcgtatttttctacaatattaataccatttttgatactatttatttctatacctttcgaaattagtaatttcaataagtctatattgatgttatcagaacatagatattcgaatatatcaaaatcattgatatttttatagtcgactgacgacaataacaaaatcacaacatcgtttttgatattattatttttcttggtaacgtatgcctttaatggagtttcaccatcatactcatataatggatttgcaccactttctatcaatgattgtgcactgctggcatcgatgttaaatgttttacaactatcatagagtatcttatcgttaaccatgattggttgttgatgctatcgcattttttggtttctttcatttcagttatgtatggatttagcacgtttgggaagcatgagctcatatgatttcagtactgtagtgtcagtactattagtttcaataagatcaatctctagatctatagaatcaaaacacgataggtcagaagataatgaatatctgtaggcttcttgttgtactgtaacttctggttttgttagatggttgcatcgtgctttaacgtcaatggtacaaattttatcctcgctttgtgtatcatattcgtccctactataaaattgtatattcagattatcatgcgatgtgtatacgctaacggtatcaataaacggagcacaccatttagtcataaccgtaatccaaaaatttttaaagtatatcttaacgaaagaagttgtgtcattgtctacggtgtatggtactagatcctcataagtgtatatatctagagtaatgtttaatttattaaatggttgataatatggatcctcgtgacaatttccgaagatggaaataagacataaacacgcaataaatctaattgcggacatggttactccttaaaaaaatacgaataatcaccttggctatttagtaagtgtcatttaacactatactcatattaatccatggactcataatctctatacgggattaacggatgttctatatacggggatgagtagttctcttctttaactttatactttttactaatcatatttagactgatgtatgggtaatagtgtttgaagagctcgttctcatcatcagaataaatcaatatctctgtttttttgttatacagatgtattacagcctcatatattacgtaatagaacgtgtcatctaccttattaactttcaccgcatagttgtttgcaaatacggttaatcctttgacctcgtcgatttccgaccaatctgggcgtataatgaatctaaactttaattgcttgtaatcattcgaaataatttttagtttgcatccgtagttatcccctttatgtaactgtaaatttctcaacgcgatatctccattaataatgatgtcgaattcgtgctgtatacccatactgaatggatgaacgaataccgacggcgttaatagtaatttactttttcatctttacatattgggtactagttttactatcataagtttataaattccacaagctactatggaataagccaaccatcttagtataccacacatgtcttaaagtttattaattaattacatgttgttttatatatatcgctacgaatttaaagagaaattagtttaggaagaaaaattatctatctacatcatcacgtctctgtattctacgatagagtgctactttaagatgcgacagatccgtgtcatcaaatatatactccattaaaatgattattccggcagcgaacttgatattggatatatcacaacctttgttaatatctacgacaatagacagcagtcccatggttccataaacagtgagtttatctttctttgaagagatattttgtagagatcttataaaactgtcgaatgacatcgcatttatatctttagctaaatcgtatatgttaccatcgtaatatctaaccgcgtctatcttaaacgtttccatcgctttaaagacgtttccgatagatggtctcatttcatcagtcatactgagccaacaaatataatcgtgtataacatctttgatagaatcagactctaaagaaaacgaatcggctttattatacgcattcatgataaacttaatgaaaaatgtttttcgttgtttaagttggatgaatagtatgtcttaataattgttattatttcattaattaatatttagtaacgagtacactctataaaaacgagaatgacataactaatcataactagttatcaaagtgtctaggacgcgtaattttcatatggtatagatcctgtaagcattgtctgtattctggagctattttctctatcgcattagtgagttcagaatatgttataaatttaaatcgaataacgaacataactttagtaaagtcgtctatattaactcttttattttctagccatcgtaataccatgtttaagatagtatattctctagttactacgatctcatcgttgtctagaatatcacatactgaatctacatccaattttagaaattggtctgtgttacatatctcttctatattattgttgatgtattgtcgtagaaaactattacgtagaccattttctttataaaacgaatatatagtactccaattatctttaccgatatatttgcacacataatccattctctcaatcactacatctttaagattttcgttgttaagatatttggctaaactatataattctattagatcatcaacagaatcagtatatatttttctagatccaaagacgaactctttggcgtcctctataatattcccagaaaagatattttcgtgttttagtttatcgagatctgatctgttcatatacgccatgattgtacggtacgttatgataaccgcataaaataaaaatccattttcatttttaaccaatactattcataattgagattgatgtaatactttgttactttgaacgtaaagacagtacacggatccgtatctccaacaagcacgtagtaatcaaatttggtgttgttaaacttcgcaatattcatcaatttagatagaaacttatactcatcatctgttttaggaatccatgtattattaccactttccaacttatcattatcccaggctatgtttcgtccatcatcgttgcgcagagtgaataattcttttgtattcggtagttcaaatatatgatccatgcatagatcggcaaagctattgtagatgtgatttttcctaaatctaatataaaactcgtttactagcaaacactttcctgatttatcgaccaagacacatatggtttctaaatctatcaagtggtggggatccatagttatgacgcagtaacatatattattacattcttgactgtcgctaatatctaaatatttattgttatcgtattggattctgcatatagatggcttgtatgtcaaagatatagaacacataaccaatttatagtcgcgctttacattctcgaatctaaagttaagagatttagaaaacattatatcctcggatgatgttatcactgtttctggagtaggatatattaaagtctttacagatttcgtccgattcaaataaatcactaaataatatcccacattatcatctgttagagtagtatcattaaatctattatattttatgaaagatatatcactgctcacctctatatttcgtacatttttaaactgtttgtataatatctctctgatacaatcagatatatctattgtgtcggtagacgataccgttacatttgaattaatggtgttccattttacaacttttaacaagttgaccaattcatttctaatagtatcaaactctccatgattaaatattttaatagtatccattttatatcactacggacacaaagtagctgacataaaccattgtataatttttatgttttatgtttattagcgtacacattttggaagttccggcttccatgtatttcctggagagcaagtagatgatgaggaaccagatagtttatatccgtacttgcacttaaagtctacattgtcgttgtatgagtatgatcttttaaacccgctagacaagtatccgtttgatattgtaggatgtggacatttaacaatctgacacgtgggtggatcggaccattctcctcctgaacacaggacactagagttaccaatcaacgaatatccactattgcaactataagttacaacgctcccatcggtataaaaatcctcgtatccgttatgtcttccgttggatatagatggaggggattggcatttaacagattcacaaataggtgcctcgggattccataccatagatccagtagatcctaattcacaatacgatttagattcaccgatcaactgatatccgctattacaagagtacgttatactagagccaaagtctactccaccaatatcaagttggccattatcgatatctcgaggcgatgggcatctccgtttaatacattgattaaagagtgtccatccagtacctgtacatttagcatatataggtcccattttttgctttctgtatccaggtagacatagatattctatagtgtctcctatgttgtaattagcattagcatcagtctccacactattcttaaatttcatattaatgggtcgtgacggaatagtacagcatgatagaacgcatcctattcccaacaatgtcaggaacgtcacgctctccaccttcatatttatttatccgtaaaaatgttatcctggacatcgtacaaataataaaaagcccatatatgttcgctattgtagaaattgtttttcacagttgctcaaaaacgatggcagtgacttatgagttacgttacactttggagtctcatctttagtaaacatatcataatattcgatattacgagttgacatatcgaacaaattccaagtatttgattttggataatattcgtattttgcatctgctataattaagatataatcaccgcaagaacacacgaacatctttcctacatggttaaagtacatgtacaattctatccatttgtcttccttaactatatatttgtatagataattacgagtctcgtgagtaattccagtaattacatagatgtcgccgtcgtactctacagcataaactatactatgatgtctaggcatgggagacttttttatccaacgatttttagtgaaacattccacatcgtttaatactacatatttctcatacgtggtataaactccacccattacatatatatcatcgtttacgaataccgacgcgcctgaatatctaggagtaattaagtttggaagtcttatccatttcgaagtgccgtgtttcaaatattctgccacacccgttgaaatagaaaattctaatcctcctattacatataactttccatcgttaacacaagtactaacttctgattttaacgacgacatattagtaaccgttttccattttttcgttttaagatctacccgcgatacggaataaacatgtctattgttaatcatgccgccaataatgtatagacaattatgtaaaacatttgcattatagaattgtctatctgtattaccgactatcgtccaatattctgttctaggagagtaatgggttattgtggatatataatcagagtttttaatgactactatattatgttttataccatttcgtgtcactggctttgtagatttggatatagttaatcccaacaatgatatagcattgcgcatagtattagtcataaacttgggatgtaaaatgttgatgatatctacatcgtttggatttttatgtatccactttaataatatcatagctgtaacatcctcatgatttacgttaacgtcttcgtgggataagatagttgtcagttcatcctttgataattttccaaattctggatcggatgtcaccgcagtaatattgttgattatttctgacatcgacgcattatatagttttttaattccatatcttttagaaaagttaaacatccttatacaatttgtgaaattaatattatgaatcatagtttttacacatagatctactacaggcggaacatcaattattatggcagcaactagtatcatttctacattgtttatggtgatgtttatcttcttccagcgcatatagtctaatagcgattcaaacgcgtgatagtttataccattcaatataatcgcttcatcctttagatggtgatcctgaatgcgtttaaaaaaattatacggagacgccgtaataatttccttattcacttgtataatttccccattgatagaaaatattacgctttccattcttaaagtactataagtaattatagtataatgtaaacgtttatatattcaatatttttataaaaatcattttgacattaattcctttttaaatttccgtctatcatctatagaaacgtattctatgaatttataaaatgcttttacgtgtcctatcgtaggcgatagaaccgctaaaaagcctatcgaatttctacaaaagaatctgttatatggtatagggagagtataaaacattaaatgtccgtacttattaaagtattcagtagccaatcctaactctttcgaatacttattaatggctcttgttctgtacgaatctatttttttgaacaacggacctagtggtatatcttgttctatgtatctaaaataatgtctgactagatccgttagtttaatatccgcagtcatcttgtctagaatggcaaatctaactgcgggtttaggctttagtttagtttctatatctacatctatgtctttatctaacaccaaaaatataatagctaatattttattacaatcatccggatattcttctacgatctcactaactaatgtttctttggttatactagtatagtcactatcggacaaataaagaaaatcagatgatcgatgaataatacatttaaattcatcatctgtaagatttttgagatgtctcattagaatattattagggttagtactcattatcattcggcagctattacttattttattatttttcaccatatagatcaatcattagatcatcaaaatatgtttcaatcatcctaaagagtatggtgaatgactcttcccatctaatttctgaacgttcaccaatgtctctagccactttggcactaatagcgatcattcgcttagcgtcttctatattattaactggttgatttaatctatctagcaatggaccgtcggacagcgtcattctcatgttcttaatcaatgtacatacatcgccgtcatctaccaattcatccaacaacataagctttttaaaatcatcattataataggtttgatcgttgtcatttctccaaagaatatatctaataagtagagtcctcatgcttagttaacaactattttttatgttaaatcaattagtacaccgctatgtttaatacttattcatattttagtttttaggattgagaatcaatacaaaaattaatgcatcattaattttagaaatacttagtttccacgtagtcaatgaaacatttgaactcatcgtacaggacgttctcgtacaggacgtaactataaaccggtttatatttgttcaagatagatacaaatccgataactttttttacgaattctacgggatccactttaaaagtgtcataccgggttctttttatttttttaaacagatcaatggtgtgatgttgattaggtcttttacgaatttgatatagaatagcgtttacatattctccataatggtcaatcgccatttgttcgtatgtcataaattctttaattatatgacactgtgtattatttagttcatccttgttcattgttaggaatctatccaaaatggcaattatactagaactataggtgcgttgtatacacatattgatgtgtctgtttatacaatccatgatatttggatccatgctactaccttcgggtaaaattgtagcatcatataccatttctagtactttaggttcattattatccattgcagaggacgtcatgatcgaatcataaaaaaatatattatttttatgttattttgttaaaaataatcatcgaatacttcgtaagatactccttcatgaacataatcagttacaaaacgtttatatgaagtaaagtatctacgatttttacaaaagtccggatgcataagtacaaagtacgcgataaacggaataataatagatttatctagtctatctttttctatagctttcatagttagatacatggtctcagaagtaggattatgtaacatcagcttcgataaaatgactgggttatttagtcttacacattcgctcatacatgtatgaccgttaactacagagtctacactaaaatgattgaacaatagatagtctaccattgtttcgtattcagatagtacagcgtagtacatggcatcttcacaaattatatcattgtctaatagatatttgacgcatcttatggatcccacttcaacagccatcttaaaatcatattgctttcctttatcattaataatttctagaacatcatctctatcataaaagatacaaatattaactgtttgatccgtaataacattgctagtcaatagcaatttgttaataagatgcgctgggctcaatgtcttaataagaagtgtaagaggactatctccgaatttgttttgtttattaacatccgttgatggaagtaaaagatctataatgtctacattcttgactgttttagagcatacaatatggagaggtgtatttccatcatgatctggttttgagggactaattcctagtttcatcatccatgagattgtagaagcttttggattgtctgacataagatgtctatgaatatgatttttgccaaatttatccactatcctggcttcgaatccgatggacattatttttttaaacactctttctgaaggatctgtacacgccaacaacggaccacatccttcttcatcaaccgagttgttaatcttggctccatactgtaccaataaatttattctctctatgacttcatcatctgttcccgagagataatatagaggtgttttatgctgtttatcacacgcgtttggatctgcgccgtgcgtcagcagcatcgcgactattctattattattaattttagaagctatatgcaatggataatttccatcatcatccgtctcatttggagagtatcctctatgaagaagttcttcgacaaatcgttcatctagtcctttaattccacaatacgcatgtagaatgtgataattatttccagaaggttcgatagcttgtagcatattcctaaatacatctaaatttttactattatatttggcataaagagatagataatactcggccgacataatgttgtccattgtagtataaaaattaatatttctatttctatttctgtatatttgcaacaatttactctctataacaaatatcataacttagtttttttatgtcaagaaggcactggtttagttcatctataaatgtcacgccataactaccacgcatgccatactcagaattatgataaagatatttatccttggggtgtaggtaatggggattaatctttgttggatcagtctctaagttaacacatgtcacacatgatccatttatagttatatcacacgatgatgatttatgaattgattccggaagatcgctatcgtattttgtggttccacaattcatttccatacatgttattgtcacactaatattatgatgaactttatctagccgctgagtggtaaacaacagaacagatagtttattatctttaccaacaccctcagccgctgccacaaatctctgatccgtatccatgatggtcatgtttatttctagtccgtatccagtcaacactatgttagcatttctgtcgatatagctttcactcatatgacactcaccaataatagtagaattaatgtcgtaatttacaccaatagtgagttcggcggcaaagtaccaataccggtaatcttgtcgaggaggacatatagtattcttgtattctaccgaatacccgagagatgcgatacaaaagagcaagactaatttgtaaaccatcttactcaaaatatgtaacaatagtacgatgcaatgagtaagacaataggaaatctatcttatatacacataattattctatcaattttaccaattagttagtgtaatgttaacaaaaatgtgggagaatctaattagtttttctttacacaattgacgtacatgagtctgagttccttgtttttgctaattatttcatccaatttattattcttgacgatatcgagatcttttgtataggagtcaaacttgtattcaacatgcttttctataatcattttagctatttcggcatcatccaatagtacattttccagattagcagaatagatattaatgtcgtatttgaacagagcctgtaacatctcaatgtctttattatctatagccaatttaatgtccggaatgaagagaagggaattattggtgtttgtcgacgtcatatagtcgagcaagagaatcatcatatccacgtgtccattttttatagtgatgtgaatacaactaaggagaatagccagatcaaaagtagatggtatctctgaaagaaagtaggaaacaatacttacatcattaagcatgacggcatgataaaatgaagttttccatccagttttcccatagaacatcagtctccaatttttcttaacaaacagttttaccgtttgcatgttaccactatcaaccgcataatacaatgcggtgtttcccttgtcatcaaattgtgaatcatccagtccactgaatagcaaaatctttactattttggtatcttccaatgtggctgcctgatgtaatggaaattcattctctagaagatttttcaatgctccagcgttcaacaacgtacatactagacgcacgttattatcagctattgcataatacaaggcactatgtccatggacatccgccttaaatgtatctttactagagagaaagcttttcagctgcttagacttccaagtattaattcgtgacagatccatgtctgaaacgagacgctaattagtgtatattttttcattttttataattttgtcatattgcaccagaattaataatatctttaatagatctgattagtagatacatggctatcgcaaaacaacatatacacatttaataaaaataatatttattaagaaaattcagatttcacgtacccatcaatataaataaaataatgattccttacaccgtacccatattaaggagattccaccttacccataaacaatataaatccagtaatatcatgtctgatgatgaacacaaatggtgtattaaattccagtttttcaggagatgatctcgccgtagctaccataatagtagatgcctctgctacagttccttgttcgtcgacatctatctttgcattctgaaacattttataaatatataatgggtccctagtcatatgtttaaacgacgcattatctggattaaacatactaggagccatcatttcggctatcgacttaatatccctcttattttcgatagaaaatttagggagtttaagattgtacactttattccctaattgagacgaccaatagtctaattttgcagccgtgatagaatctgtgaaatgggtcatattatcacctattgccaggtacatactaatattagcatccttatacggaaggcgtaccatgtcatattctttgtcatcgattgtgattgtatttccttgcaatttagtaactacgttcatcatgggaaccgttttcgtaccgtacttattagtaaaactagcattgcgtgttttagtgatatcaaacggatattgccatatacctttaaaatatatagtattaatgattgcccatagagtattattgtcgagcatattagaatctactacattagacataccggatctacgttctactatagaattaattttattaaccgcatctcgtctaaagtttaatctatataggccgaatctatgatattgttgataatacgacggtttaatgcacacagtattatctacgaaactttgataagttagatcagtgtacgtatatttagatgttttcagcttagctaatcctgatattaattctgtaaatgctggacccagatctctttttctcaaatccatagtcttcaataattctattctagtattacctgatgcaggcaatagcgacataaacatagaaaacgaataaccaaacggtgagaagacaatattatcatcttgaatatttttatacgctactataccggcattggtaaatccttgtagacgataggcggacgctgaacacgctaacgatagtatcaataacgcaatcatgattttatggtattaataattaaccttatttttatgttcggtataaaaaaattattgatgtctacacatccttttgtaattgacatctatatatccttttgtataatcaactctaatcactttaacttttacagttttccctaccagtttatccctatattcaacatatctatccatatgcatcttaacactctctgccaagatagcttcagagtgaggatagtcaaaaagataaatatatagagcataatcattctcgtatactctgccctttattacatcacccgcattgggcaacgaataacaaaatgcaagcatcttgttaacgggctcgtaaattgggataaaaattatgtttttattgtcttatatctattttattcaagagaatattcaggaatttctttttccggttgtatctcgtcgcagtatatatcatttgtacattgtttcatattttttaatagtttacaccttttagtaggactagtatcgtacaattcatagctgtattttgaattccaatcacgcataaaaatatcttccaattgttgacgaagacctaatccatcatccggtgtaatattaatagatgctccacatgtatccgtaaagtaatttcctgtccaatttgaggtacctatataggccgttttatcggttaccatatatttggcatggtttaccctagaatacggaatgggaggatcagcatctggtacaataaatagctttacttctatatttatgtttttagattttagcatagcgatagatcttaaaaagtttctcatgataaacgaagatcgttgccagcaactaatcaatagcttaacggatacttgtctgtctatagcggatcttcttaattcatcttctatataaggccaaaacaaaattttacccgccttcgaataaataatagggataaagttcataacagatacataaacgaatttactcgcatttctaatacatgacaataaagcggttaaatcattggttctttccatagtacatagttgttgcggtgcagaagcaataaatacagagtgtggaacgccgcttacgttaatactaagaggatgatctgtattataatacgacggataaaagtttttccaattatatggtagattgttaactccaagataccagtatacctcaaaaatttgagtgagatccgctgccaagttcctattattgaagatcgcaatacccaattccttgacctgagttagtgatctccaatccatgttagcgcttcctaaataaatatgtgtattatcagatatccaaaattttgtatgaagaactcctcctaggatatttgtaatatctatgtatcgtacttcaactccggccatttgtagtctttcaacatcctttaatggtttgttagatttattaacggctactctaactcgtactcctcttttgggtaattgtacaatctcgtttaatattatcgtgccgaaattcgtacccacttcatccgataaactccaataaaaagatgatatatctagtgtttttgtggtattggatagaatttccctccacatgttaaatgtagacaaatatactttatcaaattgcatacctataggaatagtttctgtaatcactgcgattgtattatccggattcattttatttgttaaaagaataatcctatatcacttcactctattaaaaatccaagtttctatttctttcatgactgattttttaacttcatccgtttccttatgaagatgatgtttggcaccttcataaatttttatttctctattacaatttgcatgttgcatgaaataatatgcacctaaaacatcgctaatcttattgtttgttccctggagtatgagagtcggggggtgttaatcttggaaattatttttctaaccttgttggtagccttcaagacctgactagcaaatccagccttaattttttcatgattgactaatgggtcgtattggtatttataaactttatccatatctctagatactgattctggacatagctttccgactggcgcatttggtgtgatggttcccataagtttggcagctagcagattcagtcttgaaacagcatctgcattaactagaggagacattagaatcattgctgtaaacaagtttggattatcgtaagaggctagctcccatggaatgacccaataagtagatttaatagttaccacgtgctgtaccaaagtcatcaatcatcattttttcaccattacttcttccatgtccaatatgatcatgtgagaatactaaaattcctaacgatgatatgttttcagctagttcgtcataacgtccagaatgtttaccagctccatgacttatgaatactaatgccttaggatatgtaataggtttccaatatttacaatatatgtaatcattgtccagattgaacatacagtttgcactcatgattcacgttatataactatcaatattaacagttcgtttgatgatcatattatttttatgttttattgataattgtaaaaacatacaattaaatcaatatagaggaaggagacggctactgtcttttgtaagatagtcatggcgactaaattagattatgaggatgctgttttttactttgtggatgatgataaaatatgtagtcgcgactccatcatcgatctaatagatgaatatattacgtggagaaatcatgttatagtgtttaacaaagatattaccagttgtggaagactgtacaaggaattgatgaagttcgatgatgtcgctatacggtactatggtattgataaaattaatgagattgtcgaagctatgagcgaaggagaccactacatcaattttacaaaagtccatgatcaggaaagtttattcgctaccataggaatatgtgctaaaatcactgaacattggggatacaaaaagatttcagaatctagattccaatcattgggaaacattacagatttgatgaccgacgataatataaacatcttgatactttttctagaaaaaaaattgaattgatgatataggggtcttcataacgcataattattacgttagcattctatatccgtgttaaaaaaaattatcctatcatgtatttgagagttttatatgtagcaaacatgatagctgtgatgccaataagctttagatattcacgcgtgctagtgttagggatggtattatctggtggtgaaatgtccgttatataatctacaaaacaatcatcgcatatagtatgcgatagtagagtaaacatttttatagtttttactggattcatacatcgtctacccaattcggttataaatgaaattgtcgccaatcttacacccaaccccttgttatccattagcatagtattaacttcgttatttatgtcataaactgtaaatgattttgtagatgccatatcatacatgatattcatgtccctattataatcattactaactttatcacaatatatgttgataatatctatatatgatctagtctttgtgggcaactgtctatacaagtcgtctaaacgttgtttactcatatagtatcgaacagccatcattacatggtcccgttccgttgatagataatcgagtatgttagtggacttgtcaaatctatataccatattttctggaagtggatatacatagtcgtgatcaacattattgctagcctcatcttctatatcctgtactataccattatctatatcatctacataatctatgatattattacacataaacatcgacaacatactattgtttattatctaagtcctgttgatccaaacccttgatctcctctatttgtactatctagagattgtacttcttccagttctggataatatatacgttgatagattagctgagctattctatctccagtatttacattaaacgtacattttccattattaataagaatgactcctatgtttcccctataatcttcgtctattacaccacctcctatatcaatgccttttagtgacagaccagacctaggagctattctaccatagcagaacttaggcatggacatactaatatctgtcttaattaactgtctttctcctggagggatagtataatcgtaagcgctatacaaatcatatccggcagcacccggcgattgcctagtaggagatttagctctgttagtttccttaacaaatctaactggtgagttaatattcatgttgaacataaaactaatattttatttcaaaattatttaccatcccatatattccatgaataagtgtgatgattgtacacttctatagtatctatatacgatccacgataaaatcctcctatcaatagcagtttattatccactatgatcaattctggattatccctcggataaataggatcatctatcagagtccatgtattgctggattcacaataaaattccgcatttctaccaaccaagaataaccttctaccgaacactaacgcgcatgatttataatgaggataataagtggatggtccaaactgccactgatcatgattgggtagcaaatattctgtagttgtatcagtttcagaatgtcctcccattacgtatataacattgtttatggatgccactgctggattacatctaggtttcagaagactcggcatattaacccaagcagcatccccgtggaaccaacgctcaacagatgtgggatttggtagacctcctactacgtataatttattgttagcgggtatcccgctagcatacagtctggggctattcatcggaggaattggaatccaattgtttgatatataatttacagctatagcattgttatgtatttcattgttcatccatccaccgatgagatatactacttctccaacatgagtacttgtacacatatggaatatatctataatttgatccatgttcataggatactctatgaatggatacttgtatgatttgcgtggttgtttatcacaatgaaatattttggtacagtctagtatccattttacattatttatacctctgggagaaagataatttgacctgattacatttttgataaggagtagcagatttcctaatttatttcttcgcctcatataccacttaatgacaaaatcaactacataatcctcatctggaacatttagttcatcgctttctagaataagtttcatagatagataatcaaaattgtctatgatgtcatcttccagttccaaaaagtgtttggcaataaagtttttagtatgacataagagattggatagtccgtattctatacccatcatgtaacactcgacacaatattcctttctaaaatctcgtaagataaagtttatacaagtgtagatgataaattctacagaggttaatatagaagcacgtaataaattgacgacgttatgactatctatatatacctttccagtatatgagtaaataactatagaagttaaactgtgaatgtcaaggtctagacaaacccttgtaactggatctttatttttcgtgtatttttgacgtaaatgtgtgcgaaagtaaggagataactttttcaatatcgtagaattgactattatattgcctcctatggcatcaataattgttttgaatttcttagtcatagacaatgctaatatattcttacagtacacagtattgacaaatatcggcatttatgtttctttaaaagtcaacatctagagaaaaatgattatctttttgagacataactcccattttttggtattcacccacacgtttttcgaaaaaattagtttttccttccaatgatatattttccatgaaatcaaacggattggtaacattataaatttttttaaatcccaattcagaaatcaatctatccgcgacgaattctatatatgttttcatcatttcacaattcattcctataagtttaactggaagagccgcagtaagaaattcttgttcaatggatactgcatctgttataatagatctaacggtttcttcactcggtggatgcaataaatgtttaaacatcaaacatgcgaaatcgcagtgcagaccctcgtctctactaattagttcgttggaaaacgtgagtccgggcattaggccacgctttttaagccaaaatatggaagcgaatgatccagaaaagaaaattccttctactgcagcaaaggcaataagtctctctccataaccggcgctgtcatgtatccacttttgagcccaatcggccttcttttttacacaaggcatcgtttctatggcattaaagagatagtttttttcattactatctttaacataagtatcgatcaaaagactatacatttccgaatgaatgttttcaatggccatctgaaatccgtagaaacatctagcctcggtaatctgtacttctgtacaaaatcgttccgccaaattttcattcactattccgtcactggctgcaaaaaacgccaatacatgttttataaaatatttttcgtctggtgttagtttattccaatcattgatatctttagatatatctacttcttccactgtccaaaatgatgcctctgcctttttatacatgttccagatgtcatgatattggattgggaaaataacaaatctatttggatttggtgcaaggatgggttccataactaaattaacaataacaataaattttttttcagttatctatatgcctgtacttggattttttgtacatcgatatcgccgcaatcactacaataattacaagtattattgatagcattgttattagtactatcataattaaattatctacattcatgggtgctgaataatcgttattatcatcattatcattttgtaattgtgacatcatactagataaatcgtttgcgagattgttgtgggaagcgggcatggaggatgcattatcattattatttaacgccttccatttggattcacaaatgttacgcacattcaacattttatggaaactataattttgtgaaaacaaataacaagaaaactcgtcatcgttcaaatttttaacgatagtaaaccgattaaacgtcgagctaatttctaacgctagcgactctgttggatatgggtttccagatatatatcttttcagttcccctacgtatctataatcatctgtaggaaatggaagatatttccatttatctactgttcctaatatcatatgtggtggtgtagtagaaccattaagcgcgaaagatgttatttcgcatcgtattttaacttcgcaataatttctggttagataacgcactctaccagtcaagtcaatgatattagcctttacagatatattcatagtagtcgtaacgatgactccatcttttagatgcgatactcctttgtatgtaccagaatcttcgtacctcaaactcgatatatttaaacaagttaatgagatattaacgcgttttatgaatgatgatatataaccagaagttttatcctcggtggctagcgctataaccttatcattataataccaactagtgtgattaatatgtgacacgtcagtgtgggtacaaatatgtacattatcgtctacgtcgtattcgatacatccgcatacagccaacaaatataaaatgacaaatactctaacgccgttcgtacccatcttgatgcggtttaataaatgttttgatttcaatttattgtaaaaaaagattcggttttatactgttcgatattctcattgcttatattttcatctatcatctccacacagtcaaatccgtggttagcatgcacctcatcaaccggtaaaagactatcggactcttctatcattataactctagaatatttaatttggtcattattaatcaagtcaattatcttatttttaacaaacgtgagtattttactcattttttataaaaacttttagaaatatacagactctatcgtgtgtctatatcttctttttatatccaatgtatttatgtctgatttttcttcatttatcatatataatggtccaaattctacacgtgcttcggattcatccagatcattaaggttcttataattgtaacatccttctcttccctcttctacatcttccttcttattcttattcttagcgtcacagaatctaccacagcaggatcccatgacgagcgtcatattaaactaatccattttcaattataatatatgattagtaatgaccattaaaataaaaaatattcttcataaccggcaagaaagtgaaaagttcacattgaaactatgtcagtagtatacatcatgaaatgatgatatatatatactctattttggtggaggattatatgatataattcgtggataatcatttttaagacacatttctttattcgtaaatcttttcacgttaaatgagtgtccatattttgcaatttcttcatatgatggcggtgtacgtggacgaggctgctcctgttcttgttgtggtcgccgactgtcgtgtctgcgtttagatccctccattatcgcgattgcgtagatggagtactattttataccttgtaattaaatttttttattaattaaacgtataaaaacgttccgtatctgtatttaagagccagatttcgtctaatagaacaaatagctacagtaaaaataactagaataattgctacacccactagaaaccacggatcgtaatacggcaatcggttttcgataataggtggaacgtatattttatttaaggacttaacaattgtctgtaaaccacaatttgcttccgcggatcctgtattaactatctgtaaaagcatatgttgaccgggcggagccgaacattctccgatatctaatttctgtatatctataatattattaacctccgcatacgcattacagttcttttctagcttggataccgcactaggtacatcgtctagatctattcctatttcctcagcgatagctcttctatccttttccggaagcaatgaaatcacttcaataaatgattcaaccatgagtgtgaaactaagtcgagaattactcatgcatttgttagttattcggagcgcgcaatttttaaactgtcctataacctctcctatatgaatagcacaagtgacattagtagggatagaatgttgagctaatttttgtaaataactatctataaaaagattatacaaagttttaaactctttagtttccgccatttatccagtctgagaaaatgtctctcataataaatttttccaagaaactaattgggtgaagaatggaaacctttaatctatatttatcacagtctgttttggtacacatgatgaattcttccaatgccgtactaaattcgatatctttttcgatttctggatatgtttttaataaagtatgaacaaagaaatggaaatcgtaataccagttatgtttaactttgaaattgttttttattttcttgttaatgattccagccacttgggaaaagtcaaagtcgtttaatgccgatttaatacgttcattaaaaacaaactttttatcctttagatgaattattattggttcattggaatcaaaaagtaagatattatcgggtttaagatctgcgtgtaaaaagttgtcgcaacagggtagttcgtagattttaatgtataacagagccatctgtaaaaagataaactttatgtattgtaccaaagatttaaatcctaatttgatagctaactcggtatctactttatctgccgaatacagtgctaggggaaaaattataatgtttcctctttcatattcgtagttagttctcttttcatgttcgaaaaagtgaaacatgcggttaaaatagtttataacattaatattactgttaataactgccggataaaagtgggatagtaatttcacgaatttgatactgtcctttctctcgttaaacgcctttaaaaaaactttagaagaatatctcaatgagagttcctgaccatccatagtttgtatcaataatagcaacatatgaagaacacgtttatacagagtatgtaaaaatgttaatttatagtttaatcccatggcccacgcacacacgattaattttttttcatctccctttagattgttgtatagaaatttgggtactgtgaactccgccgtagtttccatgggactatataattttgtggcctcgaatacaaattttactacatagttatctatcttaaagactataccatatcctcctgtagatatgtgataaaaatcgtcgtttataggataaaatcgtttatccttttgttggaaaaaggatgaattaatgtaatcattctcttctatctttagtagtgtttccttattaaaattcttaaaataatttaacaatctaactgacggagcccaattttggtgtaaatctaattgggacattatattgttaaaatacaaacagtctcctaatataacagtatctgataatctatggggagacatccattgatattcaggggatgaatcattggcaacacccatttattgtacaaaaagccccaatttacaaacgaaagtccaggtttgatagagacaaacaattaactattttgtctctgtttttaacacctccacagtttttaatttctttagtaatgaaattattcacaatatcagtatcttctttatctaccagagattttactaacttgataaccttggctgtctcattcaatagggtagtaatatttgtatgtgtgatattgatatctttttgaattgtttcttttagaagtgattctttgatggtgccagcatacgaattacaataatgcagaaactcggttaacatgcaggaattatagtaagccaattccaattgttgcctgtgttgtattagagtgtcaatatgagcaatggtgtccttgcgtttctctgatagaatgcgagcagcgattttggcgttatcatttgacgatatttctggaatgacgaatcctgtttctactaactttttggtaggacaaagtgaaacaatcaagaagatagcttctcctcctatttgtggaagaaattgaactcctctagatgatctactgacgatagtatctccttgacagatattggaccgaattacagaagtacctggaatgtaaagccctgaaaccccctcattttttaagcagattgttgccgtaaatcctgcactatgcccaagatagagagctcctttggtgaatccatctctatgtttcagtttaaccaagaaacagtcagctggtctaaaatttccatctctatctaatacagcatctaacttgatgtcaggaactatgaccggtttaatgttatatgtaacattgagtaaatccttaagttcataatcatcactgtcatcagttatgtacgatccaaacaatgtttctaccggcatagtggatacgaagatgctatccatcagaatgtttccctgattagtattttctatatagctattcttctttaaacgattttccaaatcagtaactatgttcatttttttaggagtaggacgcctagccagtatggaagaggattttctagatcctctcttcaacatctttgatctcgatggaatgcaaaaccccatagtgaaacaaccaacgataaaaataatattgtttttcactttttataattttaccatctgactcatggattcattaatatctttataagagctactaacgtataattctttataactgaactgagatatatacaccggatctatggtttccataattgagtaaatgaatgctcggcaataactaatggcaaatgtatagaacaacgaaattatactagagttgttaaagttaatattttctatgagctgttccaataaattatttgttgtgactgcgttcaagtcataaatcatcttgatactatccagtaaaccgtttttaagttctggaatattatcatcccattgtaaagcccctaattcgactatcgaatatcctgctctgatagcagtttcaatatcgacggacgtcaatactgtaataaaggtggtagtattgtcatcatcgtgataaactacgggaatatggtcgttagtaggtacggtaactttacacaacgcgatatataactttccttttgtaccatttttaacgtagttgggacgtcctgcagggtattgttttgaagaaatgatatcgagaacagatttgatacgatatttgttggattcctgattattcactataatataatctagacagatagatgattcgataaatagagaaggtatatcgttggtaggataatacatccccattccagtattctcggatactctattgatgacactagttaagaacatgtcttctattctagaaaacgaaaacatcctacatggactcattaaaacttctaacgctcctgattgtgtctcgaatgcctcgtacaaggatttcaaggatgccatagattctttgaccaacgatttagaattgcgtttagcatctgatttttttattaaatcgaatggtcggctctctggtttgctaccccaatgataacaatagtcttgtaaagataaaccgcaagaaaatttatacgcatccatccaaataaccctagcaccatcggatgatattaatgtattattatagattttccatccacaattattgggccagtatactgttagcaacggtatatcgaatagattactcatgtaacctactagaatgatagttcgtgtactagtcataatatctttaatccaatctaaaaaatttaaaattagattttttacactgttaaagttaacaaaagtattacccgggtacgtggatatcatatatggcattggtccattatcagtaatagctccataaactgatacggcgatggtttttatatgtgtttgatctaacgaggaagaaattcgcgcccacaattcatctctagatatgtatttaatatcaaacggtaacacatcaatttcgggacgcgtatatgtttctaaatttttaatccaaatataatgatgacctatatgccctattatcatactgtcaactatagtacacctagggaacttacgatacatctgtttcctataatcgttaaattttacaaatctataacatgctaaaccttttgacgacagccattcattaatttctgatatggaatctgtattctcgataccgtatcgttctaaagccagtgctatatctccctgttcgtgggaacgctttcgtataatatcgatcaacggataatctgaagtttttggagaataatatgactcatgatctatttcgtccataaacaatctagacataggaattggaggcgatgatcttaattttgtgcaatgagtcgtcaatcctataacttctaatcttgtaatattcatcatcgacataatactatctatgttatcatcgtatattagtataccatgaccttcttcatttcgtgccaaaatgatatacagtcttaaatagttacgcaatatctcaatagtttcataattgttagctgttttcatcaaggtttgtatcctgtttaacatgatggcgttctataacgtctctattttctatttttaattttttaaatttttaacgatttactgtggctagatacccaatctctctcaaatatttttttagcctcgcttacaagctgtttatctatactattaaaactgacgaatccgtgattttggtaatgggttccgtcgaaatttgccgaagtgatatgaacatattcgtcgtcgactatcaacaattttgtattattctgaatagtgaaaaccttcacagatagatcattttgaacacacaacgcatctagacttttggcggttgccatagaatatacgtcgttcttatcccaattaccaactagaagtctgatcttaactcctctattaatggctgcttctataatggagttgtaaatgtcgggccaatagtagctattaccgtcgacacgtgtagtgggaactatggccaaatgttcaatatctatactagtcttagctgacctgagtttatcaataactacatcggtatctagatctctagaatatcccaataggtgttccggagaatcagtaaagaacactccacctataggattcttaatatgatacgcagtgctaactggcaaacaacaagccgcagagcataaattcaaccatgaattttttgcgctattaaaggctttaaaagtatcaaatcttctacgaagatctgtggccagcgggggataatcagaatatacacctaacgttttaatcgtatgtatagatcctccagtaaatgacgcgtttcctacataacatctttcatcatctgacacccaaaaacaaccgagtagtagtcccacattattttttttatctatattaacggttataaaatttatatccgggcagtgactttgtagctctcccagatttcttttccctcgttcatctagcaaaactattattttaatccctttttcagatgcctcttttagtttatcaaaaataagcgctcccctagtcgtactcagaggattacaacaaaaagatgctatgtatatatatttcttagctagagtgataatttcgttaaaacattcaaatgttgttaaatgatcggatctaaaatccatattttctggtagtgtttctaccagcctacattttgctcccgcaggtaccgatgcaaatggccacatttagttaacataaaaacttatacatcctgttctatcaacgattctagaatatcatcggctatatcgctaaaattttcatcaaagtcgacatcacaacctaactcagtcaatatattaagaagttccatgatgtcatcttcgtctatttctatatccgtatccattgtagattgttgaccgattatcgagtttaaatcattactaatactcaatccttcagaatacaatctgtgtttcattgtaaatttataggcggtgtatttaagttggtagattttcaattatgtattaatatagcaacagtagttcttgctcctccttgattctagcatcctcttcattattttcttctacgtacataaacatgtccaatacgttagacaacacaccgacgatggcggccgcagatctcgagttatgatctacttccttaccgtgcaataaattagaatatattttctacttttacgagaaattaattattgtatttattatttatgggtgaaaaacttactataaaaagcgggtgggtttggaattagtgaaagcttaaaaattgaaattttattttttttttttggaatataaataagctcgaagtcgacagatctaggcctggtaccaggaggaggaattcagcttaaagatgacttcgaaagtttatgatccagaacaaaggaaacggatgataactggtccgcagtggtgggccagatgtaaacaaatgaatgttcttgattcatttattaattattatgattcagaaaaacatgcagaaaatgctgttatttttttacatggtaacgcggcctcttcttatttatggcgacatgttgtgccacatattgagccagtagcgcggtgtattataccagatcttattggtatgggcaaatcaggcaaatctggtaatggttcttataggttacttgatcattacaaatatcttactgcatggtttgaacttcttaatttaccaaagaagatcatttttgtcggccatgattggggtgcttgtttggcatttcattatagctatgagcatcaagataagatcaaagcaatagttcacgctgaaagtgtagtagatgtgattgaatcatgggatgaatggcctgatattgaagaagatattgcgttgatcaaatctgaagaaggagaaaaaatggttttggagaataacttcttcgtggaaaccatgttgccatcaaaaatcatgagaaagttagaaccagaagaatttgcagcatatcttgaaccattcaaagagaaaggtgaagttcgtcgtccaacattatcatggcctcgtgaaatcccgttagtaaaaggtggtaaacctgacgttgtacaaattgttaggaattataatgcttatctacgtgcaagtgatgatttaccaaaaatgtttattgaatcggatccaggattcttttccaatgctattgttgaaggcgccaagaagtttcctaatactgaatttgtcaaagtaaaaggtcttcatttttcgcaagaagatgcacctgatgaaatgggaaaatatatcaaatcgttcgttgagcgagttctcaaaaatgaacaagcggccgccgccaccatgagcaagggcgaggaactgttcactggcgtggtcccaattctcgtggaactggatggcgatgtgaatgggcacaaattttctgtcagcggagagggtgaaggtgatgccacatacggaaagctcaccctgaaattcatctgcaccactggaaagctccctgtgccatggccaacactggtcactaccttcacctatggcgtgcagtgcttttccagatacccagaccatatgaagcagcatgactttttcaagagcgccatgcccgagggctatgtgcaggagagaaccatctttttcaaagatgacgggaactacaagacccgcgctgaagtcaagttcgaaggtgacaccctggtgaatagaatcgagctgaagggcattgactttaaggaggatggaaacattctcggccacaagctggaatacaactataactcccacaatgtgtacatcatggccgacaagcaaaagaatggcatcaaggtcaacttcaagatcagacacaacattgaggatggatccgtgcagctggccgaccattatcaacagaacactccaatcggcgacggccctgtgctcctcccagacaaccattacctgtccacccagtctgccctgtctaaagatcccaacgaaaagagagaccacatggtcctgctggagtttgtgaccgctgctgggatcacacatggcatggacgagctgtacaagtgagcggccgccctgctagcaagcttgctagcggccgctcgagatctgcggccgctacagacacgaatatgactaaaccgatgaccatttaaaaacccctctctagctttcacttaaactgtatcgatcattcttttagcacatgtataatataaaaacattattctatttcgaatttaggcttccaaaaatttttcatccgtaaaccgataataatatatatagacttgttaatagtcggaataaatagattaatgcttaaactatcatcatctccacgattagagatacaatatttacattctttttgctgtttcgaaactttatcaatacacgttaatacaaacccaggaaggagatattgaaactgaggctgttgaaaatgaaacggtgaatacaataattcagataatgtaaaatcatgattccgtattctgatgatattagaactgctaatggatgtcgatggtatgtatctaggagtatctattttaacaaagcatcgatttgctaatatacaattatccttttgattaattgttattttattcatattcttaaaaggtttcatatttatcaattcttctacattaaaaatttccatttttaatttatgtagccccgcaatactcctcattacgtttcattttttgtctataatatccattttgttcatctcggtacatagattatccaattgagaagcgcatttagtagttttgtacattttaagtttattgacgaatcgtcgaaaactagttatagttaacattttattatttgataccctgatattaatacccctgccgttactattatttataactgatgtaatccacgtaacattggaattaactatcgatagtaatgcatcgacgcttccaaaattgtctattataaactcaccgataatttttttattgcatgttttcatattcattaggattatcaaatctttaatcttattacgattgtatgcgttgatattacaagacgtcattctaaaagacggaggatctccatcaaatgccagacaatcacgtacaaagtacatggaaataggttttgttctattgcgcatcatagatttatatagaacacccgtagaaatactaatttgttttactctataaaatactaatgcatctatttcatcgttttgtataacgtctttccaagtgtcaaattccaaatttttttcattgatagtaccaaattcttctatctctttaactacttgcatagataggtaattacagtgatgcctacatgccgttttttgaaactgaatagatgcgtctagaagcgatgctacgctagtcacaatcaccactttcatatttagaatatatatatgtaaaaatatagtagaatttcattttgtttttttctatgctataaatgaattctcattttgcatctgctcatactccgttttatattaataccaaagaaggaagatatctggttctaaaagccgttaaagtatgcgatgttagaactgtagaatgcgaaggaagtaaagcttcctgcgtactcaaagtagataaaccctcatcgcccgcgtgtgagagaagaccttcgtccccgtccagatgcgagagaatgaataaccctggaaaacaagttccgtttatgaggacggacatgctacaaaatatgttcgcggctaatcgcgataatgtagcttctagacttttgtcctaaaatactattatatccttttcgatattaataaatccgtgtcgtccaggttttttatctctttcagtatgtgaatagataggtattttatctctattcatcatcgaatttaagagatccgataaacattgtttgtattctccagatgtcagcatctgatacaacaatatatgtgcacataaacctctggcacttatttcatgtaccttccccttatcactaaggagaatagtatttgagaaatatgtatacatgatattatcatgaattagatatacagaatttgtaacactctcgaaatcacacgatgtgtcggcgttaagatctaatatatcactcgataacacattttcatctagatacactagacattttttaaagctaaaatagtctttagtagtaacagtaactatgcgattattttcatcgatgatacatttcatcggcatattattacgcttaccatcaaagactataccatgtgtatatctaacgtattctagcatggttgccatacgcgcattaaacttttcaggatctttggatagatcttccaatctatctatttgagaaaacatttttatcatgttcaatagttgaaacgtcggatccactatatagatattatctataaagattttaggaactacgttcatggtatcctggcgaatattaaaactatcaatgatatgattatcgttttcatcttttatcaccatatagtttctaagatatgggattttacttaatataatattatttcccgtgataaattttattagaaaggccaaatctataagaaaagtcctagaattagtctgaagaatatctatatcgccgtatagtatatttggattaattagatatagagaatatgatccgtaacatatacaacttttattatggcgtctaagatattcttccatcaacttattaacatttttgactagggaagatacattatgacgtcccattacttttgccttgtctattactgcgacgttcatagaatttagcatatctcttgccaattcttccattgatgttacattataagaaattttagatgaaattacatttggagctttaatagtaagaactcctaatatgtccgtgtatgtggtcactaatacagattgtagttctataatcgtaaataatttacctatattatatgtttgagtctgtttagaaaagtagctaagtatacgatcttttatttctgatgcagatgtattaacatcggaaaaaaatctttttttattcttttttactaaagatacaaatatgtctttgttaaaaacagttattttctgaatatttctagcttgtaattttaacatatgatattcgttcacactaggtactctgcctaaataggtttctataatctttaatgtaatattaggaaaagtattctgatcaggattcctattcattttgaggatttaaaactctgattattgtctaatatggtctctacgcaaactttttcacagagcgatagagtttttgataactcgtttttcttaagaaatataaaactactgtctccagagctcgctctatcttttattttatctaattcgatacaaactcctgatactggttcagaaagtaattcattaattttcagtcctttatagaagatatttaatatagataatacaaaatcttcagtttttgatatcgatctgattgatcctagaactagatatattaataacgtgctcattaggcagtttatggcagcttgataattagatatagtatattccagttcatatttattagataccgcattgcccagattttgatattctatgaattcctctgaaaataaatccaaaataactagacattctattttttgtggattagtgtactctcttccctctatcatgttcactactggtgtccacgatgataaatatctagagggaatataatatagtccataggatgccaatctagcaatgtcgaataactgtaattttattcttcgctcttcattatgaattgattcttgaggtataaacctaacacaaattatattattagacttttcgtatgtaatgtctttcatgttataagtttttaatcctggaatagaatctattttaatgaggcttttaaacgcagagttctccaacgagtcaaagcataatactctgttgtttttcttatatacgatgttacgattttcttctttgaatggaataggtttttgaattagtttataattacaacataatagataaggaagtgtgcaaatagtacgcggaaaaaacataatagctcccctgttttcatccatggttttaagtaaatgatcactggcttctttagtcaatggatattcgaacattaaccgtttcatcatcattggacagaatccatatttcttaatgtaaagagtgatcaaatcattgtgtttattgtaccatcttgttgtaaatgtgtattcggttatcggatctgctcctttttctattaaagtatcgatgtcaatctcgtctaagaattcaactatatcgacatatttcatttgtatacacataaccattactaacgtagaatgtataggaagagatgtaacgggaacagggtttgttgattcgcaaactattctaatacataattcttctgttaatacgtcttgcacgtaatctattatagatgccaagatatctatataattattttgtaagatgatgttaactatgtgatctatataagtagtgtaataattcatgtattttgatatatgttccaactctgtctttgtgatgtctagtttcgtaatatctatagcatcctcaaaaaatatattcgcatatattcccaagtcttcagttctatcttctaaaaaatcttcaacgtatggaatataataatctattttacctcttctgatatcattaatgatatagtttttgacactatcttctgtcaattgattcttattcactatatctaagaaacggatagcgtccctaggacgaactactgccattaatatctctattatagcttctggacataattcatctattataccagaattaatgggaactattccgtatctatctaacatagttttaagaaagtcagaatctaagacttgatgttcatatattggttcatacatgaaatgatctctattgatgatagtgactatttcattctctgaaaattggtaactcattctatatatgctttccttgttgatgaaggatagaatatactcaatagaatttgtaccaacaaactgttctcttatgaatcgtatatcatcatctgaaataatcatgtaaggcatacatttaacaattagagacttgtctcctgttatcaatatactattcttgtgataatttatgtgtgaggcaaatttgtccacgttctttaattttgttatagtagatatcaaatccaatggagctacagttcttggcttaaacagatatagtttttctggaacaaattctacaacattattataaaggactttgggtagataagtgggatgaaatcctattttaattaatgcgatagccttgtcctcgtgcagatatccaaacgcttttgtgatagtatggcattcattgtctagaaacgctctacgaatatctgtgacagatatcatctttagagaatatactagtcgcgttaatagtactacaatttgtattttttaatctatctcaataaaaaaattaatatgtatgattcaatgtataactaaactactaactgttattgataactagaatcagaatctaatgatgacgtaaccaagaagtttatctactgccaatttagctgcattatttttagcatctcgtttagattttccatcggccttatcgaatactcttccgtcgatgtctacacaggcataaaatgtaggagagttactaggcccaactgattcaatacgaaaagaccaatctctcctagtaatttggcagtactcattaataacggtgacagggttagcatctttccaatcaataatttttttagccggaataacatcatcaaaagacttatgatcctctctcattgatttttcgcgggatacatcatctattatgacgtcagccatagcatcagcatccggcttatccgcctccgttgtcataaaccaacgaggaggaatatcgtcggagctgtacaccatagcactacgttgaagatcgtacagagctttattaacttctcgcttctccatattaagttgtctagttagttgtgcagcagtagctccttcgattccaatgtttttaatagccgcacacacaatctctgcgtcagaacgctcgtcaatatagatcttagacatttttagagagaactaacgcaaccagcaataaaactgaacctactttatcatttttttattcatcatcctctggtggttcgtcgttcctatcaaatgtagctctgattaacccgtcatctataggtgatgctggttctggagattctggaggagatggattattatctggaagaatctctgttatttccttgttttcatgtatcgattgcgttgtaacattaagattgcgaaatgctctaaatttgggaggcttaaagtgttgtttgcaatctctacacgcgtgtctaactagtggaggttcgtcagctgctctagtttgaatcatcatcggcgtagtattcctacttttacagttaggacacggtgtattgtatttctcgtcgagaacgttaaaataatcgttgtaactcacatcctttattttatctatattgtattctactcctttcttaatgcattttataccgaataagagatagcgaaggaattctttttcggtgccgctagtacccttaatcatatcacatagtgttttatattccaaatttgtggcaatagacggtttatttctatacgatagtttgtttctggaatcctttgagtattctataccaatattattctttgattcgaatttagtttcttcgatattagattttgtattacctatattcttgatgtagtactttgatgatttttccatggcccattctattaagtcttccaagttggcatcatccacatattgtgatagtaattctcggatatcagtagcggctaccgccattgatgtttgttcattggatgagtaactactaatgtatacattttccatttataacacttatgtattaactttgttcatttatattttttcattattatgttgatattaacaaaagtgaatatatatatgttaataattgtattgtggttatacggctacaattttataatgagtgaaagtcagtgtccgatgatcaatgacgatagctttactctgaaaagaaagtatcaaatcgatagtgcggagtcaacaataaaaatggataagaagaggataaagtttcagaatagagccaaaatggtaaaagaaataaatcagacaataagagcagcacaaactcattacgagacattgaaactaggatacataaaatttaagagaatgattatgactactactctagaagatatagcaccatctattccaaataatcagaaaacttataaactattctcggacatttcagccatcggcaaagcatcacagaatccgagtaagatggtatatgctctgctgctttacatgtttcccaatttgtttggagatgatcatagattcattcgttatagaatgcatccaatgagtaaaatcaaacacaagatcttctctcctttcaaacttaatcttattagaatattagtggaagaaagattctataataatgaatgcagatctaataaatggagaataattggaacacaagttgataaaatgttgatagctgaatctgataaatatacaatagatgcaaggtataacctaaaacccatgtatagaatcaagggagaatctgaagaagataccctctttatcaaacagatggtagaacaatgtgtgacatcccaggaattggtggaaaaagtgttgaagatactgtttagagatttgttcaagagtggagaatacaaagcgtacagatacgatgatgatgtagaaaatggatttattggattggatacactaaaattaaacattgttcatgatatagttgaaccatgtatgcctgttcgtaggccagtggctaagatactgtgtaaagaaatggtaaataaatactttgagaatccgctacatattattggtaaaaatcttcaagagtgcattgactttgttagtgaataggcatttcatctttctccaatactaattcaaattgttaaattaataatggatagtataaatagttattagttataagatagtaaaaataattattagaataagagtgtagtatcatagataactctcttctataaaaatggattttattcgtagaaagtatcttatatacacagtagaaaataatatagattttttaaaggatgatacattaagtaaagtaaacaattttaccctcaatcatgtactagctctcaagtatctagttagcaattttcctcaacacgttattactaaggatgtattagctaataccaatttttttgttttcatacatatggtacgatgttgtaaagtgtacgaagcggttttacgacacgcatttgatgcacccacgttgtacgttaaagcattgactaagaattatttatcgtttagtaacgcaatacaatcgtacaaggaaaccgtgcataaactaacacaagatgaaaaatttttagaggttgccgaatacatggacgaattaggagaacttataggcgtaaattatgacttagttcttaatccattatttcacggaggggaacccatcaaagatatggaaatcatttttttaaaactgtttaagaaaacagacttcaaagttgttaaaaaattaagtgttataagattacttatttgggcatacctaagcaagaaagatacaggcatagagtttgcggataatgatagacaaaatatatacactctatttcaacaaactggtagaatcgtccatagcaatctaacagaaacgtttagagattatatctttcccggagataagactagctattgggtgtggttaaacgaaagtatagctaatgatgcggatatcgttcttaatagacacgccattaccatgtatgataaaattcttagttatatatactctgagataaaacaaggacgcgttaataaaaacatgcttaagttagtttatatctttgagcctgaaaaagatatcagagaacttctgctagaaatcatatatgatattcctggagatatcctatctattattgatgcaaaaaacgacgattggaaaaaatattttattagtttttataaagctaattttattaacggtaatacatttattagtgatagaacgtttaacgaggacttattcagagttgttgttcaaatagatcccgaatatttcgataatgaacgaattatgtctttattctctacgagtgctgcggacattaaacgatttgatgagttagatattaataacagttatatatctaatataatttatgaggtgaacgatatcacattagatacaatggatgatatgaagaagtgtcaaatctttaacgaggatacgtcgtattatgttaaggaatacaatacatacctgtttttgcacgagtcggatcccatggtcatagagaacggaatactaaagaaactgtcatctataaaatccaagagtagacggctgaacttgtttagcaaaaacattttaaaatattatttagacggacaattggctcgtctaggtcttgtgttagatgattataaaggagacttgttagttaaaatgataaaccatcttaagtctgtggaggatgtatccgcattcgttcgattttctacagataaaaaccctagtattcttccatcgctaatcaaaactattttagctagttataatatttccatcatcgtcttatttcaaaggtttttgagagataatctatatcatgtagaagaattcttggataaaagcatccatctaaccaagacggataagaaatatatacttcaattgataagacacggtagatcatagaacagaccaaatatattattaataatttgtatatacatagatataattatcacacatttttgataaatgggaactgctgcaacaattcagactcccaccaaattaatgaataaagaaaatgcagaaatgattttggaaaaaattgttgatcatatagttatgtatattagtgacgaatcaagtgattcagaaaataatcctgaatatattgattttcgtaacagatacgaagactatagatctctcattataaaaagtgatcacgagtttgtaaagctatgtaaaaatcatgcggagaaaagttctccagaaacgcaacaaatgattatcaaacacatatacgaacaatatcttattccagtatctgaagtactattaaaacctataatgtccatgggtgacataattacatataacggatgtaaagacaatgaatggatgctagaacaactctctaccctaaactttaacaatctccgcacatggaactcatgtagcataggcaatgtaacgcgtctgttttatacattttttagttatctgatgaaagataaactaaatatataagtataatcccattctaatactttaacctgatgtattagcatcttattagaatattaacctaactaaaagacataacataaaaactcattacatagttgataaaaagcggtaggatataaatattatggctgccaccgttccgcgttttgacgacgtgtacaaaaatgcacaaagaagaattctagatcaagaaacattttttagtagaggtctaagtagaccgttaatgaaaaacacatatctatttgataattacgcgtatggatggataccagaaactgcaatttggagtagtagatacgcaaacctagatgctagtgactattatcccatttcgttgggattacttaaaaagttcgagtttctcatgtctctatataaaggtcctattcccgtatatgaagaaaaagtaaatactgaattcatagccaatggatcgttctctggtagatacgtatcatatcttcgaaagttttctgcccttccaacaaacgagtttattagttttttgttactgacttccattccaatctataatatcttgttctggtttaaaaacacacagtttgatattactaaacacacattattcagatacgtctatacagataatgccaaacacctggcgttggctaggtatatgcatcaaacaggagactataagcctttgtttagtcgtctcaaagagaattatatatttaccggtcccgttccaataagtatcaaagatatagatcaccctaatcttagtagagcaagaagtccatccgattatgagacattagctaatattagtactatattgtactttaccaagtatgatccggtattaatgtttttattgttttacgtacctgggtattcaattactacaaaaattactccagccgtagaatatctaatggataaactgaatctaacaaagagcgacgtacaactgttgtaaattattttatgcttcgtaaaatgtaggttttgaaccaaacattctttcaaagaatgagatgcataaaactttattatccaatagattgactatttcggacgtcaatcgtttaaagtaaacttcgtaaaatattctttgatcactgccgagtttaaaacttctatcgataattgtctcatatgttttaatatttacaagttttttggtccatggtacattagccggacaaatatatgcaaaataatatcgttctccaagttctatagtttctggattatttttattatattcagtaactaaatacatattagggttatctgcggatttataatttgagtgatgcattctactcaacataaataattctagaggagacgatctactatcaaattcggatcgtaaatctgtttctaaagaacggagaatatctatacatacctgattagaattcatccgtccttcagacaacatctcagacagtctggttttgtacatcttaatcatattcttatgaaacttggaaacatctcttctagtttcactagtacctttattaattctctcaggtacagattttgaattcgacgatgctgagtatttcatcgttgtatatttcttcttcgattgcataatcagattcttatataccgcctcaaactctattttaaaattattaaacaatactctattattaatcagtcgttctaactctttcgctatttctatagacttatctacatcttgactgtctatctctgtaaacacggagtcggtatctccatacacgctacgaaaacgaaatctgtaatctataggcaacgatgttttcacaatcggattaatatctctatcgtccatataaaatggattacttaatggattggcaaaccgtaacataccgttagataactctgctccatttagtaccgattctagatacaagatcattctacgtcctatggatgtgcaactcttagccgaagcgtatgagtatagagcactatttctaaatcccatcagaccatatactgagttggctactatcttgtacgtatattgcatggaatcatagatggccttttcagttgaactggtagcctgttttagcatctttttatatctggctctctctgccaaaaatgttcttaatagtctaggaatggttccttctatcgatctatcgaaaattgctatttcagagatgaggttcggtagtctaggttcacaatgaaccgtaatatatctaggaggtggatatttctgaagcaatagctgattatttatttcttcttccaatctattggtactaacaacgacaccgactaatgtttccggagatagatttccaaagatacacacattaggatacagactgttataatcaaagattaatacattattactaaacattttttgttttggagcaaataccttaccgccttcataaggaaacttttgttttgtttctgatctaactaagatagttttagtttccaacaatagctttaacagtggacccttgatgactgtactcgctctatattcgaataccatggattgaggaagcacatatgttgacgcacccgcgtctgtttttgtttctactccataatactcccacaaatactgacacaaacaagcatcatgaatacagtatctagccatatctaaagctatgtttagattataatccttatacatctgagctaaatcaacgtcatcctttccgaaagataatttatatgtatcattaggtaaagtaggacataatagtacgactttaaatccattttcccaaatatctttacgaattactttacatataatatcctcatcaacagtcacataattacctgtggttaaaacctttgcaaatgcagcggctttgcctttcgcgtctgtagtatcgtcaccgatgaacgtcatttctctaactcctctatttaatactttacccatgcaactgaacgcgttcttggatatagaatccaatttgtacgaatccaatttttcaaatttttgaatgaatgaatatagatcgaaaaatatagttccattattgttattaacgtgaaacgtagtattggccatgccgcctactcccttatgactagactgatttctctcataaatacagagatgtacagcttcctttttgtccggagatctaaagataattttctctcctgttaataactctagacgattagtaatatatctcagatcaaagttatgtccgttaaaggtaacgacgtagtcgaacgttagttccaacaattgtttagctattcgtaacaaaactatttcagaacatagaactagttctcgttcgtaatccatttccattagtgactgtatcctcaaacatcctctatcgacggcttcttgtatttcctgttccgttaacatctcttcattaatgagcgtaaacaataatcgtttaccacttaaatcgatataacagtaacttgtatgcgagattgggttaataaatacagaaggaaacttcttatcgaagtgacactctatatctagaaataagtacgatcttgggatatcgaatctaggtatttttttagcgaaacagttacgtggatcgtcacaatgataacatccattgttaatctttgtcaaatattgctcgtccaacgagtaacatccgtctggagatatcccgttagaaatataaaaccaactaatattgagaaattcatccatggtggcattttgtatgctgcgtttctttggctcttctatcaaccacatatctgcgacggagcattttctatctttaatatctagattataacttattgtctcgtcaatgtctatagttctcatctttcccaacggcctcgcattaaatggaggaggagacaatgactgatatatttcgtccgtcactacgtaataaaagtaatgaggaaatcgtataaatacggtctcgccatttcgacatctggatttcagatataaaaatctgttttcaccgtgactttcaaaccaattaatgcaccgaacatccatttatagaatttagaaatatattttcatttaaatgaatcccaaacattggggaagagccgtatggaccattatttttatagtactttcgcaagcgggtttagacggcaacatagaagcgtgtaaacgaaaactatatactatagttagcactcttccatgtcctgcatgtagacggcacgcgactatcgctatagaggacaataatgtcatgtctagcgatgatctgaattatatttattattttttcatcagattatttaacaatttggcatctgatcccaaatacgcgatcgatgtgacaaaggttaaccctttataaacttaacccattataaaacttatgattagtcacaactgaaataaccgcgtgattattttttggtataattctacacggcatggtttctgtgactatgaattcaacccccgttacattagtgaaatctttaacaaacagcaagggttcgtcaaagacataaaactcattgtttacaatcgaaatagaccccctatcacacttaaaataaaaaatatccttatcctttaccaccaaataaaattctgattggtcaatgtgaatgtattcacttaacagttccacaaatttatttattaactccgaggcacatacatcgtcggtattttttatggcaaactttactcttccagcatccgtttctaaaaaaatattaacgagttccatttatatcatccaatattattgaaatgacgttgatggacagatgatacaaataagaaggtacggtacctttgtccaccatctcctccaattcatgctctattttgtcattaactttaatgtatgaaaacagtacgccacatgcttccatgacagtgtgtaacactttggatacaaaatgtttgacattagtataattgtccaagactgtcaatctataatagatagtagctataatatattctatgatggtattgaagaagatgacaaccttggcatattgatcatttaacacagacatggtatcaacagatagcttgaatgaaagagaatcagtaattggaataagcgtcttctcgatagagtgtccgtataccaacatgtctgatattttgatgtattccattaaattatttagttttttctttttattctcgttaaacagcatttctgtcaacggaccccaacatcgttgaccgattaagttttgattgatttttccgtgtaaggcgtatctagtcagatcgtatagcctatccaataatccatcgtctgtgtgtagatcacatcgtacactttttaattctctatagaagagcgacagacatctggagcaattacagacagcaatttctttattctctacagatgtaagatacttgaagacattcctatgatgatgcagaattttggataacacggtattgatggtatctgttaccataattcctttgatggctgatagtgtcagagcacaagatttccaatctttgacaatttttagcaccattatctttgttttgatatctatatcagacagcatggtgcgtctgacaacacagggattaagacggaaagatgaaatgattctctcaacatcttcaatagataccttgctattttttctggcattatctatatgtgcgagaatatcctctagagaatcagtatcctttttgatgatagtggatctcaatgacatgggacgtttaaaccttcttattctatcaccagattgcatggtgatttgtcttctttcttttatcataatgtaatctctaaattcatcggcaaattgtctatatctaaaatcataatatgagatgtttacctctacaaatatctgttcgtccaatgttagagtatttacatcagttttgtattccaaattaaacatggcaacggatttaattttatattcctctattaagtcctcgtcgataataacagaatgtagataatcatttaatccgtcgtacatggttggaagatgcttgttgacaaaatctttaattgtcttgatgaaggtgggactatatctaacatcttgattaataaaatttataacattgtccataggatactttgtaactagttttatacacatctcttcatcggtaagtttagacagaatatcgtgaacaggtggtatattatattcatcagatatacgaagaacaatgtccaaatctatattgtttaatatattatatagatgtagcgtagctcctacaggaatatctttaactaagtcaatgatttcatcaaccgttagatctattttaaagttaatcatataggcattgatttttaaaaggtatgtagccttgactacattctcattaattaaccattccaagtcattgtgtgtaagaagattatattctatcataagcttgactacatttggtcccgataccattaaagaattcttatgatataaggaaacagattttaggtactcatctactctacaagaattttggagagccttaacgatatcagtgacgtttattatttcaggaggaaagaatctaacattgagaatatcggaattaatagcttccagatacagtgattttggcaatagtccgtgtaatccataatccagtaacacgagctggtgcttgctagacaccttttcaatgtttaatttttttgaaataagctttgataaagccttcctcgcaaattccggatacatgaacatgtcggcgacatgattaagtattgttttttcattatttttatattttctcaacaagttctcaataccccaatagatgatagaatatcacccaatgcgtccatgttgtctatttccaacaggtcgctatatccaccaatagaagtttttccaaaaaagattctaggaacagttctaccaccagtaatttgttcaaaataatcccgcaattcattttcgggtttaaattctttaatatcgacaatttcatacgctcctcttttgaaactaaacttatttagaatatccagtgcatttctacaaaaaggacatgtatacttgacaaaaattgtcactttgttattggccaacctttgttgtacaaattcctcggccattttaatatttaagtgatataaaactatctcgacttatttaactctttagtcgagatatatggacgcagatagctatatgatagccaactacagaaggcaaacgctataaaaaacataattacgacgagcatatttataaatatttttattcagcattacttgatatagtaatattaggcacagtcaaacattcaaccactctcgatacattaactctctcattttctttaacaaattctgcaatatcttcgtaaaaagattcttgaaactttttagaatatctatcgactctagatgaaatagcgttcgtcaacatactatgttttgtatacataaaggcgcccattttaacagtttctagtgacaaaatgctagcgatcctaggatcctttagaatcacatagattgacgattcgtctctcttagtaactctagtaaaataatcatacaatctagtacgcgaaataatattatccttgacttgaggagatctaaacaatctagttttgagaacatcgataagttcatcgggaatgacatacatactatctttaatagaactcttttcatccagttgaatggattcgtccttaaccaactgattaatgagatcttctattttatcattttccagatgatatgtatgtccattaaagttaaattgtgtagcgcttctttttagtctagcagccaatactttaacatcactaatatcgatatacaaaggagatgatttatctatggcattaagaattcgtttttcgacatccgtcaaaaccaattcctttttgcctgtatcatccagttttccatcctttgtaaagaaattattttctactagactattaataagactgataaggattcctccataattgcacaatccaaactttttaacaaaactagactttacgagatctacaggaatgcgtacttcaggttttttagcttgtgattttttcttttgcggacattttctagtaaccaactcatctaccatttcattgattttagcagtgaaataagctttcaatgcacgggcactgatactattgaaaacgagttgatcttcaaattccgccatttaagttcaccaaacaacttttaaatacaaatatatcaatagtagtagaataagaactataaaaaaaataataattaaccaaccccaacaaccggtattattagttgatgtggtagttttctcatcacttagaacagatttaacaatttctataaagtctgtcaaatcatcttccggagaccccataaatacaccaaatatagcggcgtacaacttatccatttatacattgaatattggcttttctttatcgctatcttcatcatattcatcatcaatatcaacaagtcccagattacgagccagatcttcttctacattttcagtcattgatacacgttcactatctccagagagtccgataacgttagccaccacttctctatcaatgattagtttcttgagcgcgaaagtaatttttgtttccgttccggatctatagaagacgataggtgtgataattgccttggccaattgtctttctcttttactgagtgattctagttcaccttctatagatctgagaatggatgattctccagtcgaaacatattctaccatggatccgtttaatttgttgatgaagatggattcatccttaaatgttttctctgtaatagtttccaccgaaagactatgcaaagaatttggaatgcgttccttgtgcttaatgtttccatagacggcttctagaagttgatacaacataggactagccgcggtaacttttatttttagaaagtatccatcgcttctatcttgtttagatttatttttataaagtttagtctctccttccaacataataaaagtggaagtcatttgactagataaactatcagtaagttttatagagatagacgaacaattagcgtattgagaagcatttagtgtaacgtattcgatacattttgcattagatttactaatcgattttgcatactctataacacccgcacaagtctgtagagaatcgctagatgcagtaggtcttggtgaagtttcaactctcttcttgattaccttactcatgattaaacctaaataattgtactttgtaatataatgatatatattttcactttatctcatttgagaataaaaatgtttttgtttaaccactgcatgatgtacagatttcggaatcgcaaaccaccagtggttttattttatccttgtccaatgtgaattgaatgggagcggatgcgggtttcgtacgtagatagtacattcccgtttttagaccgagactccatccgtaaaaatgcatactcgttagtttggaataactcggatctgctatatggatattcatagattgactttgatcgatgaaggctcccctgtctgcagccatttttatgatcgtcttttgtggaatttcccaaatagttttataaactcgcttaatatcttctggaaggtttgtattctgaatggatccaccatctgccataatcctattcttgatctcatcattccataattttctctcggttaaaactctaaggagatgcggattaactacttgaaattctccagacaatactctccgagtgtaaatattactggtatacggttccaccgactcattatttcccaaaatttgagcagttgatgcagtcggcataggtgccaccaataaactatttctaagaccgtatgttctgattttatcttttagaggttcccaattccaaagatccgacggtacaacattccaaagatcatattgtagaataccgttactggcgtacgatcctacatatgtatcgtatggtccttccttctcagctagttcacaactcgcctctaatgcaccgtaataaatggtttcgaagatcttcttatttagatcttgtgcttccaggctatcaaatggataatttaagagaataaacgcgtccgctaatccttgaacaccaataccgataggtctatgtctcttattagagatttcagcttctggaataggataataattaatatctataattttattgagatttctgacaattactttgaccacatccttcagtttgagaaaatcaaatcgcccatctattacaaacatgttcaaggcaacagatgccagattacaaacggctacctcattagcatccgcatattgtattatctcagtgcaaagattactacacttgatagttcctaaattttgttgattactctttttgttacacgcatccttataaagaatgaatggagtaccagtttcaatctgagattctataatcgctttccagacgactcgagcctttattatagatttgtatctcctttctctttcgtatagtgtatacaatcgttcgaactcgtctccccaaacattgtccaatccaggacattcatccggacacatcaacgaccactctccgtcatccttcactcgtttcataaagagatcaggaatccaaagagctataaatagatctctggttctatgttcctcgtttcctgtattctttttaagatcgaggaacgccataatatcagaatgccacggttccaagtatatggccataactccaggccgtttgtttcctccctgatctatgtatctagcggtgttattataaactctcaacattggaataataccgtttgatataccattggtaccggagatatagcttccactggcacgaatattactaattgatagacctattccccctgccattttagagattaatgcgcatcgttttaacgtgtcatagataccctctatgctatcatcgatcatgttaagtagaaaacagctagacatttggtgacgactagttcccgcattaaataaggtaggagaagcgtgcgtaaaccatttttcagaaagtagattgtacgtctcaatagctgagtctatatcccattgatgaattcctactgcgacacgcattaacatgtgctgaggtctttcaacgatcttgttgtttattttcaacaagtaggatttttccaaagttttaaaaccaaaatagttgtatgaaaagtctcgttcgtaaataataaccgagttgagtttatccttatatttgttaactatatccatggtgatacttgaaataatcggagaatgtttcccatttttaggattaacatagttgaataaatcctccatcacttcactaaatagtttttttgtttccttgtgtagatttgatacggctattctggcggctagaatggcataatccggatgttgtgtagtacaagtggctgctatttcggctgccagagtgtccaattctaccgttgttactccattatatattccttgaataaccttcatagctattttaataggatctatatgatccgtgtttaagccataacataattttctaatacgagacgtgattttatcaaacatgacattttccttgtatccatttcgtttaatgacaaacatttttgttggtgtaataaaaaaattatttaacttttcattaatagggatttgacgtatgtagcgtacaaaatgattgttcctggtatatagataaagagtcctatatatttgaaaatcgttacggctcgattaaactttaatgattgcatagtgaatatatcattaggatttaactccttgactatcatggcggcgccagaaattaccatcaaaagcattaatacagttataccgatcgcagttagaacggttatagcatccaccatttatatctaaaaattagatcaaagaatatgtgacaaagtcctagttgtatactgagaattgacgaaacaatgtttcttacatatttttttcttattagtaaccgacttaatagtaggaactggaaaactagacttgattattctataagtatagatacccttccaaataatattctctttgataaaagttccagaaaatgtagaattttttaaaaagttatcttttgctattaccaagattgtgtttagacgcttattattaatatgagtgatgaaatccacaccgcctctagatatcgcctttatttccacattagatggtaaatccaatagtgaaactatctttttaggaatgtatggactcgcgtttagaggagtaaacgtcttaggcgtcggaaaggatgattcatcaaacgaataaacaatttcacaaatggatgttaatgtattagtaggaaattttttgacgctattggaattgaagattctaatggatgatgttctacctatttcatccgataacatgttaatttccgacaccaacggttttaatatttcgatgatatacggtagtctctctttcggacttatatagcttattccacaatacgagtcattatatactccaaaaaacaaaataactagtataaaatctgtatcgaatgggaaaaacgaaattatcgacataggtatagaatccggaacattgaacgtattaatacttaattctttttctgtggtaagtaccgataggttattgacattgtatggttttaaatattctataacttgagacttgatagatattagtgatgaattgaaaattatttttatcaccacgtgtgtttcaggatcatcgtcgacgcccgtcaaccaaccgaacggagtaaaataaatatcattaatatatgctctagatattagtatttttatcaatcctttgattatcatcttctcgtaggcgaatgattccatgatcaagagtgatttaagaacatcctccggagtattaatgggcttagtaaacagtccatcgttgcaataataaaagttatccaagttaaaggatattatgcattcgtttaaagatatcacctcatctgacggagacaattttttggtaggttttagagactttgaagctacttgtttaacaaagttattcatcgtcgtctactattctatttaattttgtagttaatttatcacatatcacattaattgactttttggtccacttttccatacgtttatattcttttaatcctgcgttatccgtttccgttatatccagggatagatcttgcaagttaaatagaatgctcttaaataatgtcattttcttatccgctaaaaatttaaagaatgtataaacctttttcagagatttgaaactcttaggtggtgtcctagtacacaatatcataaacaaactaataaacattccacattcagattccaacagctgattaacttccacattaatacagcctattttcgctccaaatgtacattcgaaaaatctgaataaaacatcgatgtcacaatttgtattatccaatacagaatgtttgtgattcgtgttaaaaccatcggagaaggaatagaaataaaaattattatagtggtggaattcagttggaatattgcctccggagtcataaaaggatactaaacattgttttttatcataaattacacatttccaatgagacaaataacaaaatccaaacattacaaatctagaggtagaacttttaattttgtctttaagtatatacgataagatatgtttattcataaacgcgtcaaatttttcatgaatcgctaaggagtttaagaatctcatgtcaaattgtcctatataatccacttcggatccataagcaaactgagagactaagttcttaatacttcgattgctcatccaggctcctctctcaggctctattttcatcttgacgacctttggattttcaccagtatgtattcctttacgtgataaatcatcgattttcaaatccatttgtgagaagtctatcgccttagatactttttcccgtagtcgaggtttaaaaaaatacgctaacggtatactagtaggtaactcaaagacatcatatatagaatggtaacgcgtctttaactcgtcggttaactctttcttttgatcgagttcgtcgctactattgggtctgctcaggtgccccgactctactagttccaacatcataccgataggaatacaagacactttgccggcggttgtagatttatcatatttttccactacatatccgttacaatttgttaaaaatttagatacatctatattgctacataatccagctagtgaatatatatgacataataaattggtaaatcctagttctggtattttactaattactaaatctgtatatctttccatttatcatggaaaagaatttaccagatatcttcttttttccaaactgcgttaatgtattctcttacaaatattcacaagatgaattcagtaatatgagtaaaacggaacgtgatagtttctcattggccgtgtttccagttataaaacatagatggcataacgcacacgttgtaaaacataaaggaatatacaaagttagtacagaagcacgtggaaaaaaagtatctcctccatcactaggaaaacccgcacacataaacctaaccgcgaagcaatatatatacagtgaacacacaataagctttgaatgttatagttttctaaaatgtataacaaatacagaaatcaattcgttcgatgagtatatattaagaggactattagaagctggtaatagtttacagatattttccaattccgtaggtaaacgaacagatactataggtgtactagggaataagtatccatttagcaaaattccattggcctcattaactcctaaagcacaacgagagatattttcagcgtggatttctcatagacctgtagttttaactggaggaactggagtgggtaagacgtcacaggtacccaagttattgctttggtttaattatttatttggtggattctctactctagataaaatcactgactttcacgaaagaccagtcattctatctcttcctaggatagctttagttagattgcatagcaataccattttaaaatcattgggatttaaggtactagatggatctcctatttctttacggtacggatctataccggaagaattaataaacaaacaaccaaaaaaatatggaattgtattttctacccataagttatctctaacaaaactatttagttatggcactcttattatagacgaagttcatgagcatgatcaaataggagatattattatagcagtagcgagaaagcatcatacgaaaatagattctatgtttttaatgactgccacgttagaggatgacagggaacggctaaaagtatttttacctaatcccgcatttatacatattcctggagatacactgtttaaaattagcgaggtatttattcataataagataaatccatcttccagaatggcatacatagaagaagaaaagagaaatttagttactgctatacagatgtatactcctcctgatggatcatccggtatagtctttgtggcatccgttgcacagtgtcacgaatataaatcatatttagaaaaaagattaccgtatgatatgtatattattcatggtaaggtcttagatatagacgaaatattagaaaaagtgtattcatcacctaatgtatcgataattatttctactccttatttggaatccagcgttactatacgcaatgttacacacatttatgatatgggtagagtttttgtccccgctccttttggaggatcgcaacaatttatttctaaatctatgagagatcaacgaaaaggaagagtaggaagagttaatcctggtacatacgtctatttctatgatctgtcttatatgaagtctatacagcgaatagattcagaatttctacataattatatattgtacgctaataagtttaatctaacactccccgaagatttgtttataatccctacaaatttggatattctatggcgtacaaaggaatatatagactcgttcgatattagtacagaaacatggaataaattattatccaattattatatgaagatgatagagtatgctaaactttatgtactaagtcctattctcgctgaggagttggataactttgagaggacgggagaattaactagtattgtacgagaagccattttatctctaaatttacaaattaagattttaaattttaaacataaagatgatgatacgtatatacacttttgtaaaatattattcggtgtctataacggaacaaacgctactatatattatcatagacctctaacgggatatatgaatatgatttcagatactatatttgttcctgtagataataactaaaaatcaaactctaatgaccacatctttttttagagatgaaaaattttccacatctccttttgtagacacgactaaacattttgcagaaaaaagtttattagtgtttagataatcgtatacttcatcagtgtagatagtaaatgtgaacagataaaaggtattcttgctcaatagattggtaaattccatagaatatattaatcctttcttcttgagatcccacatcatttcaaccagagacgttttatccaatgatttacctcgtactataccacatacaaaactagattttgcagtgacgtcgtacctggtattcctaccaaacaaaattttacttttagttcttttagaaaattctaaggtagaatctctatttgccaatatgtcatctatggaattaccactagcaaaaaatgatagaaatatatattgatacatcgcagctggttttgatctactatactttaaaaacgaatcagattccataattgcctgtatatcatcagctgaaaaactatgttttacacgtattccttcggcatttctttttaatgatatatcttgtttagacaatgataaagttatcatgtccatgagagacgcgtctccgtatcgtataaatatttcattagatgttagacgcttcattaggggtatacttctataaggtttcttaatcagtccatcattggttgcgtcaagaactactatcggatgttgttgggtatctctagtgttacacatggccttactaaagtttgggtaaataactatgatatctctattaattatagatgcatatatttcattcgtcaaggatattagtatcgacttgctatcgtcattaatacgtgtaatgtaatcatataaatcatgcgatagccaaggaaaatttaaatagatgttcatcatataatcgtcgctataattcatattaatacgttgacattgactaatttgtaatatagcctcgccacgaagaaagctctcgtattcagtttcatcgataaaggataccgttaaatataactggttgccgatagtctcatagtctattaagtggtaagtttcgtacaaatacagaatccctaaaatattatctaatgttggattaatctttaccataactgtataaaatggagacggagtcataactattttaccgtttgtacttactggaatagatgaaggaataatctccggacatgctggtaaagacccaaatgtctgtttgaagaaatccaatgttccaggtcctaatctcttaacaaaaattacgatattcgatcccgatatcctttgcattctatttaccagcatatcacgaactatattaagattatctatcatgtctattctcccaccgttatataaatcgcctccgctaagaaacgttagtatatccatacaatggaatacttcatttctaaaatagtattcgttttctaattctttaatgtgaaatcgtatactagaaagggaaaaattatctttgagttttccgttagaaaagaaccacgaaactaatgttctgattgcgtccgattccgttgctgaattaatggatttacaccaaaaactcatataacttctagatgtagaagcattcgctaaaaaattagtagaatcaaaggatataagtagatgttccaacaagtgagcaattcccaagatttcatctatatcattctcgaatccgaaattagaaattcccaagtagatatcctttttcatccgatcgttgatgaaaatacgaactttattcggtaagacaatcatttactaaggagtaaaataggaagtaatgttcgtatgtcgttatcatcgtataaattaaaggtgtgttttttaccattaagtgacattataattttaccaatattggaattataatataggtgtatttgcgcactcgcgacggttgatgcatcggtaaatatagctgtatctaatgttctagtcggtatttcatcatttcgctgtctaataatagcgttttctctatctgtttccattacagctgcctgaagtttattggtcggataatatgtaaaataataagaaatacatacgaataacaaaaataaaataagatataataaagatgccatttagagatctaattttgtttaacttgtccaaattcctacttacagaagatgaggaatcgttggagatagtgtcttccttatgtagaggatttgaaatatcttataatgacttgataacttactttccagataggaaataccataaatatatttataaagtatttgaacatgtagatttatcggaggaattaagtatggaattccatgatacaactctgagagatttagtctatcttagattgtacaagtattccaagtgtatacggccgtgttataaattaggagataatctaaaaggcatagttgttataaaggacaggaatatttatattagggaagcaaatgatgacttgatagaatatctcctcaaggaatacactcctcagatttatacatattctaatgagcgcgtccccataactggttcaaaattaattctttgtggattttctcaagttacatttatggcgtatacaacgtcgcatataacaacaaataaaaaggtagatgttctcgtttccaaaaaatgtatagatgaactagtcgatccaataaattatcaaatacttcaaaatttatttgataaaggaagcggaacaataaacaaaatactcaggaagatattttattcggtaacaggtggccaaactccataggtagctttttctatttcggattttagaatttccaaattcaccagcgatttatcggttttggtgaaatccaaggatttattaatgtccacaaatgccatttgttttgtctgtggattgtatttgaaaatggaaacgatgtagttagatagatgcgctgcgaagtttcctattagggttccgcgcttcacgtcacccagcatacttgaatcaccatcctttaaaaaaaatgataagatatcaacatggagtatatcatactcgaattttaattcttctactgactcactgacattttcacaaatactacaatacggtttaccgaaaataatcagtacgttcttcatttatgggtatcaaaaacttaaaatcgttactgctggaaaataaatcactgacgatattagatgataatttatacaaagtatacaatggaatatttgtggatacaatgagtatttatatagccgtcgccaattgtgtcagaaacttagaagagttaactacggtattcataaaatacgtaaacggatgggtaaaaaagggagggcatgtaaccctttttatcgatagaggaagtataaaaattaaacaagacgttagagacaagagacgtaaatattctaaattaaccaaggacagaaaaatgttagaattagaaaagtgtacatccgaaatacaaaatgttaccggatttatggaagaagaaataaaggcagaaatgcaattaaaaatcgataaactcacatttcaaatatatttatctgattctgataacataaaaatatcattgaatgagatactaacacatttcaacaataatgagaatgttacattattttattgtgatgaacgagacgcagaattcgttatgtgtctcgaggctaaaacacatttctctaccacaggagaatggccgttgataataagtaccgatcaggatactatgctatttgcatctgctgataatcatcctaagatgataaaaaacttaactcaactgtttaaatttgttccctcggcagaggataactatttagcaaaattaacggcgttagtgaatggatgtgatttctttcctggactctatggggcatctataacacccaccaacttaaacaaaatacaattgtttagtgattttacaatcgataatatagtcactagtttggcaattaaaaattattatagaaagactaactctaccgtagacgtgcgtaatattgttacgtttataaacgattacgctaatttagacgatgtctactcgtatattcctccttgtcaatgcactgttcaagaatttatattttccgcattagatgaaaaatggaatgaatttaaatcatcttatttagaaagcgtgccgttaccctgccaattaatgtacgcgttagaaccacgcaaggagattgatgtttcagaagttaaaactttatcatcttatatagatttcgaaaatactaaatcagatatcgatgttataaaatctatatcctcgatcttcggatattctaacgaaaactgtaacacgatagtattcggcatctataaggataatttactactgagtataaataattcattttactttaacgatagtctgttaataaccaatactaaaagtgataatataataaatataggttactagattaaaaatggtgttccaactcgtgtgctctacatgcggtaaagatatttctcacgaacgatataaattgattatacgaaaaaaatcattaaaggatgtactcgtcagtgtaaagaacgaatgttgtaggttaaaattatctacacaaatagaacctcaacgtaacttaacagtgcaacctctattggatataaactaatatggatccggttaattttatcaagacatatgcgcctagaggttctattatttttattaattataccatgtcattaacaagtcatttgaatccatcgatagaaaaacatgtgggtatttattatggtacgttattatcggaacacttggtagttgaatctacctatagaaaaggagttcgaatagtcccattggatagtttttttgaaggatatcttagtgcaaaagtatacatgttagagaatattcaagttatgaaaatagcagctgatacgtcattaactttattgggtattccgtatggatttggtcatgatagaatgtattgttttaaattggtagctgactgttataaaaatgccggtattgatacatcgtctaaacgaatattgggcaaagatatttttctgagccaaaacttcacagacgataatagatggataaagatatatgattctaataatttaacattttggcaaattgattaccttaaagggtgagttaatatgcataactactcctccgttgttttttccctcgttctttttcttaacgttgtttgccatcactctcataatgtaaagatattctaaaatggtaaacttttgcatatcggacgcagaaattggtataaatgttgtaattgtattatttcccgtcaatggactagtcacagctccatcagttttatatcctttagagtatttctcactcgtgtctaacattctagagcattccatgatctgtttatcgttgatattggccggaaagatagattttttattttttattatattactattggcaattgtagatataacttctggtaaatatttttctaccttttcaatctcttctattttcaagccggctatatattctgctatattgttgctagtatcaataccttttctggctaagaagtcatatgtggtattcactatatcagttttaactggtagttccattagcctttccacttctgcagaataatcagaaattggttctttaccagaaaatccagctactataataggctcaccgatgatcattggcaaaatcctatattgtaccagattaatgagagcatatttcatttccaataattctgctagttcttgagacattgatttatttgatgaatctagttggttctctagatactctaccatttctgccgcatacaataacttgttagataaaatcagggttatcaaagtgtttagcgtggctagaatagtgggcttgcatgtattaaagaatgcggtagtatgagtaaaccgttttaacgaattatatagtctccagaaatctgtggcgttacatacatgagccgaatgacatcgaagattgtccaatatttttaatagctgctctttgtccattatttctatatttgactcgcaacaattgtagataccattaatcaccgattcctttttcgatgccggacaatagcacaattgtttagctttggactctatgtattcagaattaatagatatatctctcaatacagattgcactatacattttgaaactatgtcaaaaattgtagaacgacgctgttctgcagccatttaactttaaataatttacaaaaatttaaaatgagcatccgtataaaaatcgataaactgcgccaaattgtggcatatttttcagagttcagtgaagaagtgtctataaatgtagactcgacggatgagttaatgtatatttttgccgccttgggcggatctgtaaacatttgggcaattatacctctaagtgcatcagtgttttaccgaggagccgaaaatattgtgtttaatcttcctgtgtccaaggtaaaatcgtgtttgtgtagttttcacaatgatgccatcatagatatagaacctgatctggaaaataatctagtaaaactttctagttatcatgtagtaagtgtcgattgtaacaaggaactgatgcctattaggacagatactactatttgtctaagtatagatcaaaagaaatcttacgtgtttaattttcacaagtatgaagaaaaatgttgtggtagaaccgtcattcatctagaatggttgttgggctttatcaagtgtattagtcagcatcagcatctggctattatgtttaaagatgacaatattattatgaagactcctggtaatactgatgcgttttccagggaatattctatgactgaatgttctcaagaactacaaaagttttctttcaaaatagctatctcgtctctcaacaaactacgaggattcaaaaagagagtcaatgtttttgaaactagaatcgtaatggataatgacgataacattttaggaatgttgttttcggatagagttcaatcctttaagatcaacatctttatggcgtttttagattaatactttcaatgagataaatatgggtggcggagtaagtgttgagctccctaaacgggatccgcctccgggagtacccactgatgagatgttattaaacgtggataaaatgcatgacgtgatagctcccgctaagcttttagaatatgtgcatataggaccactagcaaaagataaagaggataaagtaaagaaaagatatccagagtttagattagtcaacacaggacccggtggtctttcggcattgttaagacaatcgtataatggaaccgcacccaattgctgtcgcacttttaatcgtactcattattggaagaaggatggaaagatatcagataagtatgaagagggtgcagtattagaatcgtgttggccagacgttcacgacactggaaaatgcgatgttgatttattcgactggtgtcagggggatacgttcgatagaaacatatgccatcagtggatcggttcagcctttaataggagtaatagaactgtagagggtcaacaatcgttaataaatctgtataataagatgcaaacattatgtagtaaagatgctagtgtaccaatatgcgaatcatttttgcattatttacgcgcacacaatacagaagatagcaaagagatgatcgattatattctaagacaacagtctgcggactttaaacagaaatatatgagatgtagttatcccactagagataagttagaagagtcattaaaatatgcggaacctcgagaatgttgggatccagagtgttcgaatgccaatgttaatttcttactaacacgtaattataataatttaggactttgcaatattgtacgatgtaataccagcgtgaacaacttacagatggataaaacttcctcattaagattgtcatgtggattaagcaatagtgatagattttctactgttcccgtcaatagagcaaaagtagttcaacataatattaaacactcgttcgacctaaaattgcatttgatcagtttattatctctcttggtaatatggatactaattgtagctatttaaatgggtgccgcggcaagcatacagacgacggtgaatacactcagcgaacgtatctcgtctaaattagaacaagaagcgaacgctagtgctcaaacaaaatgtgatatagaaatcggaaatttttatatccgacaaaaccatggatgtaacctcactgttaaaaatatgtgctctgcggacgcggatgctcagttggatgctgtgttatcagccgctacagaaacatatagtggattaacaccggaacaaaaagcatacgtgccagctatgtttactgctgcgttaaacattcagacgagtgtaaacactgttgttagagattttgaaaattatgtgaaacagacttgtaattctagcgcggtcgtcgataacaaattaaagatacaaaacgtaatcatagatgaatgttacggagccccaggatctccaacaaatttggaatttattaatacaggatctagcaaaggaaattgtgccattaaagcgttgatgcaattgacgactaaggccactactcaaatagcacctagacaagttgctggtacaggagttcagttttatatgattgttatcggtgttataatattggcagcgttgtttatgtactatgccaagcgtatgttgttcacatccaccaatgataaaatcaaacttattttagccaataaggaaaacgtccattggactacttacatggacacattctttagaacttctccgatggttattgctaccacggatatgcaaaactgaaaatatattgataatattttaatagattaacatggaagttatcgctgatcgtctagacgatatagtgaaacaaaatatagcggatgaaaaatttgtagattttgttatacacggtctagagcatcaatgtcctgctatacttcgaccattaattaggttgtttattgatatactattatttgttatagtaatttatatttttacggtacgtctagtaagtagaaattatcaaatgttgttggtggtgctagtcatcacattaactattttttattactttatactataatagtactagactgacttctaacaaacatctcacctgccataaataaatgcttgatattaaagtcttctatttctaacactattccatctgtggaaaataatactctgacattatcgctaattgacacatcggtgagtgatatgcctataaagtaataatcttctttgggcacatataccagtgtaccaggttctaacaacctatttactggtgctcctgtagcatactttttctttaccttgagaatatccatcgtttgcttggtcaatagcgatatgtgattttttatcaaccactcaaaaaagtaattggagtgttcatatcctctacgggctattgtctcatggccgtgtatgaaatttaagtaacacgactgtggtagatttgttctatagagccgattgccgcaaatagatagaactaccaatatgtctgtacaaatgttaaacattaattgattaacagaaaaaacaatgttcgttctgggaatagaaaccagatcaaaacaaaattcgttagaatatatgccacgtttatacatggaatataaaataactacagtttgaaaaataacagtatcatttaaacatttaacttgcggggttaatctcacaactttactgtttttgaactgttcaaaatatagcatcgatccgtgagaaatacgtttagccgcctttaatagaggaaatcccaccgcctttctggatctcaccaacgacgatagttctgaccagcaactcatttcttcatcatccacctgttttaacatataataggcaggagatagatatccgtcattgcaatattccttctcgtaggcacacaatctaatattgataaaatctccattctcttctctgcatttattatcttgtctcggtggctgattaggctgtggtcttggtttaggccttggtctatcgttgttgaatctattttggtcattaaatctttcatttcttcctggtatatttctatcacctcgtttggttggatttttgtctatattatcgtttgtaacatcggtacgggtattcatttatcacaaaaaaaacttctctaaatgagtctactgctagaaaacctcatcgaagaagataccatattttttgcaggaagtatatctgagtatgatgatttacaaatggttattgccggcgcaaaatccaaatttccaagatctatgctttctatttttaatatagtacctagaacgatgtcaaaatatgagttggagttgattcataacgaaaatatcacaggagcaatgtttaccacaatgtataatataagaaacaatttgggtctaggagatgataaactaactattgaagccattgaaaactatttcttggatcctaacaatgaagttatgcctcttattattaataatacggatatgactgccgtcattcctaaaaaaagtggtaggagaaagaataagaacatggttatcttccgtcaaggatcatcacctatcttgtgcattttcgaaactcgtaaaaagattaatatttataaagaaaatatggaatccgcgtcgactgagtatacacctatcggagacaacaaggctttgatatctaaatatgcgggaattaatgtcctgaatgtgtattctccttccacatccataagattgaatgccatttacggattcaccaataaaaataaactagagaaacttagtactaataaggaactagaatcgtatagttctagccctcttcaagaacccattaggttaaatgattttctgggactattggaatgtgttaaaaagaatattcctctaacagatattccgacaaaggattgattactataaatggagaatgttcctaatgtatactttaatcctgtgtttatagagcccacgtttaaacattctttattaagtgtttataaacacagattaatagttttatttgaagtattcgttgtattcattctaatatatgtattttttagatctgaattaaatatgttcttcatgcctaaacgaaaaatacccgatcctattgatagattacgacgtgctaatctagcgtgtgaagacgataaattaatgatctatggattaccatggatgacaactcaaacatctgcgttatcaataaatagtaaaccgatagtgtataaagattgtgcaaagcttttgcgatcaataaatggatcacaaccagtatctcttaacgatgttcttcgcagatgatgattcattttttaagtatttggctagtcaagatgatgaatcttcattatctgatatattgcaaatcactcaatatctagactttctgttattattattgatccaatcaaaaaataaattagaagctgtgggtcattgttatgaatctctttcagaggaatacagacaattgacaaaattcacagactttcaagattttaaaaaactgtttaacaaggtccctattgttacagatggaagggtcaaacttaataaaggatatttgttcgactttgtgattagtttgatgcgattcaaaaaagaatcctctctagctaccaccgcaatagatcctgttagatacatagatcctcgtcgcaatatcgcattttctaacgtgatggatatattaaagtcgaataaagtgaacaataattaattctttattgtcatcatgaacggcggacatattcagttgataatcggccccatgttttcaggtaaaagtacagaattaattagacgagttagacgttatcaaatagctcaatataaatgcgtgactataaaatattctaacgataatagatacggaacgggactatggacgcatgataagaataattttgaagcattggaagcaactaaactatgtgatgtcttggaatcaattacagatttctccgtgataggtatcgatgaaggacagttctttccagacattgttgaattagatcgataaaaattaattaattacccgggtaccaggcctagatctgtcgagatccggtggtggtgcaaatcaaagaactgctcctcagtggatgttgcctttacttctaggcctgtacggaagtgttacttctgctctaaaagctgctgcagggggggggggggggtgggggggccggttagggccgccatcccctcagagcgtcgggatatcgggtggcggctcgggacggaggacgcgctagtgttcttctgtgtggcagttcagaatgatggatcaagctagatcagcattctctaacttgtttggtggagaaccattgtcatatacccggttcagcctggctcggcaagtagatggcgataacagtcatgtggagatgaaacttgctgtagatgaagaagaaaatgctgacaataacacaaaggccaatgtcacaaaaccaaaaaggtgtagtggaagtatctgctatgggactattgctgtgatcgtctttttcttgattggatttatgattggctacttgggctattgtaaaggggtagaaccaaaaactgagtgtgagagactggcaggaaccgagtctccagtgagggaggagccaggagaggacttccctgcagcacgtcgcttatattgggatgacctgaagagaaagttgtcggagaaactggacagcacagacttcaccagcaccatcaagctgctgaatgaaaattcatatgtccctcgtgaggctggatctcaaaaagatgaaaatcttgcgttgtatgttgaaaatcaatttcgtgaatttaaactcagcaaagtctggcgtgatcaacattttgttaagattcaggtcaaagacagcgctcaaaactcggtgatcatagttgataagaacggtagacttgtttacctggtggagaatcctgggggttatgtggcgtatagtaaggctgcaacagttactggtaaactggtccatgctaattttggtactaaaaaagattttgaggatttatacactcctgtgaatggatctatagtgattgtcagagcagggaaaatcacctttgcagaaaaggttgcaaatgctgaaagcttaaatgcaattggtgtgttgatatacatggaccagactaaatttcccattgttaacgcagaactttcattctttggacatgctcatctggggacaggtgacccttacacacctggattcccttccttcaatcacactcagtttccaccatctcggtcatcaggattgcctaatatacctgtccagacaatctccagagctgctgcagaaaagctgtttgggaatatggaaggagactgtccctctgactggaaaacagactctacatgtaggatggtaacctcagaaagcaagaatgtgaagctcactgtgagcaatgtgctgaaagagataaaaattcttaacatctttggagttattaaaggctttgtagaaccagatcactatgttgtagttggggcccagagagatgcatggggccctggagctgcaaaatccggtgtaggcacagctctcctattgaaacttgcccagatgttctcagatatggtcttaaaagatgggtttcagcccagcagaagcattatctttgccagttggagtgctggagactttggatcggttggtgccactgaatggctagagggatacctttcgtccctgcatttaaaggctttcacttatattaatctggataaagcggttcttggtaccagcaacttcaaggtttctgccagcccactgttgtatacgcttattgagaaaacaatgcaaaatgtgaagcatccggttactgggcaatttctatatcaggacagcaactgggccagcaaagttgagaaactcactttagacaatgctgctttccctttccttgcatattctggaatcccagcagtttctttctgtttttgcgaggacacagattatccttatttgggtaccaccatggacacctataaggaactgattgagaggattcctgagttgaacaaagtggcacgagcagctgcagaggtcgctggtcagttcgtgattaaactaacccatgatgttgaattgaacctggactatgagaggtacaacagccaactgctttcatttgtgagggatctgaaccaatacagagcagacataaaggaaatgggcctgagtttacagtggctgtattctgctcgtggagacttcttccgtgctacttccagactaacaacagatttcgggaatgctgagaaaacagacagatttgtcatgaagaaactcaatgatcgtgtcatgagagtggagtatcacttcctctctccctacgtatctccaaaagagtctcctttccgacatgtcttctggggctccggctctcacacgctgccagctttactggagaacttgaaactgcgtaaacaaaataacggtgcttttaatgaaacgctgttcagaaaccagttggctctagctacttggactattcagggagctgcaaatgccctctctggtgacgtttgggacattgacaatgagttttaaatgtgatacccatagcttccatgagaacagcagggtagtctggtttctagacttgtgctgatcgtgctaaattttcagtagggctacaaaacctgatgttaaaattccatcccatcatcttggtactactagatgtctttaggcagcagcttttaatacagggtagataacctgtacttcaagttaaagtgaataaccacttaaaaaatgtccatgatggaatattcccctatctctagaattttaagtgctttgtaatgggaactgcctctttcctgttgttgttaatgaaaatgtcagaaaccagttatgtgaatgatctctctgaatcctaagggctggtctctgctgaaggttgtaagtggtcgcttactttgagtgatcctccaacttcatttgatgctaaataggagataccaggttgaaagaccttctccaaatgagatctaagcctttccataaggaatgtagctggtttcctcattcctgaaagaaacagttaactttcagaagagatgggcttgttttcttgccaatgaggtctgaaatggaggtccttctgctggataaaatgaggttcaactgttgattgcaggaataaggccttaatatgttaacctcagtgtcatttatgaaaagaggggaccagaagccaaagacttagtatattttcttttcctctgtcccttcccccataagcctccatttagttctttgttatttttgtttcttccaaagcacattgaaagagaaccagtttcaggtgtttagttgcagactcagtttgtcagactttaaagaataatatgctgccaaattttggccaaagtgttaatcttaggggagagctttctgtccttttggcactgagatatttattgtttatttatcagtgacagagttcactataaatggtgtttttttaatagaatataattatcggaagcagtgccttccataattatgacagttatactgtcggttttttttaaataaaagcagcatctgctaataaaacccaacagatactggaagttttgcatttatggtcaacacttaagggttttagaaaacagccgtcagccaaatgtaattgaataaagttgaagctaagatttagagatgaattaaatttaattaggggttgctaagaagcgagcactgaccagataagaatgctggttttcctaaatgcagtgaattgtgaccaagttataaatcaatgtcacttaaaggctgtggtagtactcctgcaaaattttatagctcagtttatccaaggtgtaactctaattcccattttgcaaaatttccagtacctttgtcacaatcctaacacattatcgggagcagtatcttccataatgtataaagaacaaggtagtttttacctaccacagtgtctgtatcggagacagtgatctccatatgttacactaagggtgtaagtaattatcgggaacagtgtttcccataattttcttcatgcaatgacatcttcaaagcttgaagatcgttagtatctaacatgtatcccaactcctataattccctatcttttagttttagttgcagaaacattttgtggtcattaagcattgggtgggtaaattcaaccactgtaaaatgaaattactacaaaatttgaaatttagcttgggtttttgttacctttatggtttctccaggtcctctacttaatgagatagtagcatacatttataatgtttgctattgacaagtcattttaactttatcacattatttgcatgttacctcctataaacttagtgcggacaagttttaatccagaattgaccttttgacttaaagcagagggactttgtatagaaggtttgggggctgtggggaaggagagtcccctgaaggtctgacacgtctgcctacccattcgtggtgatcaattaaatgtaggtatgaataagttcgaagctccgtgagtgaaccatcattataaacgtgatgatcagctgtttgtcatagggcagttggaaacggcctcctagggaaaagttcatagggtctcttcaggttcttagtgtcacttacctagatttacagcctcacttgaatgtgtcactactcacagtctctttaatcttcagttttatctttaatctcctcttttatcttggactgacatttagcgtagctaagtgaaaaggtcatagctgagattcctggttcgggtgttacgcacacgtacttaaatgaaagcatgtggcatgttcatcgtataacacaatatgaatacagggcatgcattttgcagcagtgagtctcttcagaaaacccttttctacagttagggttgagttacttcctatcaagccagtacgtgctaacaggctcaatattcctgaatgaaatatcagactagtgacaagctcctggtcttgagatgtcttctcgttaaggagatgggccttttggaggtaaaggataaaatgaatgagttctgtcatgattcactattctagaacttgcatgacctttactgtgttagctctttgaatgttcttgaaattttagactttctttgtaaacaaatgatatgtccttatcattgtataaaagctgttatgtgcaacagtgtggagattccttgtctgatttaataaaatacttaaacactgaaaaaaaaaaaaaaaaaaaaaaaaaaaaaaaaaaaaaaaaaaaaaaaaaaaaaaaaaaaaaaaaaaaaaaaaaaaaaaaaagtaccttctgaggcggaaagaaccagccggatctcgacttcgagcttatttatattccaaaaaaaaaaaataaaatttcaatttttaagctttcactaattccaaacccacccgctttttatagtaagtttttcacccataaataataaatacaataattaatttctcgtaaaagtagaaaatatattctaatttattgcacggtaaggaagtagatcataactcgagcatgggagatcccgtcgttttacaacgtcgtgactgggaaaaccctggcgttacccaacttaatcgccttgcagcacatccccctttcgccagctggcgtaatagcgaagaggcccgcaccgatcgcccttcccaacagttgcgcagcctgaatggcgaatggcgctttgcctggtttccggcaccagaagcggtgccggaaagctggctggagtgcgatcttcctgaggccgatactgtcgtcgtcccctcaaactggcagatgcacggttacgatgcgcccatctacaccaacgtgacctatcccattacggtcaatccgccgtttgttcccacggagaatccgacgggttgttactcgctcacatttaatgttgatgaaagctggctacaggaaggccagacgcgaattatttttgatggcgttaactcggcgtttcatctgtggtgcaacgggcgctgggtcggttacggccaggacagtcgtttgccgtctgaatttgacctgagcgcatttttacgcgccggagaaaaccgcctcgcggtgatggtgctgcgctggagtgacggcagttatctggaagatcaggatatgtggcggatgagcggcattttccgtgacgtctcgttgctgcataaaccgactacacaaatcagcgatttccatgttgccactcgctttaatgatgatttcagccgcgctgtactggaggctgaagttcagatgtgcggcgagttgcgtgactacctacgggtaacagtttctttatggcagggtgaaacgcaggtcgccagcggcaccgcgcctttcggcggtgaaattatcgatgagcgtggtggttatgccgatcgcgtcacactacgtctgaacgtcgaaaacccgaaactgtggagcgccgaaatcccgaatctctatcgtgcggtggttgaactgcacaccgccgacggcacgctgattgaagcagaagcctgcgatgtcggtttccgcgaggtgcggattgaaaatggtctgctgctgctgaacggcaagccgttgctgattcgaggcgttaaccgtcacgagcatcatcctctgcatggtcaggtcatggatgagcagacgatggtgcaggatatcctgctgatgaagcagaacaactttaacgccgtgcgctgttcgcattatccgaaccatccgctgtggtacacgctgtgcgaccgctacggcctgtatgtggtggatgaagccaatattgaaacccacggcatggtgccaatgaatcgtctgaccgatgatccgcgctggctaccggcgatgagcgaacgcgtaacgcgaatggtgcagcgcgatcgtaatcacccgagtgtgatcatctggtcgctggggaatgaatcaggccacggcgctaatcacgacgcgctgtatcgctggatcaaatctgtcgatccttcccgcccggtgcagtatgaaggcggcggagccgacaccacggccaccgatattatttgcccgatgtacgcgcgcgtggatgaagaccagcccttcccggctgtgccgaaatggtccatcaaaaaatggctttcgctacctggagagacgcgcccgctgatcctttgcgaatacgcccacgcgatgggtaacagtcttggcggtttcgctaaatactggcaggcgtttcgtcagtatccccgtttacagggcggcttcgtctgggactgggtggatcagtcgctgattaaatatgatgaaaacggcaacccgtggtcggcttacggcggtgattttggcgatacgccgaacgatcgccagttctgtatgaacggtctggtctttgccgaccgcacgccgcatccagcgctgacggaagcaaaacaccagcagcagtttttccagttccgtttatccgggcaaaccatcgaagtgaccagcgaatacctgttccgtcatagcgataacgagctcctgcactggatggtggcgctggatggtaagccgctggcaagcggtgaagtgcctctggatgtcgctccacaaggtaaacagttgattgaactgcctgaactaccgcagccggagagcgccgggcaactctggctcacagtacgcgtagtgcaaccgaacgcgaccgcatggtcagaagccgggcacatcagcgcctggcagcagtggcgtctggcggaaaacctcagtgtgacgctccccgccgcgtcccacgccatcccgcatctgaccaccagcgaaatggatttttgcatcgagctgggtaataagcgttggcaatttaaccgccagtcaggctttctttcacagatgtggattggcgataaaaaacaactgctgacgccgctgcgcgatcagttcacccgtgcaccgctggataacgacattggcgtaagtgaagcgacccgcattgaccctaacgcctgggtcgaacgctggaaggcggcgggccattaccaggccgaagcagcgttgttgcagtgcacggcagatacacttgctgatgcggtgctgattacgaccgctcacgcgtggcagcatcaggggaaaaccttatttatcagccggaaaacctaccggattgatggtagtggtcaaatggcgattaccgttgatgttgaagtggcgagcgatacaccgcatccggcgcggattggcctgaactgccagctggcgcaggtagcagagcgggtaaactggctcggattagggccgcaagaaaactatcccgaccgccttactgccgcctgttttgaccgctgggatctgccattgtcagacatgtataccccgtacgtcttcccgagcgaaaacggtctgcgctgcgggacgcgcgaattgaattatggcccacaccagtggcgcggcgacttccagttcaacatcagccgctacagtcaacagcaactgatggaaaccagccatcgccatctgctgcacgcggaagaaggcacatggctgaatatcgacggtttccatatggggattggtggcgacgactcctggagcccgtcagtatcggcggaattccagctgagcgccggtcgctaccattaccagttggtctggtgtcaaaaataataataaccgggcaggggggatccaattctgtgagcgtatggcaaacgaaggaaaaatagttatagtagccgcactcgatgggacatttcaacgtaaaccgtttaataatattttgaatcttattccattatctgaaatggtggtaaaactaactgctgtgtgtatgaaatgctttaaggaggcttccttttctaaacgattgggtgaggaaaccgagatagaaataataggaggtaatgatatgtatcaatcggtgtgtagaaagtgttacatcgactcataatattatattttttatctaaaaaactaaaaataaacattgattaaattttaatataatacttaaaaatggatgttgtgtcgttagataaaccgtttatgtattttgaggaaattgataatgagttagattacgaaccagaaagtgcaaatgaggtcgcaaaaaaactgccgtatcaaggacagttaaaactattactaggagaattattttttcttagtaagttacagcgacacggtatattagatggtgccaccgtagtgtatataggatctgctcccggtacacatatacgttatttgagagatcatttctataatttaggagtgatcatcaaatggatgctaattgacggccgccatcatgatcctattttaaatggattgcgtgatgtgactctagtgactcggttcgttgatgaggaatatctacgatccatcaaaaaacaactgcatccttctaagattattttaatttctgatgtgagatccaaacgaggaggaaatgaacctagtacggcggatttactaagtaattacgctctacaaaatgtcatgattagtattttaaaccccgtggcgtctagtcttaaatggagatgcccgtttccagatcaatggatcaaggacttttatatcccacacggtaataaaatgttacaaccttttgctccttcatattcagctgaaatgagattattaagtatttataccggtgagaacatgagactgactcgagttaccaaattagacgctgtaaattatgaaaaaaagatgtactaccttaataagatcgtccgtaacaaagtagttgttaactttgattatcctaatcaggaatatgactattttcacatgtactttatgctgaggaccgtgtactgcaataaaacatttcctactactaaagcaaaggtactatttctacaacaatctatatttcgtttcttaaatattccaacaacatcaactgaaaaagttagtcatgaaccaatacaacgtaaaatatctagcaaaaattctatgtctaaaaacagaaatagcaagagatccgtacgcggtaataaatagaaacgtactactgagatatactaccgatatagagtataatgatttagttactttaataaccgttagacataaaattgattctatgaaaactgtgtttcaggtatttaacgaatcatccataaattatactccggttgatgatgattatggagaaccaatcattataacatcgtatcttcaaaaaggtcataacaagtttcctgtaaattttctatacatagatgtggtaatatctgacttatttcctagctttgttagactagatactacagaaactaatatagttaatagtgtactacaaacaggcgatggtaaaaagactcttcgtcttcccaaaatgttagagacggaaatagttgtcaagattctctatcgccctaatataccattaaaaattgttagatttttccgcaataacatggtaactggagtagagatagccgatagatctgttatttcagtcgctgattaatcaattagtagagatgagataagaacattataataatcaataatatatcttatatcttatatcttatatcttatatcttgtttagaaaaatgctaatattaaaatagctaacgctagtaatccaatcggaagccatttgatatctataatagggtatctaatttcctgatttaaatagcggacagctatattctcggtagctactcgtttggaatcacaaacattatttacatctaatttactatctgtaatggaaacgtttcccaatgaaatggtacaatccgatacattgcattttgttatatttttttttaaagaggctggtaacaacgcatcgcttcgtttacatggctcgtaccaacaataatagggtaatcttgtatctattcctatccgtactatgcttttatcaggataaatacatttacatcgtatatcgtctttgttagcatcacagaatgcataaatttgttcgtccgtcatgataaaaatttaaagtgtaaatataactattatttttatagttgtaataaaaagggaaatttgattgtatactttcggttctttaaaagaaactgacttgataaaaatggctgtaatctctaaggttacgtatagtctatatgatcaaaaagagattaatgctacagatattatcattagtcatgttaaaaatgacgacgatatcggtaccgttaaagatggtagactaggtgctatggatggggcattatgtaagacttgtgggaaaacggaattggaatgtttcggtcactggggtaaagtaagtatttataaaactcatatagttaagcctgaatttatttcagaaattattcgtttactgaatcatatatgtattcactgcggattattgcgttcacgagaaccgtattccgacgatattaacctaaaagagttatcgggacacgctcttaggagattaaaggataaaatattatccaagaaaaagtcatgttggaacagtgaatgtatgcaaccgtatcaaaaaattactttttcaaagaaaaaggtttgtttcgtcaacaagttggatgatattaacgttcctaattctctcatctatcaaaagttaatttctattcatgaaaagttttggccattattagaaattcatcaatatccagctaacttattttatacagactactttcccatccctccgttgattattagaccggctattagtttttggatagatagtatacccaaagagaccaatgaattaacttacttattaggtatgatcgttaagaattgtaacttgaatgctgatgaacaggttatccagaaggcggtaatagaatacgatgatattaaaattatttctaataacactaccagtatcaatttatcatatattacatccggcaaaaataatatgattagaagttatatcgtcgcccgacgaaaagatcagaccgctagatctgtaattggtcccagtacatctatcaccgttaatgaggtaggaatgcccgcatatattagaaatacacttacagaaaagatatttgttaatgcctttacagtggataaagttaaacaactattagcgtcaaaccaagttaaattttactttaataaacgattaaaccaattaacaagaatacgccaaggaaagtttattaaaaataaaatacatttattgcctggtgattgggtagaagtagctgttcaagaatatacaagtattatttttggaagacagccgtctctacatagatacaacgtcatcgcttcatctatcagagctaccgaaggagatactatcaaaatatctcccggaattgccaactctcaaaatgctgatttcgacggggatgaggaatggatgatattagaacaaaatcctaaagctgtaattgaacaaagtattcttatgtatccgacgacgttactcaaacacgatattcatggagcccccgtttatggatctattcaagatgaaatcgtagcagcgtattcattgtttaggatacaagatctttgtttagatgaagtattgaacatcttggggaaatatggaagagagttcgatcctaaaggtaaatgtaaattcagcggtaaagatatctatacttacttgataggtgaaaagattaattatccgggtctcttaaaggatggtgaaattattgcaaacgacgtagatagtaattttgttgtggctatgaggcatctgtcattggctggactcttatccgatcataagtcgaacgtggaaggtatcaactttattatcaagtcatcttatgtttttaagagatatctatctatttacggttttggggtgacattcaaagatctgagaccaaattcgacgttcactaataaattggaggccatcaacgtagaaaaaatagaacttatcaaagaagcatacgccaaatatctcaacgatgtaagagacgggaaaatagttccattatctaaagctttagaggcggactatgtggaatccatgttatccaacttgacaaatcttaatatccgagagatagaagaacatatgagacaaacgctgatagatgatccagataataacctcctgaaaatggccaaagcgggttataaagtaaatcccacagaactaatgtatattctaggtacgtatggacaacaaaggattgatggtgaaccagcagagactcgagtattgggtagagttttaccttactatcttccagactctaaggatccagaaggaagaggttacattcttaattctttaacaaaaggattaacgggttctcaatattacttttcgatgctggttgccagatctcaatctactgatatcgtctgtgaaacatcacgtaccggaacactggctagaaaaatcattaaaaagatggaggatatggtggtcgacggatacggacaagtagttataggtaatacgctcatcaagtacgccgccaattataccaaaattctaggctcagtatgtaaacctgtagatcttatctatccagatgagtccatgacttggtatttggaaattagtgctctgtggaataaaataaaacagggattcgtttactctcagaaacagaaacttgcaaagaagacattggcgccgtttaatttcctagtattcgtcaaacccaccactgaggataatgctattaaggttaaggatctgtacgatatgattcataacgtcattgatgatgtgagagagaaatacttctttacggtatctaatatagattttatggagtatatattcttgacgcatcttaatccttctagaattagaattacaaaagaaacggctatcactatctttgaaaagttctatgaaaaactcaattatactctaggtggtggaactcctattggaattatttctgcacaggtattgtctgagaagtttacacaacaagccctgtccagttttcacactactgaaaaaagtggtgccgtcaaacaaaaacttggtttcaacgagtttaataacttgactaatttgagtaagaataagaccgaaattatcactctggtatccgatgatatctctaaacttcaatctgttaagattaatttcgaatttgtatgtttgggagaattaaatccaaacatcactcttcgaaaagaaacagataaatatgtagtagatataatagtcaatagattatacatcaagagagcagaaataaccgaattagtcgtcgaatatatgattgaacgatttatctcctttagcgtcattgtaaaggaatggggtatggagacattcattgaggacgaggataatattagatttactgtctacctaaatttcgttgaaccggaagaattgaatcttagtaagtttatgatggttcttccgggggcagccaacaagggaaagattagtaaattcaagattcctatctctgattatacgggatatgacgacttcaatcaaacaaaaaagctcaataagatgactgtagaactcatgaatctaaaagaattgggttctttcgatttggaaaacgtcaacgtgtatcctggagtatggaatacatacgatatcttcggtatcgaggccgctcgtgaatacttgtgcgaagccatgttaaacacctatggagaagggttcgattatctgtatcagccttgtgatcttctcgctagtttactatgtgctagttacgaaccagaatcagtgaataaattcaagttcggcgcagctagtactcttaagagagctacgttcggagacaataaagcattgttaaacgcggctcttcataaaaagtcagaacctattaacgataatagtagctgccacttttttagcaaggtccctaatataggaactggatattacaaatactttatcgacttgggtcttctcatgagaatggaaaggaaactatctgataagatatcttctcaaaagatcaaggaaatggaagaaacagaagacttttaattcttatcaataacatatttttctatgatctgtcttttaaacgatggattttccacaaatgcgcctctcaagtccctcatagaatgatacacgtataaaaaatatagcataggcaatgactccttatttttagacattagatatgccaaaatcatagccccgcttctatttactcccgcagcacaatgaaccaacacgggctcgtttcgttgatcacatttagataaaaaggcggttacgtcgtcaaaatatttactaatatcggtagttgtatcatctaccaacggtatatgaataatattaatattagagttaggtaatgtatatttatccatcgtcaaatttaaaacatatttgaacttaacttcagatgatggtgcatccatagcatttttataatttcccaaatacacattattggttacccttgtcattatagtgggagatttggctttgtgcatatctccagttgaacgtagtagtaagtatttatacaaacttttcttatccatttataacgtacaaatggataaaactactttatcggtaaacgcgtgtaatttagaatacgttagagaaaaggctatagtaggcgtacaagcagccaaaacatcaacacttatattctttgttattatattggcaattagtgcgctattactctggtttcagacgtctgataatccagtctttaatgaattaacgagatatatgcgaattaaaaatacggttaacgattggaaatcattaacggatagcaaaacaaaattagaaagtgatagaggtagacttctagccgctggtaaggatgatatatttgaattcaaatgtgtggatttcggcgcctattttatagctatgcgattggataagaaaacatatctgccgcaagctattaggcgaggtactggagacgcgtggatggttaaaaaggcggcaaaggtcgatccatctgctcaacaattttgtcagtatttgataaaacacaagtctaataatgttattacttgtggtaatgagatgttaaatgaattaggttatagcggttattttatgtcaccgcattggtgttccgattttagtaatatggaatagtgttagataaatgcggtaacgaatgttcctgtaaggaaccataacagcttagatttaacgttaaagatgagcataaacataataaacaaaattacaatcaaacttataacattaatatcaaacaatccaaaaaatgaaatcagtggagtagtaaacgcgtacataactcctggataacgtttagcagctgccgttcctattctagaccaaaaattcggtttcatgttttcgaaacggtattctgcaacaagtcgaggatcgtgttctacatatttggcggcattatccagtatctgcctattgatcttcatttcgttttcgattctggctatttcaaaataaaatcccgatgatagacctccagactttataatttcatctacgatgttcagcgccgtagtaactctaataatataggctgataagctaacatcataccctcctgtatatgtgaatatggcatgatttttgtccattacaagctcggttttaactttattgcctgtaataatttctctcatctgtaggatatctatttttttgtcatgcattgccttcaagacgggacgaagaaacgtaatatcctcaataacgttatcgttttctacaataactacatattctacctttttattttctaactcggtaaaaaaattagaatcccatagggctaaatgtctagcgatatttcttttcgtttcctctgtacacatagtgttacaaaaccctgaaaagaagtgagtatacttgtcatcatttctaatgtttcctccagtccactgtataaacgcataatccttgtaatgatctggatcatccttgactaccacaacatttcttttttctggcataacttcgttgtcctttacatcatcgaacttctgatcattaatatgctcatgaacattaggaaatgtttctgatggaggtctatcaataactggcacaacaataacaggagttttcaccgccgccatttagttattgaaattaatcatatacaactctttaatacgagttatattttcgtctatccattgtttcacattgacatatttcgacaaaaagatataaaatgcgtattccaatgcttctctgtttaatgaattactaaaatatacaaacacgtcactgtctggcaataaatgatatcttagaatattgtaacaatttattttgtattgcacatgttcgtgatctatgagttcttcttcgaatggcataggatctccgaatctgaaaacgtataaataggagttagaataataatatttgagagtattggtaatatataaactctttagcggtataattagtttttttctctcaatttctatttttagatgtgatggaaaaatgactaattttgtagcattagtatcatgaactctaatcaaaatcttaatatcttcgtcacacgttagctctttgaagtttttaagagatgcatcagttggttctacagatggagtaggtgcaacaattttttgttctacacatgtatgtactggagccattgttttaactataatggtgcttgtatcgaaaaactttaatgcagatagcggaagctcttcgccgcgactttctacgtcgtaattgggttctaacgccgatctctgaatggatactagttttctaagttctaatgtgattctctgaaaatgtaaatccaattcctccggcattatagatgtgtatacatcggtaaataaaactatagtatccaacgatcccttctcgcaaattctagtcttaaccaaaaaatcgtatataaccacggagatggcgtatttaagagtggattcttctaccgttttgttcttggatgtcatataggaaactataaagtccgcactactgttaagaatgattactaacgcaactatatagtttaaattaagcattttggaaacataaaataactctgtagacgatacttgactttcgaataagtttgcagacaaacgaagaaagaacagacctctcttaatttcagaagaaaactttttttcgtattcctgacgtctagagtttatatcaataagaaagttaagaattagtcggttaatgttgtatttcattacccaagtttgagatttcataatattatcaaaagacatgataatattaaagataaagcgctgactatgaacgaaatagctatatggttcgctcaagaatatagtcttgttaaacgtggaaacgataactgtatttttaatcacgtcagcggcatctaaattaaatataggtatatttattccacacactctacaatatgccacaccatcttcataataaataaattcgttagcaaaattattaattttagtgaaatagttagcgtcaactttcatagcttccttcaatctaatttgatgctcacacggtgcgaattccactctaacatcccttttccatgcctcaggttcatcgatctctataatatctagttttttgcgtttcacaaacacaggctcgtctctcgcgatgagatctgtatagtaactatgtaaatgataactagatagaaagatgtagctatatagatgacgatcctttaagagaggtataataactttaccccaatcagatagactgttgttatggtcttcggaaaaagaatttttataaatttttccagtattttccaaatatacgtacttaacatctaaaaaatccttaatgataataggaatggataatccgtctattttataaagaaatacatatcgcacattatacttttttttggaaatgggaataccgatgtgtctacataaatatgcaaagtctaaatattttttagagaatcttagttggtccaaattcttttccaagtacggtaatagatttttcatattgaacggtatcttcttaatctctggttctagttccgcattaaatgatgaaactaagtcactatttttataactaacgattacatcacctctaacatcatcatttaccagaatactgatcttcttttgtcgtaaatacatgtctaatgtgttaaaaaaaagatcatacaagttatacgtcatttcatctgtggtattcttgtcattgaaggataaactcgtactaatctcttctttaacagcctgttcaaatttatatcctatatacgaaaaaatagcaaccagtgtttgatcatccgcgtcaatattctgttctatcgtagtgtataacaatcgtatatcttcttctgtgatagtcgatacgttataaaggttgataacgaaaatatttttatttcgtgaaataaagtcatcgtaggattttggacttatattcgcgtctagtagatatgcttttatttttggaatgatctcaattagaatagtctctttagagtccatttaaagttacaaacaactaggaaattggtttatgatgtataatttttttagtttttatagattctttattctatacttaaaaaatgaaaataaatacaaaggttcttgagggttgtgttaaattgaaagcgagaaataatcataaattatttcattatcgcgatatccgttaagtttgtatcgtaatggcgtggtcaattacgaataaagcggatactagtagcttcacaaagatggctgaaatcagagctcatctaaaaaatagcgctgaaaataaagataaaaacgaggatattttcccggaagatgtaataattccatctactaagcccaaaaccaaacgagccactactcctcgtaaaccagcggctactaaaagatcaaccaaaaaggaggaagtggaagaagaagtagttatagaggaatatcatcaaacaactgaaaaaaattctccatctcctggagtcagcgacattgtagaaagcgtggccgctgtagagctcgatgatagcgacggggatgatgaacctatggtacaagttgaagctggtaaagtaaatcatagtgctagaagcgatctctctgacctaaaggtggctaccgacaatatcgttaaagatcttaagaaaattattactagaatctctgcagtatcgacggttctagaggatgttcaagcagctggtatctctagacaatttacttctatgactaaagctattacaacactatctgatctagtcaccgagggaaaatctaaagttgttcgtaaaaaagttaaaacttgtaagaagtaaatgcgtgcacttttttataaagatggtaaactctttaccgataataattttttaaatcctgtatcagacgataatccagcgtatgaggttttgcaacatgttaaaattcctactcatttaacagatgtagtagtatatgaacaaacgtgggaggaggcgttaactagattaatttttgtgggaagtgattcaaaaggacgtagacaatacttttacggaaaaatgcatgtacagaatcgcaacgctaaaagagatcgtatttttgttagagtatataacgttatgaaacgaattaattgttttataaacaaaaatataaagaaatcgtccacagattccaattatcagttggcggtttttatgttaatggaaactatgttttttattagatttggtaaaatgaaatatcttaaggagaatgaaacagtagggttattaacactaaaaaataaacacatagaaataagtcccgatgaaatagttatcaagtttgtaggaaaggacaaagtttcacatgaatttgttgttcataagtctaatagactatataaaccgctattgaaactgacggatgattctagtcccgaagaatttctgttcaacaaactaagtgaacgaaaggtatacgaatgtatcaaacagtttggtattagaatcaaggatctccgaacgtatggagtcaattatacgtttttatataatttttggacaaatgtaaagtccatatctcctcttccgtcaccaaaaaagttaatagcattaactatcaaacaaactgctgaagtggtaggtcatactccatcaatttcaaaaagagcttatatggcaacgactattttagaaatggtaaaggataaaaattttttagatgtagtatctaaaactacgttcgatgaattcctatctatagtcgtagatcacgttaaatcatctacggatggatgatatagatctttacacaaataattacaagaccgataaatggaaatggataagcgtatgaaatctctcgcaatgacagctttcttcggagagctaagcacattagatattatggcattgataatgtctatatttaaacgccatccaaacaataccattttttcagtggataaggatggtcagtttatgattgatttcgaatacgataattataaggcttctcaatatttggatctgaccctcactccgatatctggagatgaatgcaagactcacgcatcgagtatagccgaacaattggcgtgtgcggatattattaaagaggatattagcgaatatatcaaaactactccccgtcttaaacgatttataaaaaaataccgcaatagatcagatactcgtatcagtcgagatacagaaaagcttaaaatagctctagctaaaggcatagattacgaatatataaaagacgcttgttaataagtaaatgaaaaaaaactagtcgtttataataaaacacgatatggatgccaacgtagtatcattttctactattgcgacgtatatagacgctttagcgaagaatgcttcggaattagaacagaggtctaccgcatacgaaataaataatgaattggaactagtatttattaagccgccattgattactttgacaaatgtagtgaatatctctacgattcaggaatcgtttattcgatttaccgttactaataaggaaggtgttaaaattagaactaagattccattatctaaggtacatggtctagatgtaaaaaatgtacagttagtagatgctatagataacatagtttgggaaaagaaatcattagtgacggaaaatcgtcttcacaaagaatgcttgttgagactatcgacagaggaacgtcatatatttttggattacaagaaatatggatcctctatccgactagaattagtcaatcttattcaagcaaaaacaaaaaactttacgatagactttaagctaaaatattttctaggatccggtgcccagtctaaaagttctttgttgcacgctattaatcatccaaagtcaaggcctaatacatctctggaaatagaattcacacctagagacaatgaaacagttccatatgatgaactaataaaggaattgacgactctctcgcgtcatatatttatggcttctccagagaatgtaattctttctccgcctattaacgcgcctataaaaacctttatgttgcctaaacaagatatagtaggtttggatctggaaaatctatatgccgtaactaagactgacggcattcctataactatcagagttacatcaaacgggttgtattgttattttacacatcttggttatattattagatatcctgttaagagaataatagattccgaagtagtagtctttggtgaggcagttaaggataagaactggaccgtatatctcattaagctaatagagcctgtgaatgcaatcaatgatagactagaagaaagtaagtatgttgaatctaaactagtggatatttgtgatcggatagtattcaagtcaaagaaatacgaaggtccgtttactacaactagtgaagtcgtcgatatgttatctacatatttaccaaagcaaccagaaggtgttattctgttctattcaaagggacctaaatctaacattgattttaaaattaaaaaggaaaatactatagaccaaactgcaaatgtagtatttaggtacatgtccagtgaaccaattatctttggagaatcgtctatctttgtagagtataagaaatttagcaacgataaaggctttcctaaagaatatggttctggtaagattgtgttatataacggcgttaattatctaaataatatctattgtttggaatatattaatacacataatgaagtgggtattaagtccgtggttgtacctattaagtttatagcagaattcttagttaatggagaaatacttaaacctagaattgataaaaccatgaaatatattaactcagaagattattatggaaatcaacataatatcatagtcgaacatttaagagatcaaagcatcaaaataggagatatctttaacgaggataaactatcggatgtgggacatcaatacgccaataatgataaatttagattaaatccagaagttagttattttacgaataaacgaactagaggaccgttgggaattttatcaaactacgtcaagactcttcttatttctatgtattgttccaaaacatttttagacgattccaacaaacgaaaggtattggcgattgattttggaaacggtgctgacctggaaaaatacttttatggagagattgcgttattggtagcgacggatccggatgctgatgctatagctagaggaaatgaaagatacaacaaattaaactctggaattaaaaccaagtactacaaatttgactacattcaggaaactattcgatccgatacatttgtctctagtgtcagagaagtattctattttggaaagtttaatatcatcgactggcagtttgctatccattattcttttcatccgagacattatgctaccgtcatgaataacttatccgaactaactgcttctggaggcaaggtattaatcactaccatggacggagacaaattatcaaaattaacagataaaaagacttttataattcataagaatttacctagtagcgaaaactatatgtctgtagaaaaaatagctgatgatagaatagtggtatataatccatcaacaatgtctactccaatgactgaatacattatcaaaaagaacgatatagtcagagtgtttaacgaatacggatttgttcttgtagataacgttgatttcgctacaattatagaacgaagtaaaaagtttattaatggcgcatctacaatggaagatagaccgtctacaaaaaactttttcgaactaaatagaggagccattaaatgtgaaggtttagatgtcgaagacttacttagttactatgttgtttatgtcttttctaagcggtaaataataatatggtatgggttctgatctcccagttctaaatgcattaaataattccaatagagcgatttttgttcctataggaccttccaactgtggatactctgtattgttaatagatatattaatacttttgtcgggtaacagaggttctacgtcttctaaaaataaaagttttataacatctggcctgttcataaataaaaacttggcgattctatatatactcttattatcaaatctagccattgtcttatagatgtgagctactgtaggtgtaccatttgattttctttctaatactatatatttctctcgaagaagttcttgcacatcatctgggaataaaatactactgttgagtaaatcagttattttttttatatcgatattgatggacatttttatagttaaggataataagtatcccaaagtcgataacgacgataacgaagtatttatacttttaggaaatcacaatgactttatcagattaaaattaacaaaattaaaggagcatgtatttttttctgaatatattgtgactccagatacatatggatctttatgcgtcgaattaaatgggtctagttttcagcacggcggtagatatatagaggtggaggaatttatagatgctggaagacaagttagatggtgttctacatccaatcatatatctaaagatatacccgaagatatgcacactgataaatttgtcatttatgatatttatacgtttgattcgttcaagaataaacgattggtattcgtacaggtacctccgtcgttaggagatgatagtcatttgactaatccgttattgtcaccgtattatcgtaattcagtagccagacaaatggtcaatgatatgatttttaatcaagattcatttttaaaatatttattagaacatctgattagaagccactatagagtttctaaacatataacaatagttagatacaaggataccgaagaattaaatctaacgagaatatgttataatagagataagtttaaggcgtttgtattcgcttggtttaacggcgtttcggaaaatgaaaaggtactagatacgtataaaaaggtatctaatttgatataatgaattcagtgactgtatcacacgcgccatatactattacttatcacgatgattgggaaccagtaatgagtcaattggtagagttttataacgaagtagccagttggctgctacgagacgagacgtcgcctattcctgataagttctttatacagttgaaacaaccgcttagaaataaacgagtatgtgtgtgtggtatagatccgtatccgaaagatggaactggtgtaccgttcgaatcaccaaattttacaaaaaaatcaattaaggagatagcttcatctatatctagattaaccggagtaattgattataaaggttataaccttaatataatagacggggttataccctggaattattacttaagttgtaaattaggagaaacaaaaagtcacgcgatttactgggataagatttccaagttactgctgcagcatataactaaacacgttagtgttctttattgtttgggtaaaacagatttctcgaatatacgggccaagttagaatccccggtaactaccatagtcggatatcatccagcggctagagaccgccaattcgagaaagatagatcatttgaaattatcaacgttttactggaattagacaacaaggcacctataaattgggctcaagggtttatttattaatgctttagtgaaattttaacttgtgttctaaatggatgcggctattagaggtaatgatgttatctttgttcttaagactataggtgtcccgtcagcgtgcagacaaaatgaagatccaagatttgtagaagcatttaaatgcgacgagttagaaagatatattgagaataatccagaatgtacactattcgaaagtcttagggatgaggaagcatactctatagtcagaattttcatggatgtagatttagacgcgtgtctagacgaaatagattatttaacggccattcaagattttattatcgaggtgtcaaactgtgtagctagattcgcgtttacagaatgcggcgccattcatgaaaatgtaataaaatccatgagatctaatttttcattgactaagtctacaaatagagataaaacaagttttcatattatctttttagatacgtataccactatggatacattgatagctatgaaacgaacactattagaattaagtagatcatctgaaaatccactaaccagatcgatagacactgccgtatataggagaaaaacaactcttcgggttgtaggtactaggaaaaatccaaattgcgacactattcatgtaatgcaaccaccgcatgataatatagaagattacctattcacttacgtggatatgaacaacaatagttattacttttctctacaacaacgattggaggatttagttcctgataagttatgggaaccagggtttatttcattcgaagacgctataaaaagagtttcaaaaatattcattaattctataataaactttaatgatctcgatgaaaataattttacaacggtaccactggtcatagattacgtaacaccttgtgcattatgtaaaaaacgatcgcataaacatccgcatcaactatcgttggaaaatggtgctattagaatttacaaaactggtaatccacatagttgtaaagttaaaattgttccgttggatggtaataaactgtttaatattgcacaaagaattttagacactaactctgttttattaaccgaacgaggagaccatatagtttggattaataattcatggaaatttaacagcgaagaacccttgataacaaaactaattttgtcaataagacatcaactacctaaggaatattcaagcgaattactctgtccaagaaaacgaaagactgtagaagctaacatacgagacatgttagtagattcagtggagaccgatacctatccggataaacttccgtttaaaaatggtgtattggacctggtagacggaatgttttactctggagatgatgctaaaaaatatacgtgtactgtatcaaccggatttaaatttgacgatacaaagttcgtcgaagacagtccagaaatggaagagttaatgaatatcattaacgatatccaaccattaacggatgaaaataagaaaaatagagagctatatgaaaaaacattatctagttgtttatgcggtgctaccaaaggatgtttaacattcttttttggagaaactgcaactggaaagtcgacaaccaaacgtttgttaaagtctgctatcggtgacctgtttgttgagacgggtcaaacaattttaacagatgtattggataaaggacctaatccatttatcgctaacatgcatttgaaaagatctgtattctgtagcgaactacctgattttgcctgtagtggatcaaagaaaattagatctgacaatattaaaaagttgacagaaccttgtgtcattggaagaccgtgtttctccaataaaattaataatagaaaccatgcgacaatcattatcgatactaattacaaacctgtttttgataggatagataacgcattaatgagaagaattgccgtcgtgcgattcagaacacacttttctcaaccttctggtagagaggctgctgaaaataatgacgcgtacgataaagtcaaactattagacgaggggttagatggtaaaatacaaaataatatatatagatttgcatttctatacttgttggtgaaatggtacaaaaaatatcatgttcctattatgaaactatatcctacacccgaagagattcctgactttgcattctatctcaaaataggtactctgttggtatctagctctgtaaagcatattccattaatgacggacctctccaaaaagggatatatattgtacgataatgtggtcactcttccgttgactactttccaacagaaaatatccaagtattttaattctagactatttggacacgatatagagagcttcatcaatagacataagaaatttgccaatgttagtgatgaatatctgcaatatatattcatagaggatatttcatctccgtaaatatatgctcatatatttatagaagatatcacatatctaaatgaataccggaatcatagatttatttgataatcatgttgatagtataccaactatattacctcatcagttagctactctagattatctagttagaactatcatagatgagaacagaagcgtgttattgttccatattatgggatcaggtaaaacaataatcgctttgttgttcgccttggtagcttccagatttaaaaaggtttacattctagtgccgaacatcaacatcttaaaaattttcaattataatatgggtgtagctatgaacttgtttaatgacgaattcatagctgagaatatctttattcattccacaacaagtttttattctcttaattataacgataacgtcattaattataacggattatctcgctacaataactctatttttatcgttgatgaggcacataatatctttgggaataatactggagaacttatgaccgtgataaaaaataaaaacaagattccttttttactattgtctggatctcccattactaacacacctaatactctgggtcatattatagatttaatgtccgaagagacgatagattttggtgaaattattagtcgtggtaagaaagtaattcagacacttcttaacgaacgcggtgtgaatgtacttaaggatttgcttaaaggaagaatatcatattacgaaatgcctgataaagatctaccaacgataagatatcacggacgtaagtttctagatactagagtagtatattgtcacatgtctaaacttcaagagagagattatatgattactagacgacagctatgttatcatgaaatgtttgataaaaatatgtataacgtgtcaatggcagtattgggacaacttaatctgatgaataatttagatactttatttcaggaacaggataaggaattgtacccaaatctgaaaataaataatggcgtgttatacggagaagaattggtaacgttaaacattagttccaaatttaaatactttattaatcggatacagacactcaacggaaaacattttatatacttttctaattctacatatggcggattggtaattaaatatatcatgctcagtaatggatattctgaatataatggttctcagggaactaatccacatatgataaacggcaaaccaaaaacatttgctatcgttactagtaaaatgaaatcgtctttagaggatctattagatgtgtataattctcctgaaaacgatgatggtagtcaattgatgtttttgttttcatcaaacattatgtccgaatcctatactctaaaagaggtaaggcatatttggtttatgactatcccagatactttttctcaatacaaccaaattcttggacgatctattagaaaattctcttacgccgatatttctgaaccagttaatgtatatcttttagccgccgtatattccgatttcaatgacgaagtgacgtcattaaacgattacacacaggatgaattaattaatgttttaccatttgacatcaaaaagctgttgtatctaaaatttaagacgaaagaaacgaatagaatatactctattcttcaagagatgtctgaaacgtattctcttccaccacatccatcaattgtaaaagttttattgggagaattggtcagacaatttttttataataattctcgtattaagtataacgataccaagttacttaaaatggttacatcagttataaaaaataaagaagacgctaggaattacatagatgatattgtaaacggtcacttctttgtatcgaataaagtatttgataaatctcttttatacaaatacgaaaacgatattattacagtaccgtttagactttcctacgaaccatttgtttggggagttaactttcgtaaagaatataacgtggtatcttctccataaaactgatgagatatataaagaaataaatgtcgagctttgttaccaatggatacctttccgttacattggaaccacacgagctgacgttagacataaaaactaatattaggaatgccgtatataagacgtatctccatagagaaattagtggtaaaatggccaagaaaatagaaattcgtgaagacgtggaattacctctcggcgaaatagttaataattctgtagttataaacgttccgtgtgtaataacctacgcgtattatcacgttggggatatagtcagaggaacattaaacatcgaagatgaatcaaatgtaactattcaatgtggagatttaatctgtaaactaagtagagattcgggtactgtatcatttagcgattcaaagtactgcttttttcgaaatggtaatgcgtatgacaatggcagcgaagtcactgccgttctaatggaggctcaacaaggtatcgaatctagttttgtttttctcgcgaatatcgtcgactcataaaaaagagaatagcggtaagtataaacacgaatactatggcaataattgcgaatgttttattctcttcgatatatttttgataatatgaaaaacatgtctctctcaaatcggacaaccatctcataaaatagttctcgcgcgctggagaggtagttgccgctcgtataatctctccagaataatatacttgcgtgtcgtcgttcaatttatacggatttctatagttctctgttatataatgcggtttgccctcatgattagacgacgacaatagtgttctaaatttagatagttgatcagaatgaatgtttattggcgttggaaaaattatccatacagcgtctgcagagtggttgatagttgttcctagatatgtaaaataatccaacttactaggcagcaaattgtctagataaaatactgaatcaaacggtgcagacgtattggcggatctaatggaatccaattgattaactatcttttgaaaatatacatttttatgatccaatacttgtaagaatatagaaataatgataagtccatcatcgtgtttttttgcctcttcataagaactatattttttcttattccaatgaacaagattaatctctccagagtatttgtacacatctatcaagtgattggatccataatcgtcttcctttccccaatatatatgtagtgatgataacacatattcattggggagaaaccctccacttatatatcctcctttaaaattaatccttactagttttccagtgttctggatagtggttggtttcgactcattataatgtatgtctaacggcttcaatcgcgcgttagaaattgcttttttagtttctatattaataggagatagttgttgcggcatagtaaaaatgaaatgataactgtttaaaaatagctcttagtatgggaattacaatggatgaggaagtgatatttgaaactcctagagaattaatatctattaaacgaataaaagatattccaagatcaaaagacacgcatgtgtttgctgcgtgtataacaagtgacggatatccgttaataggagctagaagaacttcattcgcgttccaggcgatattatctcaacaaaattcagattctatctttagagtatccactaaactattacggtttatgtactacaatgaactaagagaaatctttagacggttgagaaaaggttctatcaacaatatcgatcctcactttgaagagttaatattattgggtggtaaactagataaaaaggaatctattaaagattgtttaagaagagaattaaaagaggaaagtgatgaacgtataacagtaaaagaatttggaaatgtaattctaaaacttacaacacgggataaattatttaataaagtatatataagttattgcatggcgtgttttattaatcaatcgttggaggatttatcgcatactagtatttacaatgtagaaattagaaagattaaatcattaaatgattgtattaacgacgataaatacgaatatctgtcttatatttataatatgctagttaatagtaaatgaacttttacagatctagtataattagtcagattattaagtataatagacgactagctaagtctattatttgcgaggatgactctcaaattattacactcacggcattcgttaaccaatgcctatggtgtcataaacgagtatccgtgtccgctattttattaactactgataacaaaatattagtatgtaacagacgagatagttttctctattctgaaataattagaactagaaacatgtttagaaagaaacgattatttctgaattattccaattatttgaacaaacaggaaagaagtatactatcgtcatttttttctctagatccagctactactgataatgatagaatagacgctatttatccgggtggcatacccaaaaggggtgagaatgttccagagtgtttatccagggaaattaaagaagaagttaatatagacaattcttttgtattcatagacactcggttttttattcatggcatcatagaagataccattattaataaattttttgaggtaatcttctttgtcggaagaatatctctaacgagtgatcaaatcattgatacatttaaaagtaatcatgaaatcaaggatctaatatttttagatccgaattcaggtaatggactccaatacgaaattgcaaaatatgctctagatactgcaaaacttaaatgttacggccatagaggatgttattatgaatcattaaaaaaattaactgaggatgattgattaaaaaatataaattaatttaccatcgtgtatttttataacgggattgtccggcatatcatgtagatagttaccgtctacatcgtatactcgaccatctacgcctttaaatcctctatttattgacattaatctattagaattggaataccaaatattagtaccctcaattagtttattggtaatattttttttagacgatagatcgatggctcttgaaaccaaggttttccaaccggactcattgtcgatcggtgagaagtctttttcattagcatgaatccattctaatgatgtatgtttaaacactctaaacaattggacaaattcttttgatttgctttgaatgatttcaaataggtcttcgtctacagtaggcataccattagataatctagccattataaagtgcacgtttacatatctacgttctggaggagtaagaacgtgactattgagacgaatggctcttcctactatctgacgaagagacgcctcgttccatgtcatatctaaaatgaagatatcattaattgagaaaaaactaataccctcgcctccactagaagagaatacgcatgttttaatgcattctccgttagtgtttgattcttggttaaactcagccaccgccttgattctagtatcttttgttctagatgagaactctatattagagataccaaagactttgaaatatagtaataagatttctattcctgactgattaacaaatggttcaaagactagacatttaccatgggatgctaatattcccaaacatacatctataaatttgacgcttttctcttttaattcagtaaatagagagatatcagccgcactagcatcccctttcaatagttctccctttttaaaggtatctaatgcggatttagaaaactctctatctcttaatgaatttttaaaatcattatatagtgttgctatctcttgcgcgtattcgcccggatcacgattttgtctttcaggaaagctatcgaacgtaaacgtagtagccatacgtctcagaattctaaatgatgatatacctgtttttatttcagcgagtttagccttttgataaatttcttcttgctttttcgacatattaacgtatcgcattaatactgttttcttagcgaatgatgcagacccttctacgtcatcaaaaatagaaaactcgttattaactatatacgaacatagtcctcctagtttggagactaattctttttcatcgactagacgtttattctcaaatagcgattggtgttgtaaggatcctggtcgtagtaagttaaccaacatggtgaattcttgcacactattgacgataggtgtagccgataaacaaatcatcttatggttttttaacgcaatggtcttagataaaaaattatatactgaacgagtaggacggatcttaccatcttctttgattaatgatttagaaatgaagttatgacattcatcaataatgacgcatattctactcttggaattaatagttttgatattagtaaaaaatttatttctaaaattttgatcatcgtaattaataaaaatacaatccttcgttatctctggagcgtatctgagtatagtgttcatccaaggatcttctatcaaagcctttttcaccaataagataatagcccaattcgtataaatatccttaagatgtttgagaatatatacagtagtcattgttttaccgacacccgtttcatggaacaataaaagagaatgcatactgtctaatcctaagaaaactcttgctacaaaatgttgataatccttgaggcgtactacgtccgaccccatcatttcaacgggcatattagtagttctgcgtaaggcataatcgatataggccgcgtgtgatttactcatttatgagtgataagtaataactatgttttaaaaatcacagcagtagtttaactagtcttctctgatgtttgttttcgatactttttgaatcagaagtcatactagaataaagcaacgagtgaacgtaatagagagcttcgtatactctattcgaaaactctaagaacttattaatgaattccgtatccactggattgtttaaaatactaaattgaacactgttcacatccttccaagaagaagacttagtgacggacttaacatgagacataaataaatccaaattttttttacaaacatcactagccaccataatggcgctatctttcaaccagctatcgcttacgcattttagcagtctaacatttttaaagagactacaatatattctcatagtatcgattacacctctaccgaataaagttggaagtttaataatacaatatttttcgtttacaaaatcaaataatggtcgaaacacgtcgaaggttaacatcttataatcgctaatgtatagattgttttcagtgagatgattattagatttaatagcatctcgttcacgtttgaacagtttattgcgtgcgctgaggtcggcaactacggcgtccgctttagtactcctcccataatactttacgctattaatctttaaaatttcatagactttatctagatcgctttctggtaacatgatatcatgtgtaaaaagttttaacatgtcggtcggcattctatttagatcattaactctagaaatctgaagaaagtaattagctccgtattccagactaggtaatgggcttttacctagagacagattaagttctggcaatgtttcataaaatggaagaaggacatgcgttccctcccggatattttttacaatttcatccatttacaactctatagtttgttttcattattattagttattatctcccataatcttggtaatacttaccccttgatcgtaagataccttatacaggtcattacatacaactaccaattgtttttgtacataatagattggatggttgacatccatggtggaataaactactcgaacagatagtttatctttccccctagatacattagccgtaatagttgtcggcctaaagaatatctttggtgtaaagttaaaagttagggttcttgttccattattgctttttgtcagtagttcattataaattctcgagatgggtccgttctctgaatatagaacatcatttccaaatctaacttctagtctagaaataatatcggtcttattcttaaaatctattcccttgatgaagggatcgttaatgaacaaatccttggcctttgattcggctgatctattatctccgttatagacgttacgttgactagtccaaagacttacaggaatagatgtatcgatgatgttgatactatgtgatatgtgagcaaagattgttctcttagtggcatcactatatgttccagtaatggcggaaaactttttagaaatgttatatataaaagaattttttcgtgttccaaacattagcagattagtatgaagataaacactcatattatcaggaacattatcaatttttacatacacatcagcatcttgaatagaaacgataccatcttctggaacctctacgatctcggcagactccggataaccagtcggtgggccatcgctaacaataactagatcatccaacaatctactcacatatgcatctatataatctttttcatcttgtgagtaccctggatacgaaataaatttattatccgtatttccataataaggtttagtataaacagagagagatgttgccgcatgaacttcagttacagtcgccgttggttggtttatttgacctattactctcctaggtttctctataaacgatggtttaatttgtacattcttaaccatatatccaataaagctcaattcaggaacataaacaaattctttgttgaacgtttcaaagtcgaacgaagagtcacgaataacgatatcggatactggattgaaggttaccgttacggtaatttttgaatcggatagtttaagactgctgaatgtatcttccacatcaaacggagttttaatataaacgtatactgtagatggttctttaatagtgtcattaggagttaggccaatagaaatatcattaagttcactagaatatccagagtgtttcaaagcaattgtattattgatacaattattatataattcttcgccctcaatttcccaaataacaccgttacacgaagagatagatacgtgattaatacatttatatccaacatatggtacgtaactgaatcttcccatacctttaacttctggaagttccaaactcagaaccaaatgattaagcgcagtaatatactgatccctaatttcgaagctagcgatagcctgattgtctggaccatcgtttgtcataactccggatagagaaatatattgcggcatatacaaagttggaatttgactatcgactgcgaagacattagaccgtttaatagagtcatccccaccgatcaaagaattaatgatagtattattcattttctatttaaaatggaaaaagcttacaataaactccgtagagaaatatctataatttgtgagttttccttaaagtaacagcttccgtaaacgccgtctttatctcttagtaggtttattgtatttatgaccttttccttatcttcatagaatactaaaggcaacaaagaaatttttggttcttctctaagagctacgtgagacttaaccatagaagccaacgaatccctacatattttagaacagaaataccctacttcaccacccttgtatgtctcaatactaataggtctaaaaaccaaatcttgattacaaaaccaacacttatcaattacactatttgtcttaatagacacatctgccatagatttataatactttggtagtatacaagcgagtgcttcttctttagcgggcttaaagactgctttaggtgctgaaataaccacatctggaaggcttactcgcttagccatttaattacggaactatttttttatacttctaatgagcaagtagaaaacctctcatctacaaaaacgtactcgtgtccataatcctctaccatagttacacgttttttagatctcatatgtgctaaaaagttttcccatactaattggttactattatttttcgtataatttttaacagtttgaggttttagatttttagttacagaagtgatatcgaatattttatccaaaaagaatgaataattaattgtcttagaaggagtgttttcttggcaaaagaataccaagtgcttaaatatttctactacttcattaatcttttctgtactcagattcagtttctcatcttttacttgattgattatttcaaagactaacttataatcctttttatttattctctcgttagccttaagaaaactagatacaaaatttgcatctacatcatccgtggatatttgatttttttccatgatatccaagagttccgagataatttctccagaacattgatgagacaataatctccgcaatacatttctcaaatgaataagtttattagacacgtggaagtttgactttttttgtacctttgtacatttttgaaataccgactcgcaaaaaatacaatattcatatccttgttcagatactataccgttatgtctacaaccgctacataatcgtagattcatgttaacactctacgtatctcgtcgtccaatattttatataaaaacattttatttctagacgttgccagaaaatcctgtaatatttttagttttttgggctgtgaataaagtatcgccctaatattgttaccgtcttccgccaatatagtagttaaattatccgcacatgcagaagaacaccgcttaggcggattcagtacaatgttatatttttcgtaccaactcatttaaatatcataatctaaaatagttctgtaatatgtctagcgctaatatattgatcataatcctgtgcataaattaagatacaacaatgtctcgaaatcatcgacatggcttcttccatagttagaagatcgtcgtcaaagttagcaacgtgattcatcaacatttgctgttttgaggcagcaaatactgaaccgtcgccattcaaccattcataaaaaccatcgtctgaatccattgataatttcttgtactggtttttgagagctcgcatcaatctagcatttctagctcccggattgaaaacagaaagaggatcgtacatccagggtccattttctgtaaatagaatcgtataatgtcccttcaagaagatatcagacgatccacaatcaaagaattggtctccgagtttgtaacaaactgcggactttaacctatacatgataccgtttagcataatttctggtgatacgtcaatcggagtatcatctattagagatctaaagccggtgtaacattctccaccaaacatattcttattctgacgtcgttctacataaaacatcattgctccattaacgataacaggggaatgaacagcactacccatcacattagttcccaatggatcaatgtgtgtaactccagaacatcttccatagcctatgttaggaggagcgaacaccactcttccactattgccatcgaatgccatagaataaatatccttggaattgatagaaatcggactgtcggatgttgtgatcatcttcataggattaacaactatgtatggtgccgcctgaagtttcatatcgtaactgatgccgtttataggtctagccacagaaaccaacgtaggtctaaatccaactatagacaaaatagaagccaatatctgttcctcatctgtcataacttgagagcatccagtatgaataatcttcattagatggggatctaccgcatcatcatcgttacaataaaaaattcccattctaatgttcataattgcttttctaatcatggtatgcatgtttgctctctgaatctctgtggaaattagatctgatacacctgtaatcactatcggattatcctccgtaagacgattaaccaacaacatataattataagactttacttttctaaattcataaagttgctggattaggctataggtgtctccatgtacatacgcgttctcgagcgcaggaagtttaataccgaatagtgccatcagaataggatgaatatagtaattagtttctggttttctataaataaaagacaaatcttgtgaactagacatatcggtaaaatgcatggattggaatcgtgtagtcgacagaagaatatgatgattagatggagagtatattttatctaactctttgagttggtcaccgattctaggactagctcgagaatgaataagtactaaaggatgagtacatttcacagaaacactagcattgttcaatgtgctctttacatgggtaaggagttgaaatagctcgtttctatttgttctgacaatatttagtttattcataatgttaagcatatcctgaatagtaaagttagatgtgtcatacttgttagtagttagatatttagcaattgcattcccatcatttctcaatctcgtactccaatcatgcgtggatgctacttcgtcgatggaaaccatacaatcctttttgataggctgttgagattgatcatttcctgcacgtttaggtttggtacgttgatttctagcccctgcggatataaagtcatcgtctacaatttgggacaatgaattgcatacactacaagacaaagatttatcagaagtgtgaatatgatcttcatctaccaaagaaagagtttgattagtataactagattttagtcctgcgttagatgttaaaaaaacatcgctattgaccacggcttccattatttatattcgtagtttttactcgaaagcgtgattttaatatccaatcttattacttttggaatcgttcaaaacctttgactagttgtagaatttgatctattgccctacgcgtatactcccttgcatcatatacgttcgtcaccagatcgtttgtttcggcctgaagttggtgcatatctctttcaacattcgacatgagatccttaagggccatatcgtctagattttgttgagatgctgctcctggatttggattttgttgtgctgttgtacatactgtaccaccagtaggtgtaggagtacatacagtggccacaataggaggttgagaaagtgtaaccgttggagtagtacaagaaatacttccatccgattgttgtgtacatgtagttgttggtaacgtctgagaaggttgggtagatggcggcgtcgtcgttttttgatctttattaaatttagagataatatcctgaacagcattgctcggcgtcaacgctggaaggagtgaactcgccggcgcatcagtatcttcagacagccaatcaaaaagattagacatatcagatgatgtattagtttgttgtcgtggttttggtgtaggagcagtactactaggtagaagaataggagccgatgtagctgttggaaccggctgtggagttatatgaatagttggttgtagcggttggataggctgtctgctggcggccatcatattatctctagctagttgttctcgcaactgtctttgataatacgactcttgagactttagtcctatttcaatcgcttcatcctttttcgtatccggatccttttcttcagaataatagattgacgactttggtgtagaggattctgccagcctctgtgagaacttgttaaagaagtccatttaaggctttaaaattgaattgcgattataagattaaatggcagacacagacgatattatcgactatgaatccgatgatctcaccgaatacgaggatgatgaagaagaggaagaagatggagagtcactagaaactagtgatatagatcccaaatcttcttataagattgtagaatcagcatccactcatatagaagatgcgcattccaatcttaaacatatagggaatcatatatctgctcttaaacgacgctatactagacgtataagtctatttgaaatagcgggtataatagcagaaagctataacttgcttcaacgaggaagattacctctagtttcagaattttctgacgaaacgatgaagcaaaatatgctacatgtaattatacaagagatagaggagggttcttgtcctatagtcatcgaaaagaacggagaattgttgtcggtaaacgattttgacaaagatggtctaaaattccatctagactatattatcaaaatttggaaacttcaaaaacgatattagaatttatacgaatatcgttctctaaatgtcacaatcaagtctcgcatgttcagcaatttattgtcgtactttatatcgtgttcattaacgatatcttgcaaaatagtaatgattctatcttccttcgatagatattcttcagagattattgtcttatattctttcttgttatcagatatgaatttgataagactttgaacattattgatacccgtctgtttaattttttctacagatattttagttttggcagattctatcgtatctgtcaatagacatccaacatcgacattcgacgtcaattgtctataaatcaacgtataaattttagaaataacattagcgaattgttgtgcgttgatgtcgttattctgaaacagtatgattttaggtagcattttcttaacaaagagaacgtatttattgttactcagttgaacagatgatatatccagattactaacgcatctgattccgtataccaaactttcagaagaaatggtatacaattgtttgtattcattcaatgtctctttttcagaaattagtttagagtcgaatactgcaataattttcaagagatagttttcatcagataagattttatttagtgtagatatgataaaactattgttttgttggagaacttgatacgccgcgttctctgtagtcgacgctctcaaatgggaaacaatctccattatttttttggaatcggatactatatcttcggtatcttgacgcagtctagtatacatagagttaagagagattagagtttgtacattaagcaacatgtctctaaatgtggctacaaacttttcctttttcacatcatctagtttattatataccgatttcacaacggcaccagatttaaggaaccagaatgaaaaactctgataactacaatatttcatcatagttacgattttatcatcttctatagttggtgtaatagcgcatacctttttctccaagactggaaccaacgtcataaaaatgtttaaatcaaaatccatatcaacatctgatgcgctaagaccagtctcgcgttcaagattatctttactaatggtgacgaactcatcgtataaaactctaagtttgtccattatttatttacagatttagttgtttaatttatttgtgctcttccagagttgggatagtatttttctaacgtcggtattatattattaggatctacgttcatatgtatcataatattaatcatccacgttttgataaatctatctttagcttctgaaataacgtatttaaacaaaggagaaaaatatttagctacggcatcagacgcaataacattttttgtaaatgtaacgtatttagacgacagatcttcgttaaaaagttttccatctatgtagaatccatcggttgttaacaccattcccgcgtcagattgaataggagtttgaatagtttgttttggaaatagatccttcaataacttatagttgggtgggaaaaaatcgattttatcactagactctttcttttttactatcattacctcatgaactatttcttgaatgagtatatgtattttctttcctatatcggacgcgttcattggaaaatataccatgtcgttaactataagaatatttttatcctcgtttacaaactgaataatatcagatgtagttcgtaaacgaactatatcatcaccagcacaacatctaactatatgatatccactagtttcctttagccgtttattatcttgttccatattagcagtcattccatcatttaagaaggcgtcaaaaataatagggagaaatgacattttggattctgttacaactttaccaaaattaaggatatacggacttactatctttttctcaacgtcaatttgatgaacacacgatgaaaatgtgcttctatgagattgatcatgtagaaaacaacaagggatacaatatttccgcatatcatgaaatatattaagaaatcccaccttattatatttccccaaaggatccatgcacgtaaacattatgccgttatcattaataaagacttctttctcatcggatctgtaaaagttgttactgatttttttcattccaggatctagataattaataatgatgggttttctattcttattctttgtattttggcatatcctagaccagtaaacagtttccactttggtaaaatcagcagacttttgaacgctattaaacatggcattaatggcaataactaaaaatgtaaaatatttttctatgttaggaatatggtttttcactttaatagatatatggtttttggccaaaatgatagatatttttttatccgaggatagtaaaatattattagtcgccgtctctataaaaatgaagctagtctcgatatccaattttattctagaattgataggagtcgccaaatgtaccttatacgttatatctcccttgatgcgttccatttgtgtatctatatcggacacaagatctgtaaatagttttacgttattaatcatcacggtatcgccgtcgctagataacgctaatgtaccatccaagtcccaaatggagagatttaactgttcatcgtttagaataaaatgattaccggtcatattaataaagtgttcatcgtatctagataacaacgacttataattaatgtccaagtcttgaactcgctgaatgatcttttttaacccagttagttttagattggtacgaaatatattgttaaactttgattctacagtaatgtccaaatctagttgtggaaatacttccatcaacattgtttcaaacttgataatattattatctacatcttcgtacgatccaaattccggaatagatgtatcgcacgctctggccacccagataaccaaaaagtcacacgctccaggatatacattgtataaaaagctatcgttttttagtagggtttttttctgcgtgtatacgaagggattaaaaatagtattatcaacgtaactatattccaaattattcttatgagaatagataataatatcgtccttaatatctaacaaatttcctaaatatccctttaattgagtcattcgaagcgtcaatagaatatgtctcttaactatttccggctgttgtatatttaaatgacttcgtaaaaaataatatatgggcgacttctcatctatgtaatcatatggagtgagatatagggctcgttctacctcctgccccttacccacctgtaataccaattgcggacttactatatatcgcatatttatatcgtggggtaaagtgaaaatctactaccgatgatgtaagtcttacaatgttcgaaccagtaccagatcttaatttggaggcctccgtagaactaggggaggtaaatatagatcaaacaacacctatgataaaggagaatagcggttttatatcccgcagtagacgtctattcgcccatagatctaaggatgatgagagaaaactagcactacgattctttttacaaagactttattttttagatcatagagagattcattatttgttcagatgcgttgacgctgtaaaagacgtcactattaccaaaaaaaataacattatcgtggcgccttatatagcacttttaactatcgcatcaaaaggatgcaaacttacagaaacaatgattgaagcattctttccagaactatataatgaacatagtaagaaatttaaattcaactctcaagtatccatcatccaagaaaaactcggataccagtttggaaactatcacgtttatgattttgaaccgtattactctacagtagctctggctattcgagatgaacattcatctggcatttttaatatccgtcaagagagttatctggtaagttcattatctgaaataacatatagattttatctaattaatctaaaatctgatcttgttcaatggagtgctagtacgggcgctgtaattaatcaaatggtaaatactgtattgattacagtgtatgaaaagttacaactggtcatagaaaatgattcacaatttacatgttcattggctgtggaatcaaaacttccaataaaattacttaaagatagaaatgaattatttacaaaattcattaacgagttaaaaaagaccagttcattcaagataagcaaacgcgataaggatacgctactaaaatattttacttaggactggagttagaatttatagacgactcatttcgtttatcattgttactattattactattactatcattattagtgttggcattattagtattcttcttgtcatcttgttcagaaatatacagcaatgctatacctaatactaaatacattatcatgctcgcaatggctctaacaacaacgaaccaaaatgaatttggtcgtagcttttgttcacaaaaatacataaagaaatgtctacataaatctatggcgccattggctacttgaaatagcgccagtcctcctacagattttaatatagctgtataacatgacatttattcatcatcaaaagagacagagtcaccatctgtcatatttagattttttttcatgtgttcaaagtatcctctactcatttcattataatagtttatcatacttagaattttaggacggatcaatgagtaagacttgactagatcgtcagtagtaatttgtgcatcgtctattctgcatccgcttcgtcgaataatgtatagcatcgctttgagattctccatagctatcaagtctttatacaatgacatggaaatatctgtgaatactttatacttctccaacatcgatgccttaacatcatcgcctactttagcattgaaaatacgttctattgtgtagatggatgtagcaagatttttaaacaacaatgccatcttacacgatgattgcctcaagtctccaatcgtttgtttagaacgattagctacagagtccaatgcttggctgactagcatattattatctttagaaattgtattcttcaatgaggcgtttatcatatctgtgatttcgttagtcatattacagtctgactgggttgtaatgttatccaacatatcacctatggatacggtacacgtaccagcatttgtaataatcctatctaagatgttgtatggcattgcgcagaaaatatcttctcctgtaatatctccactctcgataaatctactcagattattcttaaatgccttattctctggagaaaagatatcagtgtccatcatttcattaatagtatacgcagaaaagataccacgagtatcaattctatccaagatacttatcggttccgagtcacagataatggtttcctctccttcgggagatcctgcatagaaatatctaggacaatagtttctatactgtctgtaactctgataatctctaaagtcactaactgataccatgaaattgagaagatcaaacgctgaagtaattaatttttctgcctcgtttttactacaactagttttcatcaatgtagtgacgatgtattgtttagttacttttggtctaatactgatgatagagatattattgcttcccataatggatcttctagtagtcaccttaaagcccattgatgcgaatagcagatagataaagtcttggtatgactcctttctaatatagtacggactacctttgtcacccaactttatacccacataagccataacaacctctttaatagccgtttcatgaggtttatcagccatgagcctgagtagttggaagaatctcatgaatcccgtctcagaaagtcctatatgcatgatagatttatctttcctgggaaactctcgtatagtcatagatgaaatactctttaaagtttctgaaataagattagtaacagtcttacctccgactactctaggtaacaaacaaactctaataggtgttttctctgcggagataatatcagaaaggatagagcaataagtagtattattgtgattataaagaccgaatacataacaggtagaatttataaacatcatgtcctgaaggtttttagacttgtattcctcgtaatccataccgtcccaaaacatggatttggtaactttgatagccgtagatctttgttccttcgccaacaggttaaagaaattaataaagaatttgttgtttctatttatgtccacaaattgcacgtttggaagcgccacggttacattcactgcagcattttgaggatcgcgagtatgaagtacgatgttattgtttactggtatatctggaaagaaatctaccagtctaggaataagagattgatatcgcatagaaatagtaaagtttataatctcatcatcgaagagcattttgttaccattgtaataaatatccactctgtcatatgtataaatgaagtactgttcaaacatgatgagatgtttatatgttggcatagtagtgagatcgacgtttggtaatggcaatgtattaagattaactccataatgtctagcagcatctgcgatgttataagcgtcgtcaaagcggggtcgatcttgtattgttatatattgtctaacacctataagattatcaaaatcttgtctgcttaatacaccgttaacaatttttgccttgaattcttttattggtgcattaataacatccttatagaggatgttaaacaaataagtgttatcaaagttaagatctggatatttcttttctgctagaacatccattgagtcggagccatctggtttaatataaccaccgataaatctagctctgtattctgtatccgtcaatctaatattaagaaggtgttgagtgaaaggtggaagatcgtaaaagctgtgagtattaatgataggattagtttccgaactaatgttaattggggtattaataatatctatatttccagcgttaagtgtaacattaaacagttttaattcacgtgacgtggtatcaattaaataattaatgcccaatttggatatagcagcctgaagctcatcttgtttagttacggatcctaatgagttattaagcaatatatcgaacggatgaacgaaggttgttttaagttggtcacatactttgtaatctagacatagatgcggaagaacggtagaaactatacgaaataaatattcagagtcctctaattgatcaagagtaactattgacttaataggcatcatttatttagtattaaatgacgaccgtaccagtgacggatatacaaaacgatttaattacagagttttcagaagataattatccatctaacaaaaattatgaaataactcttcgtcaaatgtctattctaactcacgttaacaacgtggtagatagagaacataatgccgccgtagtgtcatctccagaggaaatatcctcacaacttaatgaagatctatttccagatgatgattcaccggccactattatcgaacgagtacaacctcatactactattattgacgatactccacctcctacgtttcgtagagagttattaatatcggaacaacgtcaacaacgagaaaaaagatttaatattacagtatcgaaaaatgctgaagcaataatggaatctagatctatgataacttctatgccaacacaaacaccatccttgggagtagtttatgataaagataaaagaattcagatgttagaggatgaagtggttaatcttagaaatcaacgatctaatacaaaatcatctgataatttagataattttaccaaaatactatttggtaagactccgtacaaatcaacagaagttaataagcgtatagccatcgttaattatgcaaatttgaacgggtcccccttatcagtcgaggacttggatgtttgttcggaggatgaaatagatagaatctataaaacgattaaacaatatcacgaaagtagaaaacgaaaaattatcgtcactaacgtgattattattgtcataaacattatcgagcaggcattgctaaaactcggatttgaagaaatcaaaggactgagtaccgatatcacttcagaaattatcgatgtggagatcggagatgactgcgatgctgtagcatctaaactaggaatcggtaacagtccggttcttaatattgtattgtttatactcaagatattcgttaaacgaattaaaattatttaatttaatacattcccatatccagacaacaatcgtctggattaatctgttcctgtcgtctcataccggacgacatattaatctttttattagtgggcatctttttagatggtttctttttcccagcattaactgagtcgatacctagaagatcgtgattgatctctccgaccattccacgaacttctaattggccgtctctgacggtaccataaactattttaccagcattagtaacagcttggacaatctgaccatccatcgcattgtacgatgtagtagtaactgttgttctacgtctaggagcaccagaagtatttttggagcccttggatgttgatgtagaagaagacgaggattttgattttggtttacatgtaatacattttgaactctttgattttgtatcacatgcgccggcagtcacatctgtttgagaattaagattattgttgcctcctttgacggctgcatctccaccgatttgcgctagtagatttttaagctgtggtgtaatcttattaactgtttcgatataatcatcgtaactgcttctaacggctaaattttttttatccgccatttagaagctaaaaatatttttatttatgcagaagatttaactagattatacaatgaactaatatgatccttttccagattatttacaaacttggtattttttggttctggaggaggcgaatttaaattcggacttggattcggattttgtaagttcttgatcttattatacatcgagtataggatggcgacagtaactgctacacaaataccgatcaaaagaagaataccaatcatttattgacaataacttcactattgatcaagtatgcaatatatcatcttttcactaaataagtagtaataatgattcaacaatgtcgagatatatggacgataataatttagttcatggaaatatcgctatgattggtgtgaatgactccgctaactctgtggggtgcgcagtgctttccccacatagaataaattagcattccgactgtgataataataccaagtataaacgccataatactcaatactttccatgtacgagtgggactggtagacttactaaagtcaataaaggcgaagatacacgaaagaatcaaaagaatgattccagcgattagcacgccggaaaaataatttccaatcataagcatcatgtccatttaactaataaaaattttaaatcgccgaatgaacaaagtggaatataaaccatataaaaacaatagtttgtactgcaaaaataatatctatttttgttttcgaagatatggtaaaattaaatagtagtacacagcatgttataactaacagcagcaacggctcgtaattacttatcatttactagacgaaaaggtggtgggatattttcttgctcaaataatacgaatatatcacccatccattttatgcgatgtttatatactctaatctttaatagatctatagacgacgggtttaccaacaatatagattttatcgattcatctaatttaaacccttccttaaacgtgaatgatctattatctggcataacgatgaccctacctgatgaatcggacaatgtactgggccatgtagaataaattatcaacgaattatcgtctacgaacatttatatcatttgttttaattttaggacgcgaataaatggatataaaatagaaaataacagatattacaaccagtgttatggccgcgcccaaccaggtaggcagttttattttatcttttactacaggttctcctggatgtacgtcaccaacggcggacgtagttctagtacaattagacgtaagttccgcttgggaattttttaacgctaaagagttaacgttaatcgtgcacccaacgtatttacatctagttcgttgaacatcttgattataatataaccattttctatctctagattcgtcagtgcactcatgtaaccaacataccctaggtcctaaatatttatctccggaattagattttggataattcgcgcaccaacaatttctatttcctttatgatcgttacaaaagacgtataatgccgtatccccaaaagtaaaataatcaggacgaataattctaataaactcagaacaatatctcgcatccatatgtttggagcaaatatcggaataagtagacatagccggtttccgttttgcacgtaaccattctaaacaattggggtttccaggatcgtttctacaaaatccagtcatgaaatcgtcacaatgttctgtcttgtaattattattaaatatttttggacagtgtttggtatttgtcttagaacaacattttgccacgctatcactatcgcccaggagataatccttttttataaaatgacatcgttgcccggatgctatataatcagtagcgtgttttaaatccttaatatattcaggagttacctcgttctgataatagattaatgatccaggacgaaatttgaaagaactacatggttctccatgaattaatacatattgtttagcaaattcaggaactataaaactactacaatgatctatcgacataccatctatcaaacaaaacttgggtttaatttctcccggagatgtttcataatagtacgtataactttcttctgcaaacttaacagctctattatattcaggataattaaaacctaattccatatatttgtctcgtatatctgctattcctggtgctattttgattctattaagagtaacagctgcccccattcttaataatcgtcagtatttaaactgttaaatgttggtatatcaacatctaccttatttcccgcagtataaggtttgttgcaggtatactgttcaggaatggttacatttatacttcttctatagtcctgtctttcgatgttcatcacatatgcaaagaacagaataaacaaaataatgtaagaaataatattaaatatctgtgaattcgtaaatacattgattgccataataattacagcagctacaatacacacaatagacattcccacagtgttgccattacctccacgatacatttgagttactaagcaataggtaataactaagctagtaagaggcaatagaaaagatgagataaatatcatcaatatagagattagaggagggctatatagagccaagacgaacaaaatcaaaccgagtaacgttctaacatcattatttttgaagattcccaaataatcattcattcctccataatcgttttgcatcatacctccatctttaggcataaacgattgctgctgttcctctgtaaataaatctttatcaagcactccagcacccgcagagaagtcgtcaagcatattgtaatatcttaaataactcatttatatattaaaaaatgtcactattaaagatggagtataatctttatgccgaactaaaaaaaatgacttgtggtcaacccctaagtctttttaacgaagacggggatttcgtagaagttgaaccgggatcatcctttaagtttctgatacctaagggattttacgcctctccttccgtaaagacgagtctagtattcgagacattaacaacgaccgataataaaatcactagtatcaatccaacaaatgcgccaaagttatatcctcttcaacgcaaagtcgtatctgaagtagtttctaatatgaggaaaatgatcgaatcaaaacgtcctctatacatcactcttcacttggcgtgtggatttggtaagactattaccacgtgttatcttatggctacacacggtagaaaaaccgtcatttgcgtacccaataaaatgttaatacatcaatggaagacacaggtagaggcagtcggattggaacataagatatccatagatggagtaagtagtctattaaaggaactaaagactcaaagtccggatgtattaatagtagtcagtagacatctgacaaacgatgccttttgtaaatatatcaataagcattatgatttgttcatcttggatgaatcacatacgtataatctgatgaacaatacagcagttacaagatttttagcgtattatcctccgatgatgtgttattttttaactgctacacctagaccatctaaccgaatttattgtaacagtattattaatattgccaagttatccaatctaaaaaaaactatctatgcagtagatagtttttttgagccatattccacagataatattagacatatggtaaaacgactagatggaccatctaataaatatcatatatataccgagaagttattatctgtagacgagcctagaaatcaacttattcttgataccctggtagaagaattcaagtcaggaactattaatcgcattttagttattactaaactacgtgaacatatggtattattctacaaacgattattagattttttcggaccagaggttgtatttataggagacgcccaaaatagacgtactccagatatggtcaaatcaatcaaggaactaaatagatttatattcgtatccaccttattttattccggtactggtttagatattcctagtttggattcgttgttcatttgctcggcagtaatcaacaatatgcaaatagagcaattactagggagggtatgtcgagaaacagaactattagataggacggtatatgtatttcctaacacatccatcaaagaaataaagtacatgataggaaatttcatgcaacgaattattagtctgtctgtagataaactaggatttaaacaaaaaagttatcggaaacatcaagaatccgatcccacttctgcatgtacaacatcatccagagaagaacgtgtattaaatagaatatttaactcgcaaaatcgttaagaagtttaagcgacgatccgcatgctgcgcaggccagtgtattacccctcatagtattaatataatccaatgatacttttgtgatgtcggaaatcttaaccaatttagactgacaggcagaacacgtcatgcaatcatcatcgtcatcgataactgtagtcttgggcttctttttgcgactcttcattccggaacgcacattggtgctatccatttaggtagtaaaaaataagtcagaatatgccctataacacgatcgtgcaaaacctggtatatcgtctctatctttatcacaatatagtgtatcgacatttttattattattgacctcgtttatcttggaacatggaatgggaacatttttgttatcaacggccatctttgccttaattccagatgttgtaaaattataactaaacagtctatcatcgacacaaatgaaattcttgtttagacgtttgtagtttacgtatgcggctcgttcgcgtctcattttttcagatattgcaggtactataatattaaaaataagaatgaaataacataggattaaaaataaagttatcatgacttctagcgctgatttaactaacttaaaagaattacttagtctgtacaaaagtttgagattttcagattctgcggctatagaaaagtataattctttggtagaatggggaacatctacttactggaaaataggcgtgcaaaaggtagctaatgtcgagacgtcaatatctgattattatgatgaggtaaaaaataaaccgtttaatattgatccgggctattacattttcttaccggtatattttgggagcgtctttatttattcgaagggtaaaaatatggtagaacttggatctggaaactcttttcaaataccagatgatatgcgaagtgcgtgtaacaaagtattagacagcgataacggaatagactttctgagatttgttttgttaaacaatagatggataatggaagatgctatatcaaaatatcagtctccagttaatatatttaaactagctagtgagtacggattaaacatacccaaatatttagaaattgaaatagaggaagacacattatttgacgacgagttatactctattatagaacgctctttcgatgataaatttccaaaaatatccatatcgtatattaagttgggagaacttagacggcaagttgtagactttttcaaattctcattcatgtatattgagtccatcaaggtagatcgtataggagataatatttttattcctagcgttataacaaaatcaggaaaaaagatattagtaaaagatgtagaccatttaatacgatccaaggttagagaacatacatttgtaaaagtaaaaaagaaaaacacattttccattttatacgactatgatggaaacggaacagaaactagaggagaagtaataaaacgaattatagacactataggacgagactattatgttaacggaaagtatttctctaaggttggtagtgcaggcttaaagcaattgactaataaattagatattaatgagtgcgcaactgtcgatgagttagttgatgagattaataaatccggaactgtaaaacgaaaaataaaaaaccaatcagcatttgatttaagcagagaatgtttgggatatccagaagcggattttataacgttagttaataacatgcggttcaaaatagaaaattgtaaggttgtaaatttcaatattgaaaatactaattgtttaaataacccgagtattgaaactatatatggaaactttaaccagttcgtctcaatctttaatgtcgtcaccgatgtcaaaaaaagattattcgagtgaaataatatgcgcctttgatataggtgcaaaaaatcctgccagaactgttttagaagtcaaggataactccgttagggtattggatatatcaaaattagactggagttctgattgggaaaggcgcatagctaaagatttgtcacaatatgaatacactacagttcttctagaacgtcagcctagaaggtcgccgtatgttaaatttatctattttattaaaggctttttatatcatacatcggctgccaaagttatttgcgtctcgcctgtcatgtctggtaattcatatagagatcgaaaaaagagatcggtcgaagcatttcttgattggatggacacattcggattgcgagactccgttccggatagacgcaaattagacgatgtagcggatagtttcaatttggctatgagatacgtattagataaatggaatactaattatacaccttataataggtgtaaatctagaaattacataaaaaaaatgtaataacgttagtaacgccattatggataatctatttacctttctacatgaaatagaagatagatatgccagaactatttttaactttcatctaataagttgcgatgaaataggagatatatatggtcttatgaaagaacgcatttcctcagaggatatgtttgataatatagtgtataataaagatatacatcctgccattaagaaactagtgtattgcgacatccaacttactaaacacattattaatcagaatacgtatccggtatttaacgattcttcacaagtgaaatgttgtcattatttcgacataaactcagataatagcaatattagctctcgtacagtagagatatttgagagggaaaagtcatctcttgtatcatatattaaaactaccaataagaagagaaaggtcaattacggcgaaataaagaaaactgttcatggaggcactaatgcaaattacttttccggtaaaaagtctgacgagtatctgagtactacagttagatccaacattaatcaaccttggatcaaaaccatctctaagaggatgagagttgatatcattaatcactctatagtaacgcgtggaaaaagctctatattacaaactatagaaattatttttactaatagaacatgtgtgaaaatattcaaggattctactatgcacattattctatccaaggacaaggatgaaaaggggtgtatacacatgattgacaaattattctatgtctattataatttatttctgttgttcgaagatatcatccaaaacgagtactttaaagaagtagctaatgttgtaaaccacgtactcacggctacggcattagatgagaaattattcctaattaagaaaatggctgaacacgatgtttatggagttagcaatttcaaaatagggatgtttaacctgacatttattaagtcgttggatcataccgttttcccctctctgttagatgaggatagcaaaataaagttttttaaggggaaaaagctcaatattgtagcattacgatctctggaggattgtataaattacgtgactaaatccgagaatatgatagaaatgatgaaggaaagatcgactattttaaatagcatagatatagaaacggaatcggtagatcgtctaaaagaattgcttctaaaatgaaaaaaaacactaattcagaaatggatcaacgactagggtataagtttttggtgcctgatcctaaagccggagttttttatagaccgttacatttccaatatgtatcgtattctaattttatattgcatcgattgcatgaaatcttgaccgtcaagcggccactcttatcgtttaagaataatacagaacgaattatgatagaaattagcaatgttaaagtgactcctccagattactcacctataatcgcgagtattaaaggtaagagttatgacgcattagccacgttcactgtaaatatctttaaagaggtaatgaccaaagagggtatatccatcactaaaataagtagttatgagggaaaagattctcatttgataaaaattccgctactaataggatacgggaataaaaatccacttgatacagccaagtatcttgttcctaatgtcataggtggagtctttatcaataaacaatctgtcgaaaaagtaggaattaatctagtagaaaagattacaacatggccaaaatttagggttgttaagccaaactcattcactttctcgttttcctccgtatcccctcctaatgtattaccgacaagatatcgccattacaagatatctctggatatatcacaattggaagcgttgaatatatcatcgacaaagacatttataacggtcaatattgttttgctgtctcaatatttatctagagtgagtctagaattcattagacgtagtttatcatacgatatgcctccagaagttgtctatctagtaaacgcgataatagatagtgctaaacgaattactgaatctattactgactttaatattgatacatacattaatgacctggtggaagctgaacacattaaacaaaaatctcagttaacgatcaacgagttcaaatatgaaatgctgcataactttttacctcatatgaactatacacccgatcaactaaagggattttatatgatatctttactaagaaagtttctctactgtatcttccacacttctagatatccagatagagattcgatggtttgtcatcgcatcctaacgtacggcaaatattttgagacgttggcacatgatgaattagagaattacataggcaacatccgaaacgatatcatgaacaatcacaagaacagaggcacttacgcggtaaacattcatgtactaacaactcccggacttaatcacgcgttttctagcttattgagtggaaagttcaaaaagtcagacggtagttatcgaacacatcctcactattcatggatgcagaatatttctattcctaggagtgttggattttatccggatcaagtaaagatttcaaagatgttttctgtcagaaaataccatccaagtcaatatctttacttttgttcatcagacgttccggaaagaggtcctcaggtaggtttagtatctcaattgtctgtcttgagttccattacaaatatactaacgtctgagtatttggatttggaaaagaaaatttgtgagtatatcagatcatattataaagatgatataagttactttgaaacaggatttccaatcactatagaaaatgctctagtcgcatctcttaatccaaatatgatatgtgattttgtaactgactttagacgtagaaaacggatgggattcttcggtaacttggaggtaggtattactttagttagggatcacatgaatgaaattcgcattaatattggagcgggaagattagtcagaccattcttggttgtggataacggagagctcatgatggatgtgtgtccggagttagaaagcagattagacgacatgacattctctgacattcagaaagagtttccgcatgtcatcgaaatggtagatatagaacaatttacttttagtaacgtatgtgaatcggttcaaaaatttagaatgatgtcaaaggatgaaagaaagcaatacgatttatgtgactttcctgccgaatttagagatggatatgtagcatcttcattagtgggaatcaatcacaattctggacccagagctattcttggatgtgctcaagctaaacaagctatctcttgtctgagctcggatatacgaaataaaatagacaatggaattcatttgatgtatccagagaggccaatcgtgattagtaaggctttagaaacttcaaagattgcggctaattgcttcggccaacatgttactatagcattaatgtcgtacaaaggtatcaatcaagaggatggaattatcatcaaaaaacaatttattcagagaggcggtctcgatattgttacagccaagaaacatcaagtagaaattccattggaaaactttaataacaaagaaagagataggtctaacgcctattcaaaattagaaagtaatggattagttagactgaatgctttcttggaatccggagacgctatggcacgaaatatctcatcaagaactcttgaagatgattttgctagagataatcagattagcttcgatgtttccgagaaatataccgatatgtacaaatctcgcgttgaacgagtacaagtagaacttactgacaaagttaaggtacgagtattaaccatgaaagaaagaagacccattctaggagacaaatttaccactagaacgagtcaaaagggaacagtcgcgtatgtcgcggatgaaacggaacttccatacgacgaaaatggtatcacaccagatgtcattattaattctacatccatcttctctagaaaaactatatctatgttgatagaagttattttaacagccgcatattctgctaagccgtacaacaataagggagaaaaccgacctgtctgttttcctagtagtaacgaaacatccatcgatacatatatgcaattcgctaaacaatgttatgagcattcaaatccgaaattgtccgatgaagaattatcggataaaatcttttgtgaaaagattctctatgatcctgaaacggataagccttatgcatccaaagtattttttggaccaatttattacttgcgtctgaggcatttaactcaggacaaggcaaccgttagatgtagaggtaaaaagacgaagctcattagacaggcgaatgagggacgaaaacgtggaggaggtatcaagttcggagaaatggagagagactgtttaatagcgcatggtgcagccaatactattacagaagttttgaaagattcggaagaagattatcaagatgtgtatgtttgtgaaaattgtggagacatagcagcacaaatcaagggtattaatacatgtcttagatgttcaaaacttaatctctctcctctcttaacaaaaattgataccacgcacgtatctaaagtatttcttactcaaatgaacgccagaggcgtaaaagtcaaattagatttcgaacgaaggcctccttcgttttataaaccattagataaagttgatctcaagccgtcttttctggtgtaatattctagtttggtagtagatacatatcaatatcatcaaattcgagatccgaattataaaatgggcgtggattgttaactatagaatcggacgtctgatattcgaaaatctgtggagtttcaggttttggtggaggtgtaactgctacttgggatactgaagtctgatattcagaaagctgtggatgttctggttcggcatccaccgatggtgtcacatcactaatcggttcggtaacgtctgtggatggaggtgctacttctacagaacctgtagcctcagttgtcaacggagatacatttttaatgcgagaaaatgtataatttggtaatggtttcttatgtggatctgaagaagaggtaagatatctactagaaagataccgatcacgttctagttctcttttgtagaacttaactttttctttctccgcatctagttgatattccaacctcttcacgttactacgttcagattccaattcacgttcgcatgggttacctccgcagtttttacgagcgatttcacgttcagccttcatgcgtctctccctctctctatcgagtttatcagagcagtctttctgaaggcgatcgaactccataaatttctccaacgctttgattgtttccatagatttccgaagttcagcttttaggactgtgattctttttctttcgaattcacagctggatgtacaaccgtttccattaccgccatctctaagtttcttttctagatcggcaacatttcatccccatgccttttacattcctcgagtctactgtcgtcgaaatatcgttccagctccttttcgacatcaataactttagcacgttgtctctcaagctctcttttgtagttatctgattccctggcacgtttaagatcttcatgcaattgagtcagctcttaacttcctctcttgcttcttcgtcatagtacgcgcaatcactgtgagatccattgttaccacgtctacactcggcgagctcgcgtttaagagattcaatttcccgtttgtattggtccatgtttccattgctaccaccattagatttacaggctgctagttgtcgttcgagatcagaaatacgggttttcttggaattgatttcgtcgatgtacttggcatcgaaacacttattaagttctttttccaattctacgattttatttctttcgcgagtcaattccctcctgtagtaactatctgttttgtcagattcacgctctctacgtagactttcttgcaagttactaatttgttccctagcacgtccgagtttagttttatatgctgaatagagttctgattcatcctttgagcagatctctagcgatcgtttaagattcctaattctagtctttagcctatttacctcctcagaagatgttccgttaccgttgcgtttacactcgttaagctgtctatcaagatccatgattctatctctaagacgttgcatctctctttccatatcagcattgctttcattattacgtctgcagtcactcaactgtctttcaatatctgagattctatctctaagacgtcgcatctctctctgtttcggcattggtttcattattacgtttacagtcgttcaactgtctttcaagatctgatattctagattggagtctgctaatctctgtagcattttcacggcattcactcagttgtctttcaagatctgaaattttagattggagtctgctaatctctgtaagatttcctcctccgctctcgatgcagtcggtcaacttattctctagttctctaatacgcgaacgcagtgcatcaacttcttgcgtgtcttcctggttgcgtgtacattcatcgagatctctaacgcgtcgtcgttcttcctcaagttctctgcgtactacagaaagcgtgtccctatcttgttgatatttagcaatttctgattctagagtactgattttgcttacgtagttactaatagttgtcttggccttatcaagatcctccttgtatttgtcgcattccttgatatccctacgaagtctggacagttcccattcgacattacgacgtttatcgatttcagctcggagatcgtcatcgcgttgttttagccacatacgactgagttcaagttctcgttgacaagatccatctacttttccattcctaatagtatccagttccttttctagttctgaacgcatttctcgttccctatcaagcgattctctcaattctcggatagtcttcttatcaatttctaataaatctgaaccatcatctgtcccattttgaatatccctgtgttctttgatctcttttgtaagtcggtcgattctttcggttttataaacagaatccctttccaaagtcctaatcttactgagtttatcactaagttctgcattcaattcggtgagttttctcttggcttcttccaactctgttttaaactctccactatttccgcattcttcctcgcatttatctaaccattcaattagtttattaataactagttggtaatcagcgattcctatagccgttcttgtaattgtgggaacataattaggatcttctaatggattgtatggcttgatagcatcatctttatcattattagggggatggacaaccttaattggttggtcctcatctcctccagtagcgtgtggttcttcaataccagtgttagtaataggcttaggcaaatgcttgtcgtacgcgggcacttcctcatccatcaagtatttataatcgggttctacttcagaatattcttttctaagagacgcgacttcgggagttagtagaagaactctgtttctgtatctatcaacgctggaatcaatactcaagttaaggatagcgaatacctcatcgtcatcatccgtatcttctgaaacaccatcatatgacatttcatgaagtctaacgtattgataaatagaatcagatttagtattaaacagatccttaacctttttagtaaacgcatatgtatattttagatctccagatttcataatatgatcacatgccttaaatgtcagtgcttccatgatataatctggaacactaatgggtgacgaaaaagatacagcaccatatgctacgttgataaataaatctgaaccactaagtagataatgattaatgttaagaaagaggaaatattcagtgtataggtatgtcttggcgtcatatcttgtactaaacacgctaaacagtttgttaatgtgatcaatttccaatagattaattagagcagcgggaataccaacaaacatattaccacatccgtattttctatgaatatcacatatcatgttaaaaaatcttgatagaagagcgaatatctcgtctgacttaatgagtcgtagttcagcagcaacataagtcataactgtaaatagaacatactttcctgtagtgttgattctagactccacatcaacaccattattaaaaatagttttatatacatctttaatctgctctccgttaatcgtcgaacgttctagtatacggaaacactttgatttcttatctgtagttaatgacttagtgatatcacgaagaatattacgaattacatttcttgtttttcttgagagacctgattcagaactcaactcatcgttccatagtttttctacctcagtggcgaaatctttggagtgcttggtacatttttcaataaggttcgtgacctccatttattataaaaaatttattcaaaacttaactacaatcgggtaattataagatcgtagatctcccatgtggcggaatactaccatctatcgcatgtggatggacagtaggtaatggccatgggaacagtaatgtttgcatatttatctttcttgctagtattactgcatattgtcccaatgtttcgatgtgatgttctaacctatcaactgccgctgtatcacaacaatagtgtccgatgaaattaagattatgatccaatgtgtttaatatatgattatcaagtcttatacgatccgcgtcttttttgacaggatcaggttcttctacaggaagaagtttcggcctcttatgatattcatgtctgggaaacggtggtctagggtgaggctccggtatcggagtgggttttggattataatcatcatcgtctatgacatcatcttcgacttcgatatttattttgctatcttgatgatgtcctgtatcagttgcattttcagcactcgactgaatattagcgcattcattgtctattattaccatatttctaaacccaaaatgtatgtgttgaacatcagtactatcgttgatgagtcttatagcatgaattcgcttatcgttatcgggtttatcttctgtcaccttagcaattccttttttattaaactctacataatcatatccatttctattgtttgttctaatataaacgagtatagcatcattgctaaatttttcaatagtatcaaaaacagaatatcctaaaccatataatatatattcaggaacactcaaactaaatgtccaggattctcctaaatacgtaaactttaatagtgcgaaatcattcaaaaatctaccacttatagatagatagtacataaatgcgtatagtagtctacctatctctttattatgaaaaccggcattacgatcatatatgtcgtgatatacctgtgatccgtttacgttaaaccataaatacatgggtgatcctataaacatgaatttatttctaattctcagagctatagttaattgaccgtgtaatatttgcttacatgcatacttgatacgcttattaataagatttttatcattgctcgttatttcagaatcgtatatataaggagtaccatcgtgattcttaccagatattatacaaaatactatatataaaatatattgacccacgttagtaatcatataaatgtttaacgttttaaattttgtattcaatgatccattatcatacgctatcatggtcttgtaatattcattctttaaaatataatattgtgttagccattgcattggagctcctaatggagattttctattctcatccattttaggataggctttcataaagtccctaataacttcgtgaataatgtttctatgttttctactgatgcatgtatttgcttcgatttttttatcccatgtttcatctatcatagatttaaacgcagtaatgctcgcaacattaacatcttgaaccgttggtacaattccgttccataaatttataatgttcgccatttatataactcattttttgaatatacttttaattaacaaaagagttaagttactcatatggacgccgtccagtctgaacatcaatctttttagccagagatatcatagccgctcttagagtttcagcgtgattttccaacctaaatagaacttcatcgttgcgtttacaacacttttctatttgttcaaactttgttgttacattagtaatctttttttccaaattagttagccgttgtttgagagtttcctcattgtcgtcttcatcggctttaacaattgcttcgcgtttagcctctggctttttagcagcctttgtagaaaaaaattcagttgctggaattgcaagatcgtcatctccggggaaaagagttccgtccatttaaagtacagattttagaaactgacactctgcgttatttatatttggtacaacacatggattataaatattgatgttaataacatcagaaaatgtaaagtctatacattgttgcatcgtgttaaattttctaatggatctagtattattgggtccaacttctgcctgaaatccaaatatggaagcggatacaaaaccgtttcctggataaaccacacatctccacttttgctttacatcagaaattgtgtcgttgacatcttgaactctcctatctaatgccggtgttccacctatagattttgaatattcgaatgctgcatgagtagcattaaattccttaatattgccataattttcatatattgagtaaccctggataaaaagtaaacacaccgcagccgtcgctaccacaataaaaaaaattgatagagagttcatttataatctattagaagctgacaaaatttttttacacgcatcagacaatgctttaataaatagttcaacatctacttttgtcatatcgaaccgatggtatgattctaacctagaattacatccgaaaaagttgactatgttcatagtcattaagtcattaacaaacaacattccagactctggattataagacgatactgtttcgtcacaattacctaccttaatcatgtgattatgaatattggctattagagcaccttctaagaaatctataatatctttgaaacacgatttaaaatcaaaccacgaatatacttctacgaagaaagttagtttacccataggagaaataactataaatggagatctaaatacaaaatccggatctatgatagttttaacattattatattctctattaaatacctccacatctaaaaatgttaattttgaaactatgtcttcgtttattaccgtacctgaactaaacgctataagctctattgtttgagaactctttaaacgatattcttgaaatacatgtaacaaagtttcctttaactcggtcggtttatctaccatagttacagaatttgtatccttatctataatataataatcaaaatcgtataaagttatataattatcgcgttcagattgtgatcttttcaaatagactaaaaaccccatttctctagtaagtatcttatgtatatgtttgtaaaatatcttcatggtgggaatatgctctaccgcagttagccattcctcattgacagcggtagatgtattagacaaaactattccaatgtttaacaagggccattttacgagattattaaatccttgtttgataaatgtagccaatgagggttcgagttcaacgacgattgaattctcttcccgcggatgctgcatgatgaacgacgggatgttgttcgattgatttggaattctttttcgactttttgtttatattaaatattttaaaatttatagcggatagcaattcatgtaccacggataatgtagacgcgtattgcgcatcgatatctttattattagataaatttatcaataaatgtgagaagtttgcctcgttaaggtcttccatttaaatattatataaacatttgtgtttgtatcttattcgtcttttatggaatagttttttactagtaaagctgcaattacacactttgtccgtaaaacataaatataaacaccagcttttatcaatcgttccaaaaagtcgacggcggacatttttaacatggcatctattttaaatacacttaggtttttggaaaaaacatcattttataattgtaacgattcaataactaaagaaaagattaagattaaacataagggaatgtcatttgtattttataagccaaagcattctaccgttgttaaatacttgtctggaggaggtatatatcatgatgatttggttgtattggggaaggtaacaattaataatctaaagatgatgctattttacatggatttatcatatcatggagtgacaagtagtggagcaatttacaaattgggatcgtctatcgatagactttctctaaataggactattgttacaaaagttaataattatgatgatacattttttgacgacgatgattgatcgctattgcacaattttgtttttgtactttctaatatagtgtttaggttctttttcatatgagaatattgatttactaaaatatctatgtttaacttttgttctatgacgtccttatcggcggtatcggtacatatacgtaattcaccttcacaaaatacggagtcttcgataataatagccaatcgattattggatctagctgtctgtatcatattcaacatgtttaatatatcctttcgtttcccctttacaggcatcgatcgtagcatattttccgcgtctgatatggaaatgttaaaactacaaaaatgcgtaatgttagcccgtcctaatattggtacgtgtctataagtttggcatagtagaataatagacgtgtttaaatgccttccaaagtttaagaattctattagagtattgcattttgatagtttatcgcctacatcatcaaaaataagtaaaaagtgtgctgattttttatgattttgtgcgacagcaatacatttttctatgttacttttagttcgtatcagattatattctagagattcctgactactaacgaaattaatatgatttggccaaatgtatccatcataatctgggttataaacgggtgtaaacaagaatatatgtttatattttttaactagtgtagaaaacagagatagtaaatagatagtttttccagatccagatcctcctgttaaaaccattctaaacggcatttttaataaattttctcttgaaaattgtttttcttggaaacaattcataattatatttacagttactaaattaatttgataataaatcaaaatatggaaaactaaggttgttagtagggaggagaacaaagaaggcacatcgtgatataaataacatttattatcatgatgacaccagaaaacgacgaagagcagacatctgtgttctccgctactgtttacggagacaaaattcagggaaagaataaacgcaaacgcgtgattggtctatgtattagaatatctatggttatttcactactatctatgattaccatgtccgcgtttctcatagtgcgcctaaatcaatgcatgtctgctaacgaggctgctattactgacgccgctgttgccgttgctgctgcatcatctactcatagaaaggttgcgtctagcactacacaatatgatcacaaagaaagctgtaatggtttatattaccagggttcttgttatatattacattcagactaccagttattctcggatgctaaagcaaattgcactgcggaatcatcaacactacccaataaatccgatgtcttgactacctggctcattgattatgttgaggatacatggggatctgatggtaatccaattacaaaaactacatccgattatcaagattctgatgtatcacaagaagttagaaagtatttttgtgttaaaacaatgaactaatatttatttttgtacattaataaatgaaatcgcttaatagacaaactgtaagtaggtttaagaagttgtcggtgccggccgctataatgatgatactctcaaccattattagtggcataggaacatttctgcattacaaagaagaactgatgcctagtgcttgcgccaatggatggatacaatacgataaacattgttatttagatactaacattaaaatgtctacagataatgcggtttatcagtgtcgtaaattacgagctagattgcctagacctgatactagacatctgagagtattgtttagtattttttataaagattattgggtaagtttaaaaaagaccaatgataaatggttagatattaataatgataaagatatagatattagtaaattaacaaattttaaacaactaaacagtacgacggatgctgaagcgtgttatatatacaagtctggaaaactggttaaaacagtatgtaaaagtactcaatctgtactatgtgttaaaaaattctacaagtgacaacaaaaaatgaattaataataagtcgttaacgtacgccgccatggacgccgcgtttgttattactccaatgggtgtgttgactataacagatacattgtatgatgatctcgatatctcaatcatggactttataggaccatacattataggtaacataaaaactgtccaaatagatgtacgggatataaaatattccgacatgcaaaaatgctactttagctataagggtaaaatagttcctcaggattctaatgatttggctagattcaacatttatagcatttgtgccgcatacagatcaaaaaataccatcatcatagcatgcgactatgatatcatgttagatatagaagataaacatcagccattttatctattcccatctattgatgtttttaacgctacaatcatagaagcgtataacctgtatacagctggagattatcatctaatcatcaatccttcagataatctgaaaatgaaattgtcgtttaattcttcattctgcatatcagacggcaatggatggatcataattgatgggaaatgcaatagtaattttttatcataaaagttgtaaagtaaataataaaacaataaatattgaactagtagtacgtatattgagcaatcagaaatgatgctggtacctcttatcacggtgaccgtagttgcgggaacaatattagtatgttatatattatatatttgtaggaaaaagatacgtactgtctataatgacaataaaattatcatgacaaaattaaaaaagataaagagttctaattccagcaaatctagtaaatcaactgatagcgaatcagactgggaggatcactgtagtgctatggaacaaaacaatgacgtagataatatttctaggaatgagatattggacgatgatagcttcgctggtagtttaatatgggataacgaatccaatgttatggcgcctagcacagaacacatttacgatagtgttgctggaagcacgctgctaataaataatgatcgtaatgaacagactatttatcagaacactacagtagtaattaatgaaacggagactgttgaagtacttaatgaagataccaaacagaatcctaactattcatccaatcctttcgtaaattataataaaaccagtatttgtagcaagtcaaatccgtttattacagaacttaacaataaatttagtgagaataatccgtttagacgagcacatagcgatgattatcttaataagcaagaacaagatcatgaacacgatgatatagaatcatcggtcgtatcattggtgtgattagtttcctttttataaaattgaagtaatatttagtattattgctgccgtcacgttgtacaaatggagatattccctgtattcggcatttctaaaattagcaattttattgctaataatgactgtagatattatatagatacagaacatcaaaaaattatatctgatgagatcaatagacagatggatgaaacggtacttcttaccaacatcttaagcgtagaagttgtaaatgacaatgagatgtaccatcttattcctcatagattatcgacgattatactctgtattagttctgtcggaggatgtgttatctctatagataatgacatcaatggcaaaaatattctaacctttcccattgatcatgctgtaatcatatccccactgagtaaatgtgtcgtagttagcaagggtcctacaaccatattggttgttaaagcggatatacctagcaaacgattggtaacatcgtttacaaacgacatactatatgtaaacaatctgtcactgattaattatttgccgttgtctgtattcattattagacgagtcaccgactatttggatagacacatatgcgatcagatatttgctaataataagtggtattcccttataaccatcgacgataagcaatatcctattccatcaaactgtataggtatgtcctctgccaagtacataaattctagcatcgagcaagatactttaatccatgtttgtaacctcgagcatccgttcgactcagtatacaaaaaaatgcagtcgtacaattctctacctatcaaggaacaaatattgtacggtagaattgataatataaatatgagcattagtatttctgtggattaatagatttctagtatggggatcattaatcatctctaatctctaaatacctcataaaacgaaaaaaaagctattatcaaatactgtacggaatggattcattctcttctctttttatgaaactctgttgtatatctactgataaaactggaagcaaaaaatctgatagaaagaataagaataagatcaaggattatatggaacacgattattataaaataacaatagttcctggttcctcttccacgtctactagctcgtggtattatacacatgcctagtaatagtctctttgcgttgacggaaagcagactagaaataacaggctaaaatgttcagacaccataatagttcccaacccagataataacagagttccatcaacacattcctttaaactcaatcccaaacccaaaaccgttaaaatgtatccggccaattgatagtagataatgaggtgtacagcgcatgataatttacacagtaaccaaaatgaaaatactttagtaattataagaaatatagacggtaatgtcatcatcaacaatccgataatatgcctgagagtaaacattgacggataaaacaaaaatgctccgcataactctatcatggcaataacacaaccaaatacttgtaagattcctaaattagtagaaaatacaacgaatatcgatgtataagtgatctcgagaaataataagaataaagtaatgcccgtaaagataaacatcaacattgtttggtaatcattaaaccaattagtatgaagttgaactaatttcacagtagattttattccagtgttatcctcgcatgtataagtacctggtaagatatctttatattccataatcaatgagacatcactatctgataacgaatgaagtctagcactagtatgccatttacttaatattgtcgtcttggaagttttattataagttaaaatatcatggttatccaatttccatctaatatactttgtcggattatctatagtacacggaataatgatggtatcattacatgctgtatactctatggtctttgtagttgttataacaaccaacgtatagaggtatatcaacgatattctaactcttgacattttttatttatttaaaatgatacctttgttatttattttattctattttgctaacggtattgaatggcataagtttgaaacgagtgaagaaataatttctacttacttattagacgacgtattatacacgggtgttaatggggcggtatacacattttcaaataataaactaaacaaaactggtttaactaataataattatataacaacatctataaaagtagaggatgcggataaggatacattagtatgcggaaccaataacggaaatcccaaatgttggaaaatagacggttcagacgacccaaaacatagaggtagaggatacgctccttatcaaaatagcaaagtaacgataatcagtcacaacggatgtgtactatctgacataaacatatcaaaagaaggaattaaacgatggagaagatttgacggaccatgtggttatgatttattcacggcggataacgtaattccaaaagatggtttacgaggagcattcgtcgataaagacggtacttatgacaaagtttacattcttttcactgatactatcggctcaaagagaattgtcaaaattccgtatatagcacaaatgtgcctaaacgacgaaggtggtccatcatcattgtctagtcatagatggtcgacgtttctcaaagtcgaattagaatgtgatatcgacggaagaagttatagacaaattattcattctagaactataaaaacagataatgatacgatactatatgtattcttcgatagtccttattccaagtccgcattatgtacctattctatgaataccattaaacaatctttttctacgtcaaaattggaaggatatacaaagcaattgccgtctccagctcctggtatatgtttaccagctggaaaagttgttccacataccacgtttgaagtcatagaacaatataatgtactagatgatattataaagcctttatctaaccaacctatcttcgaaggaccgtctggtgttaaatggttcgatataaaggagaaggaaaatgaacatcgggaatatagaatatacttcataaaagaaaattctatatattcgttcgatacaaaatctaaacaaactcgtagctcgcaagtcgatgcgcgactattttcagtaatggtaactgcgaaaccgttatttatagcagatatagggataggagtaggaatgccacaaatgaaaaaaatacttaaaatgtaatcttaatcgagtacaccacacgacaatgaacaaacataagacagattatgctggttatgcttgctgcgtaatatgcggtctaattgtcggaattatttttacagcgacactattaaaagttgtagaacgtaaattagttcatacaccattaatagataaaacgataaaagatgcatatattagagaagattgtcctactgactggataagctataataataaatgtatccatttatctactgatcgaaaaacctgggaggaaggacgtaatgcatgcaaagctctaaattcaaattcggatctaattaagatagagactccaaacgagttaagttttttaagaagccttagacgaggctattgggtaggagaatccgaaatattaaaccagacaaccccatataattttatagctaagaatgccacgaagaatggaactaaaaaacggaaatatatttgtagcacaacgaatactcccaaactgcattcgtgttacactatataacaattacactacatttttatcataccactacttcggttagatgttttagaaaaaaataaatatcgccgtaccgttcttgtttttataaaaataacaattaacaattatcaaattttttctttaatattttacgtggttgaccattcttggtggtaaaataatctcttagtgttggaatggaatgctgtttaatgtttccacactcatcgtatattttgacgtatgtagtcacatcgtttacgcaatagtcagactgtagttctatcatgcttcctacatcagaaggaggaacagttttaaagtctcttggttttaatctattaccgttagttttcatgaaatcctttgttttatccacttcacattttaaataaatgtccactatacattcttttgttaattttactagatcgtcatgggtcatagaatttataggttccgtagtccatggatccaaactagcaaacttcgcgtatacggtatcgcgattagtgtatacaccaactgtatgaaaattaagaaaacagtttaataaatcaacagaaatatttaatcctccgtttgatacagatgcgccatatttatggatttcggattcacacgttgtttgtctgaggtgttcgtctagtgttgcttctacgtaaacttcgattcccatatattctttattgtcagaatcgcataccgatttatcatcatacactgtttgaaaactaaatggtatacacatcaaaataataaataataacgagtacattctgcaatattgttatcgtaattggaaaaatagtgttcgagtgagttggattatgtgagtattggattgtatattttattttatattttgtaataagaataaaatgctaatgtcaagtttattccaatagatgtcttattaaaaacatatataataaataacaatggctgaatggcataaaattatcgaggatatctcaaaaaataataagttcgaggatgccgccatcgttgattacaagactacaaagaatgttctagctgctattcctaacagaacatttgccaagattaatccgggtgaaattattcctctcatcactaatcgtaatattctaaaacctcttattggtcagaaatattgtattgtatatactaactctctaatggatgagaacacgtatgctatggagttgcttactgggtacgcccctgtatctccgatcgttatagcgagaactcataccgcacttatatttttgatgggtaagccaacaacatccagacgtgacgtgtatagaacgtgtagagatcacgctacccgtgtacgtgcaactggtaattaaaataaaaagtaatattcatatgtagtgtcaattttaaatgatgatgatgaaatggataatatccatattgacgatgtcaataatgccggtattggcatacagttcatcgatttttagatttcattcagaggatgtggaattatgttatgggcatttgtattttgataggatctataatgtagtaaatataaaatataatccgcatattccatatagatataattttattaatcgcacgttaaccgtagatgaactagacgataatgtcttttttacacatggttattttttaaaacacaaatatggttcacttaatcctagtttgattgtctcattatcaggaaacttaaaatataatgatatacaatgctcagtaaatgtatcgtgtctcattaaaaatttggcaacgagtacatctactatattaacatctaaacataagacttattctctacatcggtccacgtgtattactataataggatacgattctattatatggtataaagatataaatgacaagtataatgacatctatgattttactgcaatatgtatgctaatagcgtctacattgatagtgaccatatacgtgtttaaaaaaataaaaatgaactcttaattatgctatgctattagaaatggataaaatcaaaattacggttgattcaaaaattggtaatgttgttaccatatcgtataacttggaaaagataactattgatgtcacacctaaaaagaaaaaagaaaaggatgtattattagcgcaatcagttgctgtcgaagaggcaaaagatgtcaaggtagaagaaaaaaatattatcgatattgaagatgacgatgatatggatgtagaaagcgcgtaatacgatctataaaaataagtatataaatactttttatttactgtactcttactgtgtagtggtgataccctactcgattatttttttaaaaaaaaaatacttattctgattcttctagccatttccgtgttcgtttgaatgccacatcgacgtcaaagataggggagtagttgaaatctagttctgcattgttggtacgcacctcaaatgtagtgttggatatcttcaacgtatagttgttgagtagtgatggttttctaaatagaattctcttcatatcattcttgcacgcgtacatttttagcatccatcttggaatcctagatccttgttctattcccaatggtttcatcaatagaagattaaacatatcgtacgaacacgatggagagtaatcgtagcaaaagtaagcatttcctttaatcttagatcccggatactggatatattttgcagccaacacgtgcatccatgcagcatttcctacatatacccggctatgcaccgcgtcatcatcgactgtacgatacataatgttaccgtgttgcttacattgctcgtaaaagactttcatcaatttgtctccttctccgtaaattccagtgggtcttaggcaacaagtatacaattttgctccattcatgattacggaattattggctttcataaccagttgctcggccatacgtttactttttgcgtatacatgtcctggtgatatatcataaagggtatgctcatggccgatgaatggatcaccgtgtttattgggtcctattgcttccatgctactagtatagatcaaatacttgattcctaggtccacacaagctgccaaaatagtctgtgttccataatagtttactttcatgatttcattatcggtgtattttccaaatacatccactagagcagccgtatgaataatcagatttaccccatctagcgcttctctcaccttatcaaagtcgtttatatcacattgtatatagtttataaccttaactttcgaggttattggttgtggatcttctacaatatctatgactctgatttcttgaacatcatctgcactaattaacagttttactatatacctgcctagaaatccggcaccaccagtaaccgcgtacacggccattgctgccactcataatatcagactacttattctattttactaaataatggctgtttgtataatagaccacgataatatcagaggagttatttactttgaaccagtccatggaaaagataaagttttaggatcagttattggattaaaatccggaacgtatagtttgataattcatcgttacggagatattagtcaaggatgtgattccataggcagtccagaaatatttatcggtaacatctttgtaaacagatatggtgtagcatatgtttatttagatacagatgtaaatatatttacaattattggaaaggcgttatctatttcaaaaaatgatcagagattagcgtgtggagttattggtatttcttacataaatgaaaagataatacattttcttacaattaacgagaatggcgtttgatatatcagttaatgcgtctaaaacaataaatgcattagtttacttttctactcagcaaaataaattagtcatacgtaatgaagttaatgatacacactacactgtcgaatttgatagggacaaagtagttgacacgtttatttcatataatagacataatgacaccatagagataagaggggtgcttccagaggaaactaatattggttgcgcggttagtatgacttacttgtataataagtatagttttaaactgattttagcagaatatataagacacagaaatactatatccggcaatatttattcggcattgatgacactagatgatttggctattaaacagtatggagacattgatctattatttaatgagaaacttaaagtagactccgattcgggactatttgactttgtcaactttgtaaaggatatgatatgttgtgattctagaatagtagtagctctatctagtctagtatctaaacattgggaattgacaaataaaaaatataggtgtatggcattagccgaacatatatctgatagtattccaatatctgagctatctagactacgatacaatctatgtaagtatctacgcggacacactgagagcatagaggataaatttgattattttgaagacgatgattcgtctacatgttctgccgtaaccgacagggaaacggatgtataattttttttatagcgtgaaggatatgataaaaaatataattgttgtatttatcccattccaatcaccttatatgattctgtaacacaataaaggagtcttatagatgtatagaggtcagatactggtttgataaactgtttattccacataagtatgtttgactttatggttagacccgcatactttaacaaatcactgaaaattggagttaggtattgacctctcagaatcagttgccgttctggaacattaaatgtattttttatgatatactccaacgcatttatgtgggcatacaacaagtcattactaatggaatattccaagagttttagttgtctagtatttaacaagagaagagatttcaacagactgtttatgaactcgaatgccgcctcattgtcgcttatattgatgatgtcgaattctcccaatatcatcaccgatgagtagctcatcttgttatcgggatccaagttttctaaagatgtcattaaaccctcgatcatgaatggatttatcatcatcgtttttatgttggacatgagcttagtccgtttgtccacatctatagaagatgatttctgaattatttcatatatctctctctttaactccaggaacttgtcaggatggtctactttaatatgttctcgtctaagagatgaaaatctttggatggttgcacgcgacttttctctaaaggatgacgttgcccaagatcctctcttaaatgaatccatcttatccttggacaagatggacagtctattttccttagatggtttaatatttttgttacccatgatctataaaggtagacctaatcgtctcggatgaccatatatttattttcagttttattatacgcataaattgtaaaaaatatgttaggtttacgaaaatgtctcgtggggcattaatcgtttttgaaggattggacaaatctggaaaaacaacacaatgtatgaacatcatggaatcaataccttcaaacacaataaaataccttaactttcctcagagatccactgtcactggaaagatgatagatgactatctaactcgtaaaaaaacctataatgatcatatagttaatctattattttgtgcaaatagatgggagtttgcatcttttatacaagaacaactagaacagggaattactttaatagttgatagatacgcattttctggagtagcgtatgccgccgctaaaggcgcgtcaatgactctcagtaagagttatgaatctggattgcctaaacccgacttagttatattcttggaatctggtagcaaagaaattaatagaaacgtcggtgaggaaatttatgaagatgttacattccaacaaaaggtattacaagaatataaaaaaatgattgaagaaggagatattcattggcaaattatttcttctgaattcgaggaagatgtaaagaaggagttgattaagaatatagttatagaggctatacacacggttactggaccagtggggcaactgtggatgtaatagtgaaattacattttttataaatagatgttagtacagtgttataaatggatgaagcatattactctggcaacttggaatcagtactcggatacgtgtccgatatgcataccgaactcgcatcaatatctcaattagttattgccaagatagaaactatagataatgatatattaaacaaggacattgtaaattttatcatgtgtagatcaaacttggataatccatttatctctttcctagatactgtatatactattatagatcaagagaactatcagactgagttgattaattcattagacgacaatgaaattatcgattgtatagttaataagtttatgagcttttataaggataacctagaaaatatagtagatgctatcattactctaaaatatataatgaataatccagattttaaaactacgtatgccgaagtactcggttccagaatagccgatatagatattaaacaagtgatacgtaagaatatactacaattgtctaataatatccgcgaacgatatttgtgaaaatattaaaaaaaaatactttttttattaaatgacgtcttttcgtgaatttagaaaattatgctgtgctatatatcacgcatcaggatataaagaaaaatctaaattaattagagactttataacagatagggatgataaatatttgatcattaagctattgcttcccggattagacgatagaatttataacatgaacgataaacaaattataaaattatatagtataatatttaaacaatctcaggaagatatgctacaagatttaggatacggatatataggagacactattaggactttcttcaaagagaacacagaaatccgtccacgagataaaagcattttaactttagaagaagtggatagttttttaactacgttatcatccgtaactaaagaatcgcatcaaataaaattattgactgatgtagcatctgtttgtacatgtaatgatttaaaatgtgtagtcatgcttattgataaagatctaaaaattaaagcgggtcctcggtacgtacttaacgctattagtcctaatgcctatgatgtgtttagaaaatctaataacttgaaagagataatagaaaattcatctaaacaaaatctagactctatatctatttctgttatgactccaattaatcccatgttagcggaatcgtgtgattctgtcaataaggcgtttaaaaaatttccatcaggaatgtttgcggaagtcaaatacgatggtgaaagagtacaagttcataaaaataataacgagtttgccttctttagtagaaacatgaaaccagtactctctcataaagtggattatctcaaagaatacataccgaaagcatttaaaaaagctacgtctatcgtattggattctgaaattgttcttgtagacgaacataatgtaccgctcccgtttggaagtttaggtatacacaaaaagaaagaatataaaaactctaacatgtgtttgttcgtgtttgactgtttgtactttgatggattcgatatgacggacattccattgtacgaacgaagatcttttctcaaagatgttatggttgaaatacccaatagaatagtattctcagagttgacgaatattagtaacgagtctcagttaactgacgtattggatgatgcactaacgagaaaattagaaggattggtcttaaaagatattaatggagtatacgaaccgggaaagagaagatggttaaaaataaagcgagactatttgaacgagggttccatggcagattctgccgatttagtagtactaggtgcctactatggtaaaggagcaaagggtggtatcatggcagtctttctaatgggttgttacgacgatgaatccggtaaatggaagacggttaccaagtgttcaggacacgatgataatacgttaagggagttgcaagaccaattaaagatgattaaaattaacaaggatcccaaaaaaattccagagtggttagtagttaataaaatctatattcccgattttgtagtagaggatccgaaacaatctcagatatgggaaatttcaggagcagagtttacatcttccaagtcccataccgcaaatggaatatccattagatttcctagatttactaggataagagaggataaaacgtggaaagaatctactcatctaaacgatttagtaaacttgactaaatcttaatagttacatacaaactgaaaattaaaataacactatttagttggtggtcgccatggatggtgttattgtatactgtctaaacgcgctagtaaaacatggcgaggaaataaatcatataaaaaatgatttcatgattaaaccatgttgtgaaagagtttgtgaaaaagtcaagaacgttcacattggcggacaatctaaaaacaatacagtgattgcagatttgccatatatggataatgcggtatccgatgtatgcaattcactgtataaaaagaatgtatcaagaatatccagatttgctaatttgataaagatagatgacgatgacaagactcctactggtgtatataattattttaaacctaaagatgccattcctgttatcatatctataggaaaggataaagatgtctgtgaactattaatctcatcagacatatcgtgtgcatgcgtggagttaaattcatatcacgtagccattcttcccatggatgtttccttttttaccaaaggaaatgcatcattgattattctcctgtttgatttctctatcgatgcggcacctctcttaagaagtgtaaccgataataatgttattatatctagacaccagcgtctacatgacgagcttccgagttccaattggttcaagttttacataagtataaagtccgactattgttctatattatatatggttgttgatggatctgtgatgcatgcgatagctgataatagaactcacgcaattattagcaaaaatatattagacaatactacgattaacgatgagtgtagatgctgttattttgaaccacagattaggattcttgatagagatgagatgctcaatggatcatcgtgtgatatgaacagacattgtattatgatgaatttacctgatgtaggcgaatttggatctagtatgttggggaaatatgaacctgacatgattaagattgctctttcggtggctggtaatttaataagaaatcgagactacattcccgggagacgaggatatagctactacgtttacggtatagcctctagataatttttttaagcacgaaataaaaaacataattttaaaccaatctatttcatactattttgtgtgatcaccatggacataaagatagatattagtatttctggtgataaatttacggtgactactaggagggaaaatgaagaaagaaaaaaatatctacctctccaaaaagaaaaaactactgatgttatcaaacctgattatcttgagtacgatgacttgttagatagagatgagatgtttactattctagaggaatattttatgtacagaggtctattaggcctcagaataaaatatggacgactctttaacgaaattaaaaaattcgacaatgatgcggaagaacaattcggtactatagaagaactcaagcagaaacttagattaaattctgaagagggagcagataactttatagattatataaaggtacaaaaacaggatatcgtcaaacttactgtatacgattgcatatctatgataggattgtgtgcatgcgtggtagatgtttggagaaatgagaaactgttttctagatggaaatattgtttacgagcgattaaactgtttattgatgatcacatgcttgataagataaaatctatactgcagaatagactagtatatgtggaaatgtcatagaaagttaaaagttaatgagagcaaaaatatataaggttgtattccatatttgttatttttttctgtaatagttagaaaaatacattcgatggtctatctatcagattattatgtgttataaggtactttttctcataataaactagagtatgagtaagatagtgtttttcaaaacatataaatctaaaattgatggatgagatatacagctattaatttcgaaaatatattttaatctgataactttaaacatggatttttaatggtggtttaacgttttaaaaaaagattttgttattgtagtatatgataatattaaaagatggatataaagaatttgctgactgcatgtactattttttacattactacattggctacggcagatatacctacttcgtcactgccacacgctccggtaaacggggcatgtgacgagggagaatatcttgataagaggcataatcaatgttgtaatcagtgtccacctggagaatttgccaaggttagatgtaatggtaacgataacacaaaatgtgaacgctgcccacctcatacatataccgcaatccccaattactctaatggatgtcatcaatgtagaaaatgcccaacaggatcatttgataaggtaaagtgtaccggaacacagaacagtaaatgttcgtgtcttcctggttggtattgcgctactgattcttcacagactgaagattgtcgagattgtataccaaaaaggagatgtccatgcggatactttggtggaatagatgaacaaggaaatcctatttgtaaatcgtgttgtgttggtgaatattgcgactacctacgtaattatagacttgatccatttcctccatgcaaactatctaaatgtaattaattatgattttgatgataatgttaccatacattatatcgctacttggttagtgtattattcagtatgaagacctattaataattacttatcttttgacgatcttgttataattataatataaaaatacttatggcatagtaactcataattgctgacgcgataaattcgtaataatctgttttgttcaaatttttataaggaatctacaggcataaaaataaaaatataatttataatatactcttacagcgcgccatcatgaataacagcagtgaattgattgctgttattaatggatttagaaatagtggacgattttgtgatattaatatagttattaatgatgaaaggataaacgctcacagactcatcctatctggagcctccgaatatttttccattctgttttccaataattttatcgattctaatgaatacgaagttaatctaagtcatttagattatcaaagtgttaacgatttgatcgattacatttatgggatacctttgagcctaactaacgataacgtgaaatatattctttcaaccgctgattttttacaaattggatctgctattacggagtgtgaaaattacatacttaaaaatctttgttctagaaactgtatcgatttctacatatacgctgataaatataataacaagaaaatagaatcagcgtcgtttaacacaatattacaaaatattttgagactcatcaacgatgaaaactttaaatacttaacagaggaatcaatgataaaaattttaagcgatgatatgttaaatataaaaaatgaggatttcgccccactaattctcattaaatggttagagagtactcaacaaccatgcaccgtcgagttacttaaatgcctcagaatatcattgctttccccacaagttataaaatcactttatagtcatcgactggttagttcaatctacgaatgtataacattcttaaacaatatagcattcttggatgaatcatttcctagataccatagcatcgagttgatatctatcggtataagtaattcgcatgataagatttccataaactgctacaatcataaaaaaaatacatgggaaatgatatcttcacgtagatataggtgtagtttcgcagtggccgtcctggataatattatctatatgatgggtggatatgatcagtccccgtatagaagttcaaaggttatagcgtacaatacatgtacaaattcttggatatatgatataccagagctaaaatatcctcgttctaattgtgggggactggctgatgacgaatacatttattgtataggcggcatacgcgatcaggattcatcgttgacatctagtattgatagatggaagccatcaaaaccatattggcagaagtatgctaaaatgcgcgaaccaaaatgtgatatgggggttgcgatgttaaacggattaatatatgttataggtggaatcgttaaaggtgacacgtgtaccgacgcactagagagtttatcagaagatggatggatgaagcatcaacgtcttccaataaaaatgtccaatatgtcgacgattgttcatgatggcaagatttatatatctggaggttacaacaatagtagtgtagttaatgtaatatcgaatctagtccttagctataattcgatatatgatgaatggaccaaattatcatcattaaacattcctagaattaatcccgctctatggtcagcgcataataaattatatgtaggaggaggaatatctgatgatgttcgaactaatacatctgagacatacgacaaagaaaaagattgttggacattggataatggtcacgtgttaccacgcaattatataatgtataaatgcgaaccgattaaacataaatatccattggaaaaaacacagtacacgaatgattttctaaagtatttggaaagttttataggtagttgatagaacaaaatacataattttgtaaaaataaatcactttttatactaatatgacacgattaccaatacttttgttactaatatcattagtatacgctacaccttttcctcagacatctaaaaaaataggtgatgatgcaactctatcatgtaatcgaaataatacaaatgactacgttgttatgagtgcttggtataaggagcccaattccattattcttttagctgctaaaagcgacgtcttgtattttgataattataccaaggataaaatatcttacgactctccatacgatgatctagttacaactatcacaattaaatcattgactgctagagatgccggtacttatgtatgtgcattctttatgacatcaactacaaatgacactgataaagtagattatgaagaatactccacagagttgattgtaaatacagatagtgaatcgactatagacataatactatctggatctacacattcaccggaaactagttctgagaaacctgattatatagataattctaattgctcgtcggtattcgaaatctaagcttaaaaattgaaattttattttttttttttggaatataaataagctcgaagtcgaccaccatggtgggtgaggatagcgtgctgatcaccgagaacatgcacatgaaactgtacatggagggcaccgtgaacgaccaccacttcaagtgcacatccgagggcgaaggcaagccctacgagggcacccagaccatgaagatcaaggtggtcgagggcggccctctccccttcgccttcgacatcctggctaccagcttcatgtacggcagcaaaacctttatcaaccacacccagggcatccccgacttctttaagcagtccttccctgagggcttcacatgggagaggatcaccacatacgaagacgggggcgtgctgaccgctacccaggacaccagcctccagaacggctgcctcatctacaacgtcaagatcaacggggtgaacttcccatccaacggccctgtgatgcagaagaaaacactcggctgggaggccagcaccgagatgctgtaccccgctgacagcggcctgagaggccatagccagatggccctgaagctcgtgggcgggggctacctgcactgctccctcaagaccacatacagatccaagaaacccgctaagaacctcaagatgcccggcttctacttcgtggacaggagactggaaagaatcaaggaggccgacaaagagacctacgtcgagcagcacgagatggctgtggccaggtactgcgacctgcctagcaaactggggcacagctgattaattaatttttatcgatctaattcaacaatgtctggagagctcggtaccaagcttcgcaggatcccgactccggaaccaattactgataaagaagatcatacagttacagacactgtctcatacactacagtaagtacatcatctggaattgtcactactaaatcaaccaccgatgatgcggatctttatgatacgtacaatgataatgatacagtaccaccaactactgtaggcggtagtacaacctctattagcaattataaaaccaaggactttgtagaaatatttggtattaccgcattaattatattgtcggccgtggcaattttctgtattacatattatatatataataaacgttcacgtaaatacaaaacagagaacaaagtctagatttttgacttacataaatgtctgggatagtaaaatctatcatattgagcggaccatctggtttaggaaagacagccatagccaaaagactatgggaatatatttggatttgtggtgtcccataccactagatttcctcgtcctatggaacgagaaggtgttgattaccattacgttaacagagaggccatctggaagggaatagccgccggaaactttctagaacatactgagtttttaggaaatatttacggaacttctaaaacagctgtgaatacagcggctattaataatcgtatttgtgtgatggatctaaacatcgacggtgttagaagtcttaaaaatacgtacctaatgccttactcggtgtatataagacctacctctcttaaaatggttgagaccaagcttcgtcgtagaaacactgaagctaacgatgagattcatcgtcgtgtgatgttggcaaaaactgacatggatgaggcaggtgaagccggtctattcgacactattatcattgaagatgatgtgaatttagcatatagtaagttaattcagatactacaggaccgtattagaatgtattttaacactaattagagacttaagacttaaaacttgataattaataatataactcgtttttatatgtgtctatttcaacgtctaatgtattagttaaatattaaaacttaccacgtaaaacttaaaatttaaaatgatatttcattgacagatagatcacacattatgaactttcaaggacttgtgttaactgacaattgcaaaaatcaatgggtcgttggaccattaataggaaaaggtggattcggtagtatttatactactaatgacaataattatgtagtaaaaatagagcccaaagctaacggatcattatttaccgaacaggcattttatactagagtacttaaaccatccgttatcgaagaatggaaaaaatctcacaatataaagcacgtaggtcttatcacgtgcaaggcatttggtctatacaaatccattaatgtggaatatcgattcttggtaattaatagattaggtgcagatctagatgcggtgatcagagccaataataatagactaccaaaaaggtcggtgatgttgatcggaatcgaaatcttaaataccatacaatttatgcacgagcaaggatattctcacggagatattaaagcgagtaatatagtcttagatcaaatagataagaataaattatatctagtggattacggattggtttctaaattcatgtctaatggcgaacatgttccatttataagaaatccaaataaaatggataacggtactctagaatttacacctatagattcgcataaaggatacgttgtatctagacgtggagatctagaaacacttggatattgtatgattagatggttgggaggtatcttaccatggactaagatatctgaaacaaagaattgtgcattagtaagtgccacaaaacagaaatatgttaacaatactgcgactttgttaatgaccagtttgcaatatgcacctagagaattgctgcaatatattaccatggtaaactctttgacatattttgaggaacccaattacgacaagtttcggcacatattaatgcagggtgtatattattaagtgtggtgtttggtcgataaaaattaaaaaataacttaatttattattgatctcgtgtgtacaaccgaaatcatggcgatgttttacgcacacgctctcggtgggtacgacgagaatcttcatgcctttcctggaatatcatcgactgttgccaatgatgtcaggaaatattctgttgtgtcagtttataataacaagtatgacattgtaaaagacaaatatatgtggtgttacagtcaggtgaacaagagatatattggagcactgctgcctatgtttgagtgcaatgaatatctacaaattggaaatccgatccatgatcaagaaggaaatcaaatctctatcatcacatatcgccacaaaaactactatgctctaagcggaatcgggtacgagagtctagacttgtgtttggaaggagtagggattcatcatcacgtacttgaaacaggaaacgctgtatatggaaaagttcaacatgattattctactatcaaagagaaggccaaagaaatgagtgcacttagtccaggacctatcatcgattaccacgtctggataggagattgtatctgtcaagttactgctgtggacgtacatggaaaggaaattatgaaaatgagattcaaaaagggtgcggtgcttccgatcccaaatctggtaaaagttaaacttggggagaatgatacagaaaatctttcttctactatatcggcggcaccatcgaggtaaccacctctctggaagacagcgtgaatcatgtactcatgaaacgtttggaaactatacgccatatgtggtctgttgtatatgatcattttgatattgtgaatggtaaagaatgctgttatgtgcatacgcattcatctaatcaaaatcctataccgagtactgtaaaaacaaatttgtacatgaagactatgggatcatgcattcaaatggattccatggaagctctagagtatcttagcgaactgaaggaatcaggtggatggagtcccagaccagaaatgcaggaatttgaatatccagatggagtggaagacactgaatcaattgagagattggcagaggagttcttcaatagatcagaacttcaggctggtgaatcagtcaaatttggtaattctattaattgttaaacatacatctgtttcagctaagcaactaagaacacgtatacggcagcagcttccttctatactctcatcttttaccaacacaaagggtggatatttgttcattggagttgataataatacacacaaagtatttggattcacggtgggttacgactacctcagactgatagagaatgatatagaaaagcatatcaaaagacttcgtgttgtgcatttctgtgagaagaaagaggacatcaagtacgcgtgtcgattcatcaaggtatataaacctggggatgagactacctcgacatacgtgtgcgctatcaaagtggaaagatgctgttgtgctgtgtttgcagattggccagaatcatggtatatggatactaatggtatcaagaagtattctccagatgaatgggtgtcacatataaaattttaattaatgtaactatagagaacaaataataaggttgtaatatcatatagacaataactaacaattaattagtaactgttatctcttttttaactaaccaactaactatatacctattaatacatcgtaattatagttcttaacatctattaatcattaattcgcttctttaattttttataaactaacattgttaattgaaaagggataacatgttacagaatataaattatatatggatttttttaaaaaggaaatacttgactggagtatatatttatctcttcattatatagcacgcgtgttttccaatttttccacatcccatataatacaggattataatctcgttcgaacatacgagaaagtggataaaacaatagttgattttttatctaggttgccaaatttattccatattttagaatatggggaaaatattctacatatttattctatggatgatgctaatacgaatattataattttttttctagatagagtattaaatattaataagaacgggtcatttatacacaatctcgggttatcatcatccattaatataaaagaatatgtatatcaattagttaataatgatcatccagataataggataagactaatgcttgaaaatggacgtagaacaagacattttttgtcctatatatcagatacagttaatatctatatatgtattttaataaatcatggattttatatagatgccgaagacagttacggttgtacattattacatagatgtatatatcactataagaaatcagaatcagaatcatacaatgaattaattaagatattgttaaataatggatcagatgtagataaaaaagatacgtacggaaacacaccttttatcctattatgtaaacacgatatcaacaacgtggaattgtttgagatatgtttagagaatgctaatatagactctgtagactttaatagatatacacctcttcattatgtctcatgtcgtaataaatatgattttgtaaagttattaatttctaaaggagcaaatgttaatgcgcgtaataaattcggaactactccattttattgtggaattatacacggtatctcgcttataaaactatatttggaatcagacacagagttagaaatagataatgaacatatagttcgtcatttaataatttttgatgctgttgaatctttagattatctattatccagaggagttattgatattaactatcgtactatatacaacgaaacatctatttacgacgctgtcagttataatgcgtataatacgttggtctatctattaaacaaaaatggtgattttgagacgattactactagtggatgtacatgtatttcggaagcagtcgcaaacaacaacaaaataataatggaagtactattgtctaaacgaccatctttgaaaattatgatacagtctatgatagcaattactaaacataaacagcataatgcagatttattgaaaatgtgtataaaatatactgcgtgtatgaccgattatgatactcttatagatgtacagtcgctacagcaatataaatggtatattttaagatgtttcgatgaaatagatatcatgaagagatgttatataaaaaataaaactgtattccaattagttttttgtatcaaagacattaatactttaatgagatacggtaaacatccttctttcgtgaaatgcactagtctcgacgtatacggaagtcgtgtacgtaatatcatagcatctattagatatcgtcagagattaattagtctattatccaagaagctggatcctggagataaatggtcgtgttttcctaacgaaataaaatataaaatattggaaaactttaacgataacgaactatccacatatctaaaaatcttataaacattattaaaatataaaatctaagtaggataaaatcacactacatcattgtttccttttagtgctcgacagtgtatactatttttaacgctcataaataaaaatgaaaacgatttccgttgttacgttgttatgcgtactacctgctgttgtttattcaacatgtactgtacccactatgaataacgctaaattaacgtctaccgaaacatcgtttaatgataaccagaaagttacgtttacatgtgatcagggatatcattctttggatccaaatgctgtctgtgaaacagataaatggaaatacgaaaatccatgcaaaaaaatgtgcacagtttctgattatgtctctgaactatataataaaccgctatacgaagtgaattccaccatgacactaagttgcaacggcgaaacaaaatattttcgttgcgaagaaaaaaatggaaatacttcttggaatgatactgttacgtgtcctaatgcggaatgtcaacctcttcaattagaacacggatcgtgtcaaccagttaaagaaaaatactcatttggggaatatatgactatcaactgtgatgttggatatgaggttattggtgcttcgtacataagttgtacagctaattcttggaatgttattccatcatgtcaacaaaaatgtgatatgccgtctctatctaacggattaatttccggatctacattttctatcggtggcgttatacatcttagttgtaaaagtggttttacactaacggggtctccatcatccacatgtatcgacggtaaatggaatcccatactcccaatatgtgtacgaactaacgaaaaatttgatccagtggatgatggtcccgacgatgagacagatttgagcaaactctcgaaagacgttgtacaatatgaacaagaaatagaatcgttagaagcaacttatcatataatcatagtggcgttgacaattatgggcgtcatatttttaatctccgttatagtattagtttgttcctgtgacaaaaataatgaccaatataagttccataaattgctaccgtaaatataaatccgttaaaataattaataatttaataacaaacaagtatcaaaagattaaagacttatagctagaatcaattgagatgtcttcttcagtggatgttgatatctacgatgccgttagagcatttttactcaggcactattataacaagagatttattgtgtatggaagaagtaacgccatattacataatatatacaggctatttacaagatgcgccgttataccgttcgatgatatagtacgtactatgccaaatgaatcacgtgttaaacaatgggtgatggatacacttaatggtataatgatgaatgaacgcgatgtttctgtaagcgttggcaccggaatactattcatggaaatgtttttcgattacaataaaaatagtatcaacaatcaactaatgtatgatataattaatagcgtatctataattctagctaatgagagatatagaagcgcttttaacgacgatggtatatacatccgtagaaatatgattaacaagttgtacggatacgcatctctaactactattggcacgatcgctggaggtgtttgttattatctgttgatgcatctagttagtttgtataaataattatttcaatatactagttaaaattttaagattttaaatgtataaaaaactaataacgtttttatttgtaataggtgcattagcatcctattcgaataatgagtacactccgtttaataaactgagtgtaaaactctatatagatggagtagataatatagaaaattcatatactgatgataataatgaattggtgttaaattttaaagagtacacaatttctattattacagagtcatgcgacgtcggatttgattccatagatatagatgttataaacgactataaaattattgatatgtataccattgactcgtctactattcaacgcagaggtcacacgtgtagaatatctaccaaattatcatgccattatgataagtacccttatattcacaaatatgatggtgatgagcgacaatattctattactgcagagggaaaatgctataaaggaataaaatatgaaataagtatgatcaacgatgatactctattgagaaaacatactcttaaaattggatctacttatatatttgatcgtcatggacatagtaatacatattattcaaaatatgatttttaaaaatttaaaatatattatcacttcagtgacagtagtcaaataacaaacaacaccatgagatatattataattctcgcagttttgttcattaatagtatacatgctaaaataactagttataagtttgaatccgtcaattttgattccaaaattgaatggactggggatggtctatacaatatatcccttaaaaattatggcatcaagacgtggcaaacaatgtatacaaatgtaccagaaggaacatacgacatatccgcatttccaaagaatgatttcgtatctttctgggttaaatttgaacaaggcgattataaagtggaagagtattgtacgggactatgcgtcgaagtaaaaattggaccaccgactgtaacattgactgaatacgacgaccatatcaatttgtacatcgagcatccgtatgctactagaggtagcaaaaagattcctatttacaaacgcggtgacatgtgtgatatctacttgttgtatacggctaacttcacattcggagattctaaagaaccagtaccatatgatatcgatgactacgattgcacgtctacaggttgcagcatagactttgtcacaacagaaaaagtgtgcgtgacagcacagggagccacagaagggtttctcgaaaaaattactccatggagttcgaaagtatgtctgacacctaaaaagagtgtatatacatgcgcaattagatccaaagaagatgttcccaatttcaaggacaaaatggccagagttatcaagagaaaatttaatacacagtctcaatcttatttaactaaatttctcggtagcacatcaaatgatgttaccacttttcttagcatgcttaacttgactaaatattcataactaatttttattaatgatacaaaaacgaaataaaactgcatattatacactggttaacgcccttataggctctaaccattttcaagatgaggtccctgattatagtccttctgttcccctctatcatctactccatgtctattagacgatgtgagaagactgaagaggaaacatggggattgaaaatagggttgtgtataattgccaaagatttctatcccgaaagaactgattgcagtgttcatctcccaactgcaagtgaaggattgataactgaaggcaatggattcagggatatacgaaacaccgataaattataaaaaaagcaatgtgtccgctgtttccgttaataatactattttcgtaactggcggattattcataaataactctaatagcacgatcgtggttaacaatatggaaaaacttgacatttataaagacaaacaatggtcgattatagaaatgcctatggctagggtatatcacggcattgactcgacatttggaatgttatattttgccggaggtctatccgttaccgaacaatatggtaatttagagaaaaacaacgagatatcttgttacaatcctagaacgaataagtggtttgatatttcatatactatttataagatatccatatcatcattgtgtaaactaaataacgtcttctatgtatttagtaaggacattggatatgtggaaaagtatgatggtgcatggaagttagtacatgatcgtctccccgctataaaggcattatcaacttctccttattgattgaaaatgaaaatataaatagtttttatgtatagcagtattaccctatagttttattgcttactactaacatggatacagatgttacaaatgtagaagatatcataaatgaaatagatagagagaaagaagaaatactaaaaaatgtagaaattgaaaataataaaaacattaacaagaatcatcccaatgaatatattagagaagcactcgttattaataccagtagtaatagtgattccattgataaagaagttatagaatgtatcagtcacgatgtaggaatatagatcatatctactaatttttataatcgatacaaaacataaaaaacaactcgttattacatagcaggcatggaatccttcaagtattgttttgataacgatggcaagaaatggattatcggaaatactttatattctggtaattcaatactctataaggtcagaaaaaatttcactagttcgttctacaattacgtaatgaagatagatcacaaatcacacaagccattgttgtctgaaatacgattctatatatctgtattggatcctttgactatcgacaactggacacgggaacgtggtataaagtatttggctattccagatctgtatggaattggagaaaccgatgattatatgttcttcgttataaagaattcgggaagagtattcgccccaaaggatactgaatcagtcttcgaagcatgcgtcactatgataaacacgttagagtttatacactctcgaggatttacccatggaaaaatagaaccgaggaatatactgattagaaataaacgtctttcactaattgactattctagaactaacaaactatacaagagtggaaactcacatatagattacaacgaggacatgataacttcaggaaatatcaattatatgtgtgtagacaatcatcttggagcaacagtttcaagacgaggagatttagaaatgttgggatattgcatgatagaatggttcggtggcaaacttccatggaaaaacgaaagtagtataaaagtaataaaacaaaaaaaagaatataaaaaatttatagctactttctttgaggactgttttcctgaaggaaatgaacctctggaattagttagatatatagaattagtatacacgttagattattctcaaactcctaattatgacagactacgtaaactgtttatacaagattgaaattatattcttttttttatagagtgtggtagtgttacggatatctaatattaatattagactatctctatcgcgctacacgaccaatatcgattactatggatatcttctatgaaaggagagaatgtatttatttctccagcgtcaatctcgtcagtattgacaatactgtattatggagctaatggatccactgctgaacagctatcaaaatatgtagaaacggaggagaacacggataaggttagcgctcagaatatctcattcaaatccatgaataaagtatatgggcgatattctgccgtgtttaaagattcctttttgagaaaaattggcgataagtttcaaactgttgacttcactgattgtcgcactatagatgcaatcaacaagtgtgtagatatctttactgaggggaaaatcaatccactattggatgaaccattgtctcctagcaattagtgccgtatactttaaagcaaaatggttgacgccattcgaaaaggaatttaccagtgattatcccttttacgtatctccgacggaaatggtagacgtaagtatgatgtctatgtacggcaaggcatttaatcacgcatctgtaaaagaatcattcggcaacttttcaatcatagaactgccatatgttggagatactagtatgatggtcattcttccagacaagattgatggattagaatccatagaacaaaatctaacagatacaaattttaagaaatggtgtgactttatggatgctatgtttatagatgttcacattcccaagtttaaggtaacaggctcgtataatctggtggatactctagtaaagtcaggactgacagaggtgttcggttcaactggagattatagcaatatgtgtaatttagatgtgagtgtcgacgctatgatccacaaaacgtatatagatgtcaatgaagagtatacagaagcagctgcagcaacttctgtactagtggcagactgtgcatcaacaattacaaatgagttctgtgcagatcatccgttcatctatgtgattaggcatgttgatggaaaaattcttttcgttggtagatattgctctccgacaactaattgttaaccattttttttaaaaaaaatagaaaaaacatgtggtattagtgcaggtcgttgttcttccaattgcaattggtaagatgacggccaactttagtacccacgtcttttcaccacagcactgtggatgtgacagactgaccagtattgatgacgtcaaacaatgtttgactgaatatatttattggtcgtcctatgcataccgcaacaggcaatgcgctggacaattgtattccacactcctctcttttagagatgatgcggaattagtgttcatcgacattcgcgagctggtaaaaaatatgccgtgggatgatgtcaaagattgtacagaaatcatccgttgttatataccggatgagcaaaaaaccatcagagagatttcggccatcatcggactttgtgcatatgctgctacttactggggaggtgaagaccatcccactagtaacagtctgaacgcattgtttgtgatgcttgagatgctaaattacgtggattataacatcatattccggcgtatgaattgatgagttgtacatcttgacattttctttcttctcttctccctttcttctcttctcccttcctccctcttctccctttcccagaaacaaacttttttacccactataaaataaaatgagtatactacctattatatttcttcctatatttttttattcttcattcgttcagacttttaacgcgtctgaatgtatcgacaaagggcaatattttgcatcattcatggagttagaaaacgagccagtaatcttaccatgtcctcaaataaatacgctatcatccggatataatatattagatattttatgggaaaaacgaggagcggataatgatagaattataccgatagataatggtagcaatatgctaattctgaacccgacacaatcagactctggtatttatatatgcattaccacgaacgaaacctactgtgacatgatgtcgttaaatttgacaatcgtgtctgtctcagaatcaaatatagatcttatctcgtatccacaaatagtaaatgagagatctactggcgaaatggtatgtcccaatattaatgcatttattgctagtaacgtaaacgcagatattatatggagcggacatcgacgccttagaaataagagacttaaacaacggacacctggaattattaccatagaagatgttagaaaaaatgatgctggttattatacatgtgttttagaatatatatacggtggcaaaacatataacgtaaccagaattgtaaaattagaggtacgggatagaataataccttctactatgcaattaccagatggcattgtaacttcaataggtagtaatttgactattgcatgcagagtatcgttgagacctcccacaacggacaccgacgtcttttggataagtaatggtatgtattacgaagaagatgatggggacggaaacggtagaataagtgtagcaaataaaatctatatgaccgataagagacgtgttattacatcccggttaaacattaatcctgtcaaggaagaagatgctacaacgtttacgtgtatggcgtttactattcctagcatcagcaaaacagttactgttagtataacgtgaatgtatgttgttacatttccatgtcaattgagtttataagaatttttatacattatcttccaacaaacaattgacgaacgtattgctatgattaactcccacgatactatgcatattattaatcattaacttgcagactatacctagtgctattttgacatactcgtgttcttgtgtaattgcggtatctatattattaaagtacgtaaatctagctatagttttattatttaattttagataatataccgtctccttatttttaaaaattgccacatcctttattaaatcatgaatgggaatttctatgtcatcgttagtatattgtgaacaacaagagcagatatctataggaaagggtggaatgcgatacattgatctatgtagttttaaaacacacgcgaactttgaagaatttatataaatcattccatcgatacatccttctatgttgacatgtatatatccaggaattcttttattaatgtcaggaaatgtataaactaaaacattgcccgaaagcggtgcctctatctgcgttatatccgttcttaacttacaaaatgtaaccaatacctttgcatgacttgttttgttcggcaacgttagtttaaacttgacgaatggattaattacaatagcatgatccgcgcatctattaagtttttttactttaacgcccttgtatgtttttacagagactttatctaaatttctagtgcttgtatgtgttataaatataacgggatatagaaccgaatcacctaccttagatacccaattacattttatcagatccagataataaacaaattttgtcgccctaactaattctatattgttatatattttacaattggttatgatatcatgtaataacttggagtctaacgcgcatcgtcgtacgtttatacaattgtgatttagtgtagtatatctacacatgtatttttccgcactatagtattctggactagtgataaaactatcgttatatctgtcttcaatgaactcatcgagatattgctctctgtcatattcatacacctgcataaactttctagacatcttacaatccgtgttattttaggatcatatttacatatttacgggtatatcaaagatgttagattagttaatgggaatcgtctataataatgaatattaaacaattatatgaggacttttaccacaaagcatcataaaaatgagtcgtcgtctgatttatgttttaaatatcaaccgcaaatcaactcataaaatacaagagaatgaaatatatacatattttagtcattgcaatatagaccatacttctacagaacttgattttgtagttaaaaactatgatctaaacagacgacaacctgtaactgggtatactgcactacactgctatttgtataataattactttacaaacgatgtactgaagatattattaaatcatgacgtaaatgtaacgatgaaaaccagtagcggacgtatgcctgtttatatattgcttactagatgttgtaatatttcacatgatgtagtgatagatatgatagacaaagataaaaaccacttattacatagagactattccaacctattactagagtatataaaatctcgttacatgttattgaaggaagaggatatcgatgagaacatagtatccactttattagataagggaatcgatcctaactttaaacaagacggatatacagcgttacattattattatttgtgtctcgcacacgtttataaactaggtgagtgtagaaaaccgataacgataaaaaaggccaagcgaattatttctttgtttatacaacatggagctaatctaaacgcgttagataattgtggtaatacaccattccatttgtatcttagtattgaaatgtgtaataatattcatatgactaaaatgctgttgacttttaatccgaatttcaaaatatgtaataatcatggattaacgcctatactatgttatataacttccgactacatacaacacgatattcttgttatgttaatacatcactatgaaacaaatgttggagaaatgccgatagatgagcgtcgtatgatcgtattcgagtttatcaaaacatattctacacgtccggcagattcgataacttatttgatgaataggtttaaaaatataaatatttatacccgctatgaaggaaagacattattacacgtagcatgtgaatataataatacacaagtaatagattatcttatacgtatcaacggagatataaatgcgttaaccgacaataacaaacacgctacacaactcattatagataacaaagaaaattccccatataccattaattgtttactgtatatacttagatatattgtagataagaatgtgataagatcgttggtggatcaacttccatctctacctatcttcgatataaaatcatttgagaaattcatatcctactgtatacttttagatgacacattttacgataggcacgttaagaatcgcgattctaaaacgtatcgatacgcattttcaaaatacatgtcgtttgataaatacgatggtataataactaaatgtcacgacgaaacaatgttactcaaactgtccactgttctagacactacactatatgcagttttaagatgtcataattcgagaaagttaagaagatacctcaacgagttaaaaaaatataataacgataagtcctttaaaatatattctaatattatgaatgagagataccttaatgtatattataaagatatgtacgtgtcaaaggtatatgataaactatttcctgttttcacagataaaaattgtctactaacattactaccttcagaaattatatacgaaatattatacatgctgacaattaacgatctttataatatatcgtatccacctaccaaagtatagttgtatttttctcatgcgatgtgtgtaaaaaaactgatattatataaatattttagtgccgtataataaagatgacgatgaaaatgatggtacatatatatttcgtatcattattgttattgctattccacagttacgccatagacatcgaaaatgaaatcacagaattcttcaataaaatgagagatactctaccagctaaagactctaaatggttgaatccagcatgtatgttcggaggcacaatgaatgatatagccgctctaggagagccattcagcgcaaagtgtcctcctattgaagacagtcttttatcgcacagatataaagactatgtggttaaatgggagaggctagaaaagaatagacggcgacaggtttctaataaacgtgttaaacatggtgatttatggatagccaactatacatctaaattcagtaaccgtaggtatttgtgcaccgtaactacaaagaatggtgactgtgttcagggtatagttagatctcatattaaaaaacctccttcatgcattccaaaaacatatgaactaggtactcatgataagtatggcatagacttatactgtggaattctttacgcaaaacattataataatataacttggtataaagataataaggaaattaatatcgacgacattaagtattcacaaacgggaaaggaattaattattcataatccagagttagaagatagcggaagatacgactgttacgttcattacgacgacgttagaatcaagaatgatatcgtagtatcaagatgtaaaatacttacggttataccgtcacaagaccacaggtttaaactaatactagatccgaaaatcaacgtaacgataggagaacctgccaatataacatgcactgctgtgtcaacgtcattattgatcgacgatgtactgattgaatgggaaaatccatccggatggcttataggattcgattttgatgtatactctgttttaactagtagaggcggtatcaccgaggcgaccttgtactttgaaaatgttactgaagaatatataggtaatacatataaatgtcgtggacacaactattattttgaaaaaacccttacaactacagtagtattggagtaaatatacaatgcatttttatatacattactgaattattattactgaattattattactgaattattattaattatatcgtatttgtgctatagaatggatgaagatacgcgactatctaggtatttgtatctcaccgatagagaacatataaatgtagactctattaaacagttgtgtaaaatatcagatcctaatgcatgttatagatgtggatgtacggctttacatgagtacttttataattatagatcagtcaacggaaaatacaagtatagatacaacggttactatcaatattattcatctagcgattatgaaaattataatgaatattattatgatagaactggtatgaacagtgagagtgataatatatcaatcaaaacagaatatgaattctatgatgaaacacaagatcaaagtacacaactagtaggttacgacattaaactcaaaaccaatgaggatgattttatggctatgatagatcagtgggtgtccatgattatatagatgaatcaattaataaagtagtatatggaagagagtctcacgtaagatggcgggatatatggcaagaacataatgatggcgtatacagtataggaaaggagtgcatagataatatatacgaagacaaccataccgtagacgaattctacaagatagacagcgtatcagatgtagatgacgcggaacacatatctccgataactaaaaaaccatagaatcagttgatgataatacctacatttctaatcttccgtataccatcaaatacaaaatattcgagcaacaataagtattttttatacctttaaaactgataaataaattttttctagtgatattttggcaagatgagaatcctatttctcatcgctttcatgtatgggtgtgttcactcatatgttaacgcggttgaaaccaaatgtccaaatctagacattgtaacatcttctggagaatttcattgttcaggatgtgtggaacatatgcctgagtttagctatatgtattggttggcaaaggatatgaaatcggacgaggataccaagtttatagaacatctgggtgatggcatcaaagaagatgaaaccgttcgtaccacagatagtggaatcgtcactctacgtaaagtccttcatgtgactgatactaataaatttgataattataggttcacttgtgtcctcgctacgctagatggcatttataaaaagaatgtttgctgaagtagttgtgtgctactatttttatttatgatataatctaatggaattaatttgaattgatatttatccaatactaaagattatattagaatcaaattaatcttttatacgagaaaaaataacgacatacgtcgtcaacaaattaaactttttatttattagttaactagcttatagaacttgctcattgttatgtttctaaaacgggtacggcatataggacaattatccgacgcaccggtttctcttcgtgttctatgccatatattgatgcatgttatgcaaaatatatgagtacacgaatccaataaaccaaagtatctatcgttttgagtaaacaacttcatagcaaattccacattctttttctttacttactctatacacgtcctcgtatttatttagtattttgatgatatccaactcagaaatggttgttgtattattgggtgtatttggagtataggtattattagctatgtaccaatttaccaaccctcttaatattgattgataatcacatcggttatccaattaataactaaattgtagtgtatatatagaccatatatgtttctatttttttgacagttacgtatagtttcagtaagttttgattgttgtattcctgtatctctagataagttagtcatatagtcccttccggcgatacgttttttccaagcccgaaattgattagccaaatgtgtatttatttttgtgatattgatataatatttcggataatgcatactgttagtcttatatcatttggttcatctatgtattgtaatattgttacatgatctatagatgatgtattgattttggcaggatcgaattccatatccgcgactaaacagtgaaaaaaatgtaaatactttttaaattttaaattagtaaaacttttttttattttttatgattccaaaaatactgaatacaaagtcctaaattataaatatggagatcatactaccacaacttattattatgtatacaaggccggtgtaatagatagatatatataattctattacaccggcagacaattaccgaccggtatttgtcgttaccaacataccgtataatatgtaatatacaattccataacccattgacagttgttatacatcaaaattgcaattcttttgattacgatgttataagaatgtagttaattgatgtatgatgttaatgtgtcctctttcctcttataacatcgtaatcaaaaacttttttataatatatacctaataatgtgtcttaatagttctcgtgattcgtcaaacaatcattcttataaaatataataaagcaacgtaaaaacacataaaaataagcgtaactaataagacaatggatatttacgacgataaaggtctacagactattaaactgtttaataatgaatttgattgtataaggaatgacatcagagaattatttaaacatgtaactgattccgatagtatacaacttccgatggaagacaattctgatattatagaaaatatcagaaaaatactatatagacgattaaaaaatgtagaatgtgttgacatcgataacacaataacttttatgaaatacgatccaaatgatgataataagcgtacgtgttctaattgggtacccttaactaataactatatggaatattgtctagtaatatatttggaaacaccgatatgtggaggcaaaataaaattataccaccctacaggaaatataaagtcggataaggatattatgtttgcaaagactctagactttaaatcaacgaaagtgttaactggacgtaaaacaattgccgttctagacatatccgtttcatataatagatcaatgactactattcactacaacgacgacgttgatatagatatacatactgataaaaatggaaaagagttatgttattgttatataacaatagatgatcattacttggttgatgtggaaactataggagttatagtcaatagatctggaaaatgtctgttagtaaataaccatctaggtataggtatcgttaaagataaacgtataagcgatagttttggagatgtatgtatggatacaatatttgacttttctgaagcacgagagttattttcattaactaatgatgataacaggaatatagcatgggacactgataaactagacgatgatacagatatatggactcccgtcacagaagatgattacaaatttctttctagactagtattgtatgcaaaatctcaatcggatactgtatttgactattatgttcttactggtgatacggaaccacccactgtattcattttcaaggtaactagattttactttaatatgccgaaataaaaaatttttgtataatatctagaggtagaggtattgtttagataaatacaaataacatagatacatcgcatacttagcatttttataaatatacataagacatacactttatacatttttgtaaaaatactcataaaaaaatttataaaaattatggcacaaccatatcttgtataggtagtttagttcgtcgagtgaacctataaacagataatagacaacacataataatgcctactaatacaagcataataccgggagatgggatatatgacgttgtagtgtttgggttttctgaacgttgatagtctactaatactacatgctgacatctaatgcctgtataaccatgagagcatctacaatacataccgtcaatatctctagcgtggatacagtcaccgtgtaaacaatatccatctccctctggaccgcataatctgatagctggaatatctgttgtagcgtttgtaatttctggcaatgtcgtttcgatagcgttaccactatcggcgaatgatctgattatcatagcagcgaacaacaacatcagataatttatcaacatttttgatggattctgtgtttatgctgtttctcagtgtgtgtttatgacaagattgggaattttatattattaattcagtaatataaactaataatatattgttaattgtgtaaataatataaaaataacaatacaatattgaatgtgttgctgttaaaaatgtatgtgttaatataatagaataaaataaatgagtatgatcattttagataacgattgattttatcattaccgcttcattcttatattctttgcttacggaacctatatttagaaacatctactaacaattttttatgcttgcattattaatggtatgtaatatgattgattgtgtacgcaataccaatttgttaagtatgaatacggggtacaaacataaattgaaatttaacattatttatttatgatatatatcgttatcgttaggtctataccatggatatctttaaagaactaatcttaaaacaccctgatgaaaatgttttgatttctccagtttccattttatctactttatctattctaaatcatggagcagctggttctacagctgaacaactatcaaaatatatagagaatatgaatgagaatacacccgatgacaataatgatgacatggaggtagatattccgtattgtgcgacactagctaccgcaaataaaatatacggtagcgatagtatcgagttccacgcctccttcctacaaaaaataaaagacgattttcaaactgtaaactttaataatgctaaccaaacaaaggaactaatcaacgaatgggttaagacaatgacaaatggtaaaattaattccttattgactagtccgctatccattaatactcgtatgacagttgttagcgccgtccattttaaagcaatgtggaaatatccattttctaaacatcttacatatacagacaagttttatatttctaagaatatagttaccagcgttgatatgatggtgggtaccgagaataacttgcaatatgtacatattaatgaattattcggaggattctctattatcgatattccatacgagggaaactctagtatggtaattatactaccggacgacatagaaggtatatataacatagaaaaaaatataacagatgaaaaatttaaaaaatggtgtggtatgttatctactaaaagtatagacttgtatatgccaaagtttaaagtggaaatgacagaaccgtataatctggtaccgattttagaaaatttaggacttactaatatattcggatattatgcagattttagcaagatgtgtaatgaaactatcactgtagaaaaatttctacatacgacgtttatagatgttaatgaggagtatacagaagcatcggccgttacaggagtatttacgattaacttttcgatggtatatcgtacgaaggtctacataaaccatccattcatgtacatgattaaagacaccacaggacgtatactttttatagggaaatactgctatccgcaataaatataaacaaatagacttttataaagagtcttcaacgataagtatatcgacatactacttatgctgcgaaagattctgaacgagaacgactatctcaccctcttggatcatatccgcactgctaaatactaaatctccactacactttttatcatcttatgaggaatgattgccttcgtgaaataggaataattagcaccagaatagctatggattattgtggtagagagtgcactattctatgtcgtctactggatgaagatgtgacgtacaaaaaaataaaactagaaattgaaacgtgtcacaacttatcaaaacatatagatagacgaggaaacaatgcgctacattgttacgtctccaataaatgcgatacagacattaagattgttctctcgcggagtcgagagactttgtagaaacaacgaaggattaactccgctaggagtatacagtaagcatagatacgtaaaatctcagattgtgcatctactgatatccagctattcaaattcctctaacgaactcaagtcgaatataaatgatttcgatctgtattcggataatatcgacttacgtctgctaaaatacctaattgtggataaacggatacgtccgtccaagaatacgaattatgcaatcaatggtctcggattggtggatatatacgtaacgacgcctaatccgagaccagaagtattgctatggcttcttaaatcagaatgttacagcaccggttacgtatttcgtacctgtatgtacgacagtgatatgtgtaagaactctcttcattactatatatcgtctcatagagaatctcaatctctatccaaggatgtaattaaatgtttgatcgataacaatgtttccatccatggcagagacgaaggaggatctttacccatccaatactactggtctttctcaaccatagatatagagattgttaaattattattaataaaggatgtggacacgtgtagagtatacgacgtcagccctatattagaggcgtattatctaaacaagcgatttagagtaaccccatataatgtagacatggaaatcgttaatcttcttattgagagacgtcatactcttgtcgacgtaatgcgtagtattacttcgtacgattccagagaatataaccactacatcatcgataacattctaaagagatttagacaacaggatgaatccatcgtacaagccatactgataaactacttacattacggcgatatggtcgttcgatgcatgttagataacggacaacaactatcctctacacgactactttgttaataataatctcgtcgatgtaaacgtcgtaaggtttatcgtggaaaatatggacacgcggctgtaaatcacgtatcgaacaatggccgtctatgtatgtacggtctgatattatcgagatttaataattgcgggtatcactgttatgaaaccatactgatagatgtatttgatatactaagcaagtacatggatgatatagatatgatcgataactctactatattacgcggtcgatgtcaataatatacaatttgcaaagcggttattggaatatggagcgagtatcacgctcgataatcaatacggccatccagaaaagcagttacagaagagaaaacaaaacgaaatcgttgttctacaagatgtctctccctacgacgattactacgtaaaaaagatactagcctactgcctattaagggacgagtcattcgcggaactacatagtaaattctgtttaaacgaggactataaaagtgtatttatgaaaaatatatcattcgataagatagattccatcatcgtgacataagtcgcctcaaagagattcgaatctccgacaccgacctgtatacggtatcacagctatcttaaagccatacattcagacagtcacatttcatttcccatgtacgacgatctcatagaacagtgccatctatcgatggagcgtaaaagtaaactcgtcgacaaagcactcaataaattagagtctaccatcggtcaatctagactatcgtatttgcctccggaaattatgcgcaatatcatctaaacagtatgttgtacggaaagaaccattacaaatattatccatgatagaaagaaaatatctatatgattggagaagtaggaaacaggaacaagacaacgattactacattattaaatcatgaagtccgtattatactcgtatatattgtttctctcatgtataataataaacggaagagatatagcaccgcatgcaccatccgatggaaagtgtaaagacaacgaatacaaacgccataatttgtgtccgggaacatacgcttccagattatgcgatagcaagactaacacacgatgtacgccgtgtggttcgggtaccttcacatctcgcaataatcatttacccgcttgtctaagttgtaacggaagacgcgatcgtgtaacacgactcacaatagaatctgtgaatgctctcccggatattattgtcttctcaaaggatcatccggatgcaaggcatgtgtttcccaaacaaaatgtggaataggatacggagtatccggagacgtcatctgttctccgtgtggtctcggaacatattctcacaccgtctcttccgcagataaatgcgaacccgtacccagaaatacgtttaactatatcgatgtggaaattaacctgtatccagttaacgacacgtcgtgtactcggacgaccactaccggtctcagcgaatccatctcaacgtcggaactaactattactatgaatcataaagactgtaatcccgtatttcgtgatggatacttctccgttcttaataaggtagcgacttcaggtttctttacaggagaaaggtgtgcactctgaatttcgagattaaatgcaataacaaagattcttcctccaaacagttaacgaaagcaaagaatgatactatcatgccgcattcggagacagtaactctagtgggcgacatctatatactatatagtaataccaatactcaagactacgaaactgatacaatctcttatcatgtgggtaatgttctcgatgtcgatagccatatgcccggtagttgcgatatacataaactgatcactaattccaaacccacccactttttatagtaagtttttcacccataaataataaatacaataattaatttctcgtaaaagtagaaaatatattctaatttattgcacggtaaggaagtagaatcataaagaacagtactcaatcaatagcaattatgaaacaatatatcgtcctggcatgcatgtgcctggcggcagctgctatgcctgccagtcttcagcaatcatcctcatcctcctcctcgtgtacggaagaagaaaacaaacatcatatgggaatcgatgttattatcaaagtcacaaagcaagaccaaacaccgaccaatgataagatttgccaatccgtaacggaaattacagagtccgagtcagatccagatcccgaggtggaatcagaagatgattccacatcagtcgaggatgtagatcctcctaccacttattactccatcatcggtggaggtctgagaatgaactttggattcaccaaatgtcctcagattaaatccatctcagaatccgctgatggaaacacagtgaatgctagattgtccagcgtgtccccaggacaaggtaaggactctcccgcgatcactcatgaagaagctcttgctatgatcaaagactgtgaagtgtctatcgacatcagatgtagcgaagaagagaaagacagcgacatcaagacccatccagtactcgggtctaacatctctcataagaaagtgagttacgaagatatcatcggttcaacgatcgtcgatacaaaatgcgtcaagaatctagagtttagcgttcgtatcggagacatgtgcaaggaatcatctgaacttgaggtcaaggatggattcaagtatgtcgacggatcggcatctgaaggtgcaaccgatgatacttcactcatcgattcaacaaaactcaaagcgtgtgtctgaatcgataactctattcatctgaaattggatgagtagggttaatcgaacgattcaggcacaccacgaattaaaaaagtgtaccggacactatattccggtttgcaaaacaaaaatgttcttaactacattcacaaaaagttacctctcgcgacttcttctttttctgtctcaatagtgtgatacgattatgacactattcctattcctattcctatttcctttcagagtatcacaaaaatattaaacctctttctgatggtctcataaaaaaagttttacaaaaatatttttattctctttctctctttgatggtctcataaaaaaagttttacaaaaatatttttattctctttctctctttgatggtctcataaaaaaagttttacaaaaatatttttattctctttctctctttgatggtctcataaaaaaagttttacaaaaatatttttattctctttctctctttgatggtctcataaaaaaagttttacaaaaatatttttattctctttctctctttgatggtctcataaaaaaagttttacaaaaatatttttattctctttctctctttgatggtctcataaaaaaagttttacaaaaatatttttattctctttctctctttgatggtctcataaaaaaagttttacaaaaatatttttattctctttctctctttgatggtctcataaaaaaagttttacaaaaatatttttattctctttctctctttgatggtctcataaaaaaagttttacaaaaatatttttattctctttctctctttgatggtctcataaaaaaagttttacaaaaatatttttattctctttctctctttgatggtctcataaaaaaagttttacaaaaatatttttattctctttctctctttgatggtctcataaaaaagttttacaaaaatatttttattctctttctctctttgatggtctcataaaaaagttttacaaaaatatttttattctctttctctctttgatggtctcataaaaaaagttttacaaaaatatttttattctctttctctctttgatggtctcataa

SEQ ID NO: 192 - DNA, 201444 bp, Artificial Sequence
  GLV-1h190
ttatgagaccatcaaagagagaaagagaataaaaatatttttgtaaaactttttttatgagaccatcaaagagagaaagagaataaaaatatttttgtaaaacttttttatgagaccatcaaagagagaaagagaataaaaatatttttgtaaaacttttttatgagaccatcaaagagagaaagagaataaaaatatttttgtaaaactttttttatgagaccatcaaagagagaaagagaataaaaatatttttgtaaaactttttttatgagaccatcaaagagagaaagagaataaaaatatttttgtaaaactttttttatgagaccatcaaagagagaaagagaataaaaatatttttgtaaaactttttttatgagaccatcaaagagagaaagagaataaaaatatttttgtaaaactttttttatgagaccatcaaagagagaaagagaataaaaatatttttgtaaaactttttttatgagaccatcaaagagagaaagagaataaaaatatttttgtaaaactttttttatgagaccatcaaagagagaaagagaataaaaatatttttgtaaaactttttttatgagaccatcaaagagagaaagagaataaaaatatttttgtaaaactttttttatgagaccatcaaagagagaaagagaataaaaatatttttgtaaaactttttttatgagaccatcaaagagagaaagagaataaaaatatttttgtaaaactttttttatgagaccatcaaagagagaaagagaataaaaatatttttgtaaaactttttttatgagaccatcagaaagaggtttaatatttttgtgatactctgaaaggaaataggaataggaataggaatagtgtcataatcgtatcacactattgagacagaaaaagaagaagtcgcgagaggtaactttttgtgaatgtagttaagaacatttttgttttgcaaaccggaatatagtgtccggtacacttttttaattcgtggtgtgcctgaatcgttcgattaaccctactcatccaatttcagatgaatagagttatcgattcagacacacgctttgagttttgttgaatcgatgagtgaagtatcatcggttgcaccttcagatgccgatccgtcgacatacttgaatccatccttgacctcaagttcagatgattccttgcacatgtctccgatacgaacgctaaactctagattcttgacgcattttgtatcgacgatcgttgaaccgatgatatcttcgtaactcactttcttatgagagatgttagacccgagtactggatgggtcttgatgtcgctgtctttctcttcttcgctacatctgatgtcgatagacacttcacagtctttgatcatagcaagagcttcttcatgagtgatcgcgggagagtccttaccttgtcctggggacacgctggacaatctagcattcactgtgtttccatcagcggattctgagatggatttaatctgaggacatttggtgaatccaaagttcattctcagacctccaccgatgatggagtaataagtggtaggaggatctacatcctcgactgatgtggaatcatcttctgattccacctcgggatctggatctgactcggactctgtaatttccgttacggattggcaaatcttatcattggtcggtgtttggtcttgctttgtgactttgataataacatcgattcccatatgatgtttgttttcttcttccgtacacgaggaggaggatgaggatgattgctgaagactggcaggcatagcagctgccgccaggcacatgcatgccaggacgatatattgtttcataattgctattgattgagtactgttctttatgattctacttccttaccgtgcaataaattagaatatattttctacttttacgagaaattaattattgtatttattatttatgggtgaaaaacttactataaaaagtgggtgggtttggaattagtgatcagtttatgtatatcgcaactaccgggcatatggctatcgacatcgagaacattacccacatgataagagattgtatcagtttcgtagtcttgagtattggtattactatatagtatatagatgtcgcccactagagttactgtctccgaatgcggcatgatagtatcattctttgctttcgttaactgtttggaggaagaatctttgttattgcatttaatctcgaaattcagagtgcacacctttctcctgtaaagaaacctgaagtcgctaccttattaagaacggagaagtatccatcacgaaatacgggattacagtctttatgattcatagtaatagttagttccgacgttgagatggattcgctgagaccggtagtggtcgtccgagtacacgacgtgtcgttaactggatacaggttaatttccacatcgatatagttaaacgtatttctgggtacgggttcgcatttatctgcggaagagacggtgtgagaatatgttccgagaccacacggagaacagatgacgtctccggatactccgtatcctattccacattttgtttgggaaacacatgccttgcatccggatgatcctttgagaagacaataatatccgggagagcattcacagattctattgtgagtcgtgttacacgatcgcgtcttccgttacaacttagacaagcgggtaaatgattattgcgagatgtgaaggtacccgaaccacacggcgtacatcgtgtgttagtcttgctatcgcataatctggaagcgtatgttcccggacacaaattatggcgtttgtattcgttgtctttacactttccatcggatggtgcatgcggtgctatatctcttccgtttattattatacatgagagaaacaatatatacgagtataatacggacttcatgatttaataatgtagtaatcgttgtcttgttcctgtttcctacttctccaatcatatagatattttctttctatcatggataatatttgtaatggttctttccgtacaacatactgtttagatgatattgcgcataatttccggaggcaaatacgatagtctagattgaccgatggtagactctaatttattgagtgctttgtcgacgagtttacttttacgctccatcgatagatggcactgttctatgagatcgtcgtacatgggaaatgaaatgtgactgtctgaatgtatggctttaagatagctgtgataccgtatacaggtcggtgtcggagattcgaatctctttgaggcgacttatgtcacgatgatggaatctatcttatcgaatgatatatttttcataaatacacttttatagtcctcgtttaaacagaatttactatgtagttccgcgaatgactcgtcccttaataggcagtaggctagtatcttttttacgtagtaatcgtcgtagggagagacatcttgtagaacaacgatttcgttttgttttctcttctgtaactgcttttctggatggccgtattgattatcgagcgtgatactcgctccatattccaataaccgctttgcaaattgtatattattgacatcgaccgcgtaatatagtagagttatcgatcatatctatatcatccatgtacttgcttagtatatcaaatacatctatcagtatggtttcataacagtgatacccgcaattattaaatctcgataatatcagaccgtacatacatagacggccattgttcgatacgtgatttacagccgcgtgtccatattttccacgataaaccttacgacgtttacatcgacgagattattattaacaaagtagtcgtgtagaggatagttgttgtccgttatctaacatgcatcgaacgaccatatcgccgtaatgtaagtagtttatcagtatggcttgtacgatggattcatcctgttgtctaaatctctttagaatgttatcgatgatgtagtggttatattctctggaatcgtacgaagtaatactacgcattacgtcgacaagagtatgacgtctctcaataagaagattaacgatttccatgtctacattatatggggttactctaaatcgcttgtttagataatacgcctctaatatagggctgacgtcgtatactctacacgtgtccacatcctttattaataataatttaacaatctctatatctatggttgagaaagaccagtagtattggatgggtaaagatcctccttcgtctctgccatggatggaaacattgttatcgatcaaacatttaattacatccttggatagagattgagattctctatgagacgatatatagtaatgaagagagttcttacacatatcactgtcgtacatacaggtacgaaatacgtaaccggtgctgtaacattctgatttaagaagccatagcaatacttctggtctcggattaggcgtcgttacgtatatatccaccaatccgagaccattgattgcataattcgtattcttggacggacgtatccgtttatccacaattaggtattttagcagacgtaagtcgatattatccgaatacagatcgaaatcatttatattcgacttgagttcgttagaggaatttgaatagctggatatcagtagatgcacaatctgagattttacgtatctatgcttactgtatactcctagcggagttaatccttcgttgtttctacaaagtctctcgactccgcgagagaacaatcttaatgtctgtatcgcatttattggagacgtaacaatgtagcgcattgtttcctcgtctatctatatgttttgataagttgtgacacgtttcaatttctagttttatttttttgtacgtcacatcttcatccagtagacgacatagaatagtgcactctctaccacaataatccatagctattctggtgctaattattcctatttcacgaaggcaatcattcctcataagatgataaaaagtgtagtggagatttagtatttagcagtgcggatatgatccaagagggtgagatagtcgttctcgttcagaatctttcgcagcataagtagtatgtcgatatacttatcgttgaagactctttataaaagtctatttgtttatatttattgcggatagcagtatttccctataaaaagtatacgtcctgtggtgtctttaatcatgtacatgaatggatggtttatgtagaccttcgtacgatataccatcgaaaagttaatcgtaaatactcctgtaacggccgatgcttctgtatactcctcattaacatctataaacgtcgtatgtagaaatttttctacagtgatagtttcattacacatcttgctaaaatctgcataatatccgaatatattagtaagtcctaaattttctaaaatcggtaccagattatacggttctgtcatttccactttaaactttggcatatacaagtctatacttttagtagataacataccacaccattttttaaatttttcatctgttatatttttttctatgttatatataccttctatgtcgtccggtagtataattaccatactagagtttccctcgtatggaatatcgataatagagaatcctccgaataattcattaatatgtacatattgcaagttattctcggtacccaccatcatatcaacgctggtaactatattcttagaaatataaaacttgtctgtatatgtaagatgtttagaaaatggatatttccacattgctttaaaatggacggcgctaacaactgtcatacgagtattaatggatagcggactagtcaataaggaattaattttaccatttgtcattgtcttaacccattcgttgattagttcctttgtttggttagcattattaaagtttacagtttgaaaatcgtcttttattttttgtaggaaggaggcgtggaactcgatactatcgctaccgtatattttatttgcggtagctagtgtcgcacaatacggaatatctacctccatgtcatcattattgtcatcgggtgtattctcattcatattctctatatattttgatagttgttcagctgtagaaccagctgctccatgatttagaatagataaagtagataaaatggaaactggagaaatcaaaacattttcatcagggtgttttaagattagttctttaaagatatccatggtatagacctaacgataacgatatatatcataaataaataatgttaaatttcaatttatgtttgtaccccgtattcatacttaacaaattggtattgcgtacacaatcaatcatattacataccattaataatgcaagcataaaaaattgttagtagatgtttctaaatataggttccgtaagcaaagaatataagaatgaagcggtaatgataaaatcaatcgttatctaaaatgatcatactcatttattttattctattatattaacacatacatttttaacagcaacacattcaatattgtattgttatttttatattatttacacaattaacaatatattattagtttatattactgaattaataatataaaattcccaatcttgtcataaacacacactgagaaacagcataaacacagaatccatcaaaaatgttgataaattatctgatgttgttgttcgctgctatgataatcagatcattcgccgatagtggtaacgctatcgaaacgacattgccagaaattacaaacgctacaacagatattccagctatcagattatgcggtccagagggagatggatattgtttacacggtgactgtatccacgctagagatattgacggtatgtattgtagatgctctcatggttatacaggcattagatgtcagcatgtagtattagtagactatcaacgttcagaaaacccaaacactacaacgtcatatatcccatctcccggtattatgcttgtattagtaggcattattatgtgttgtctattatctgtttataggttcactcgacgaactaaactacctatacaagatatggttgtgccataatttttataaatttttttatgagtatttttacaaaaatgtataaagtgtatgtcttatgtatatttataaaaatgctaagtatgcgatgtatctatgttatttgtatttatctaaacaatacctctacctctagatattatacaaaaattttttatttcggcatattaaagtaaaatctagttaccttgaaaatgaatacagtgggtggttccgtatcaccagtaagaacataatagtcaaatacagtatccgattgagattttgcatacaatactagtctagaaagaaatttgtaatcatcttctgtgacgggagtccatatatctgtatcatcgtctagtttatcagtgtcccatgctatattcctgttatcatcattagttaatgaaaataactctcgtgcttcagaaaagtcaaatattgtatccatacatacatctccaaaactatcgcttatacgtttatctttaacgatacctatacctagatggttatttactaacagacattttccagatctattgactataactcctatagtttccacatcaaccaagtaatgatcatctattgttatataacaataacataactcttttccatttttatcagtatgtatatctatatcaacgtcgtcgttgtagtgaatagtagtcattgatctattatatgaaacggatatgtctagaacggcaattgttttacgtccagttaacactttcgttgatttaaagtctagagtctttgcaaacataatatccttatccgactttatatttcctgtagggtggtataattttattttgcctccacatatcggtgtttccaaatatattactagacaatattccatatagttattagttaagggtacccaattagaacacgtacgcttattatcatcatttggatcgtatttcataaaagttattgtgttatcgatgtcaacacattctacattttttaatcgtctatatagtatttttctgatattttctataatatcagaattgtcttccatcggaagttgtatactatcggaatcagttacatgtttaaataattctctgatgtcattccttatacaatcaaattcattattaaacagtttaatagtctgtagacctttatcgtcgtaaatatccattgtcttattagttacgcttatttttatgtgtttttacgttgctttattatattttataagaatgattgtttgacgaatcacgagaactattaagacacattattaggtatatattataaaaaagtttttgattacgatgttataagaggaaagaggacacattaacatcatacatcaattaactacattcttataacatcgtaatcaaaagaattgcaattttgatgtataacaactgtcaatgggttatggaattgtatattacatattatacggtatgttggtaacgacaaataccggtcggtaattgtctgccggtgtaatagaattatatatatctatctattacaccggccttgtatacataataataagttgtggtagtatgatctccatatttataatttaggactttgtattcagtatttttggaatcataaaaaataaaaaaaagttttactaatttaaaatttaaaaagtatttacatttttttcactgtttagtcgcggatatggaattcgatcctgccaaaatcaatacatcatctatagatcatgtaacaatattacaatacatagatgaaccaaatgatataagactaacagtatgcattatccgaaatattatatcaatatcacaaaaataaatacacatttggctaatcaatttcgggcttggaaaaaacgtatcgccggaagggactatatgactaacttatctagagatacaggaatacaacaatcaaaacttactgaaactatacgtaactgtcaaaaaaatagaaacatatatggtctatatatacactacaatttagttattaattggataaccgatgtgattatcaatcaatattaagagggttggtaaattggtacatagctaataatacctatactccaaatacacccaataatacaacaaccatttctgagttggatatcatcaaaatactaaataaatacgaggacgtgtatagagtaagtaaagaaaaagaatgtggaatttgctatgaagttgtttactcaaaacgatagatactttggtttattggattcgtgtactcatatattttgcataacatgcatcaatatatggcatagaacacgaagagaaaccggtgcgtcggataattgtcctatatgccgtacccgttttagaaacataacaatgagcaagttctataagctagttaactaataaataaaaagtttaatttgttgacgacgtatgtcgttattttttctcgtataaaagattaatttgattctaatataatctttagtattggataaatatcaattcaaattaattccattagattatatcataaataaaaatagtagcacacaactacttcagcaaacattctttttataaatgccatctagcgtagcgaggacacaagtgaacctataattatcaaatttattagtatcagtcacatgaaggactttacgtagagtgacgattccactatctgtggtacgaacggtttcatcttctttgatgccatcacccagatgttctataaacttggtatcctcgtccgatttcatatcctttgccaaccaatacatatagctaaactcaggcatatgttccacacatcctgaacaatgaaattctccagaagatgttacaatgtctagatttggacatttggtttcaaccgcgttaacatatgagtgaacacacccatacatgaaagcgatgagaaataggattctcatcttgccaaaatatcactagaaaaaatttatttatcagttttaaaggtataaaaaatacttattgttgctcgaatattttgtatttgatggtatacggaagattagaaatgtaggtattatcatcaactgattctatggttttatgtattctatcatgtttcactattgcgttggaaataatatcatatgcttccacatatattttattttgttttaactcataatactcacgtaattctggattattggcatatctatgaataattttagctccatgatcagtaaatattaatgagaacatagtattaccacctaccattatttttttcatctcattcaattcttaattgcaaagatctatataatcattatagcgttgacttatggactctggaatcttagacgatgtacagtcatctataatcatggcatatttaatacattgttttatagcatagtcgttatctacgatgttagatatttctctcaatgaatcaatcacacaatctaatgtaggtttatgacataatagcattttcagcagttcaatgtttttagattcgttgatggcaatggctatacatgtatatccgttatttgatctaatgttgacatctgaaccggattctagcagtaaagatactagagattgtttattatatctaacagccttgtgaagaagtgtttctcctcgtttgtcaatcatgttaatgtctttaagataaggtaggcaaatgtttatagtactaagaattgggcaagcataagacatgtcacaaagacccttttttgtatgtataagtgtaaaaattataacatccatagttggatttacataggtgtccaatcgggatctctccatcatcgagataattgatggcatctcccttccttttttagtagatatttcatcgtgtaagaatcaatattaatatttctaaagtatccgtgtatagcctctttatttaccacagctccatattccactagagggatatcgccgaatgtcatatactcaattagtatatgttggaggacatccgagttcattgttttcaatatcaaagagatggtttccttatcatttctccatagtggtacaatactacacattattccgtgcggctttccattttccaaaaacaatttgaccaaatctaaatctacatctttattgtatctataatcactatttagataatcagccataattcctcgagtgcaacatgttagatcgtctatatatgaataagcagtgttatctattcctttcattaacaatttaacgatgtctatatctatatgagatgacttaatataatattgaagagctgtacaatagtttttatctataaaagacggcttgattccgtgattaattagacatttaacaacttccggacgcacatatgctctcgtatccgactctgaatacagatgagagatgatatacagatgcaatacggtaccgcaatttcgtagttgataatcatcatacgcgtatcagtactcgtcctcataaagaacactgcagccattttctatgaacaaatcaataattttagaaacaggatcattgtcattacataattttctataactgaacgatggttttcacatttaacactcaagtcaaatccatgttctaccaacacctttatcaagtcaacgtctacatttttggatttcatatagctgaatatattaaagttatttatgttgctaaatccagtggcttctagtagagccatcgctatatccttattaactttaacatgtctactatttgtgtattcttctaatggggtaagctgtctccaatttttgcgtaatggattagtgccactgtctagtagtagtttgacgacctcgacattattacaatgctcattaaaaaggtatgcgtgtaaagcattattcttgaattggttcctggtatcattaggatctctgtctttcaacatctgtttaagttcatcaagagccacctcctcattttccaaatagtcaaacattttgactgaatgagctactgtgaactctatacacccacacaactaatgtcattaaatatcatgtcaaaaacttgtacaattattaataaaaataatttagtgtttaaattttaccagttccagattttacacctccgttaatacctccattaaccccactggacgatcctcctccccacattccaccgccaccagatgtataagttttagatcctttattactaccatcatgtccatggataaagacactccacatgccgccactaccccctttagaagacatattaataagacttaaggacaagtttaacaataaaattaatcacgagtaccctactaccaacctacactattatatgattatagtttctatttttacagtaccttgactaaagtttctagtcacaagagcaatactaccaacctacactattatatgattatagtttctatttttataggaacgcgtacgagaaaatcaaatgtctaatttctaacggtagtgttgataaacgattgttatccgcggatacctcctctatcatgtcgtctattttcttactttgttctattaacttattagcattatatattatttgattataaaacttatattgcttattagcccaatctgtaaatatcggattattaacatatcgtttctttgtaggtttatttaacatgtacatcactgtaagcatgtccttaccatttattttaatttgacgcatatccgcaatttctttttcgcagtcggttataaattctatatatgatggatacatgctacatgtgtacttataatcgactaatatgaagtacttgatacatattttcagtaacgatttattattaccacctatgaataagtacctgtgatcgtctaggtaatcaactgttttcttaatacattcgatggttggtaatttactcagaataatttccaatatcttaatatataattctgctatttctgggatatatttatctgccagtataacacaaatagtaatacatgtaaacccatattttgttattatattaatgtctgcgccattatctattaaccattctactaggctgacactatgcgactcaatacaatgataaagtatactacatccatgtttatctattttgtttatatcatcaatatacggcttacaaagttttagtatcgataacacatccaactcacgcatagagaaggtagggaataatggcataatatttattaggttatcatcattgtcattatctacaactaagtttccattttttaaaatatactcgacaactttaggatctctattgccaaatttttgaaaatatttatttatatgcttaaatctatataatgtagctccttcatcaatcatacatttaataacattgatgtatactgtatgataagatacatattctaacaatagatcttgtatagaatctgtatatcttttaagaattgtggatattaggatattattacataaactattacacaattctaaaatataaaacgtatcacggtcgaataatagttgatcaactatataattatcgattttgtgatttttcttcctaaactgtttacgtaaatagttagatagaatattcattagttcatgaccactatagttactatcgaataacgcgtcaaatatttcccgtttaatatcgcatttgtcaagataataatagagtgtggtatgttcacgataagtataataacgcatctctttttcgtgtgaaattaaatagtttattacgtccaaagatgtagcataaccatcttgtgacctagtaataatataataatagagaactgttttacccattctatcatcataatcagtggtgtagtcgtaatcgtaatcgtctaattcatcatcccaattataatattcaccagcacgtctaatctgttctattttgatcttgtatccatactgtatgttgctacatgtaggtattcctttatccaataatagtttaaacacatctacattgggatttgatgttgtagcgtatttttctacaatattaataccatttttgatactatttatttctatacctttcgaaattagtaatttcaataagtctatattgatgttatcagaacatagatattcgaatatatcaaaatcattgatatttttatagtcgactgacgacaataacaaaatcacaacatcgtttttgatattattatttttcttggtaacgtatgcctttaatggagtttcaccatcatactcatataatggatttgcaccactttctatcaatgattgtgcactgctggcatcgatgttaaatgttttacaactatcatagagtatcttatcgttaaccatgattggttgttgatgctatcgcattttttggtttctttcatttcagttatgtatggatttagcacgtttgggaagcatgagctcatatgatttcagtactgtagtgtcagtactattagtttcaataagatcaatctctagatctatagaatcaaaacacgataggtcagaagataatgaatatctgtaggcttcttgttgtactgtaacttctggttttgttagatggttgcatcgtgctttaacgtcaatggtacaaattttatcctcgctttgtgtatcatattcgtccctactataaaattgtatattcagattatcatgcgatgtgtatacgctaacggtatcaataaacggagcacaccatttagtcataaccgtaatccaaaaatttttaaagtatatcttaacgaaagaagttgtgtcattgtctacggtgtatggtactagatcctcataagtgtatatatctagagtaatgtttaatttattaaatggttgataatatggatcctcgtgacaatttccgaagatggaaataagacataaacacgcaataaatctaattgcggacatggttactccttaaaaaaatacgaataatcaccttggctatttagtaagtgtcatttaacactatactcatattaatccatggactcataatctctatacgggattaacggatgttctatatacggggatgagtagttctcttctttaactttatactttttactaatcatatttagactgatgtatgggtaatagtgtttgaagagctcgttctcatcatcagaataaatcaatatctctgtttttttgttatacagatgtattacagcctcatatattacgtaatagaacgtgtcatctaccttattaactttcaccgcatagttgtttgcaaatacggttaatcctttgacctcgtcgatttccgaccaatctgggcgtataatgaatctaaactttaattgcttgtaatcattcgaaataatttttagtttgcatccgtagttatcccctttatgtaactgtaaatttctcaacgcgatatctccattaataatgatgtcgaattcgtgctgtatacccatactgaatggatgaacgaataccgacggcgttaatagtaatttactttttcatctttacatattgggtactagttttactatcataagtttataaattccacaagctactatggaataagccaaccatcttagtataccacacatgtcttaaagtttattaattaattacatgttgttttatatatatcgctacgaatttaaagagaaattagtttaggaagaaaaattatctatctacatcatcacgtctctgtattctacgatagagtgctactttaagatgcgacagatccgtgtcatcaaatatatactccattaaaatgattattccggcagcgaacttgatattggatatatcacaacctttgttaatatctacgacaatagacagcagtcccatggttccataaacagtgagtttatctttctttgaagagatattttgtagagatcttataaaactgtcgaatgacatcgcatttatatctttagctaaatcgtatatgttaccatcgtaatatctaaccgcgtctatcttaaacgtttccatcgctttaaagacgtttccgatagatggtctcatttcatcagtcatactgagccaacaaatataatcgtgtataacatctttgatagaatcagactctaaagaaaacgaatcggctttattatacgcattcatgataaacttaatgaaaaatgtttttcgttgtttaagttggatgaatagtatgtcttaataattgttattatttcattaattaatatttagtaacgagtacactctataaaaacgagaatgacataactaatcataactagttatcaaagtgtctaggacgcgtaattttcatatggtatagatcctgtaagcattgtctgtattctggagctattttctctatcgcattagtgagttcagaatatgttataaatttaaatcgaataacgaacataactttagtaaagtcgtctatattaactcttttattttctagccatcgtaataccatgtttaagatagtatattctctagttactacgatctcatcgttgtctagaatatcacatactgaatctacatccaattttagaaattggtctgtgttacatatctcttctatattattgttgatgtattgtcgtagaaaactattacgtagaccattttctttataaaacgaatatatagtactccaattatctttaccgatatatttgcacacataatccattctctcaatcactacatctttaagattttcgttgttaagatatttggctaaactatataattctattagatcatcaacagaatcagtatatatttttctagatccaaagacgaactctttggcgtcctctataatattcccagaaaagatattttcgtgttttagtttatcgagatctgatctgttcatatacgccatgattgtacggtacgttatgataaccgcataaaataaaaatccattttcatttttaaccaatactattcataattgagattgatgtaatactttgttactttgaacgtaaagacagtacacggatccgtatctccaacaagcacgtagtaatcaaatttggtgttgttaaacttcgcaatattcatcaatttagatagaaacttatactcatcatctgttttaggaatccatgtattattaccactttccaacttatcattatcccaggctatgtttcgtccatcatcgttgcgcagagtgaataattcttttgtattcggtagttcaaatatatgatccatgcatagatcggcaaagctattgtagatgtgatttttcctaaatctaatataaaactcgtttactagcaaacactttcctgatttatcgaccaagacacatatggtttctaaatctatcaagtggtggggatccatagttatgacgcagtaacatatattattacattcttgactgtcgctaatatctaaatatttattgttatcgtattggattctgcatatagatggcttgtatgtcaaagatatagaacacataaccaatttatagtcgcgctttacattctcgaatctaaagttaagagatttagaaaacattatatcctcggatgatgttatcactgtttctggagtaggatatattaaagtctttacagatttcgtccgattcaaataaatcactaaataatatcccacattatcatctgttagagtagtatcattaaatctattatattttatgaaagatatatcactgctcacctctatatttcgtacatttttaaactgtttgtataatatctctctgatacaatcagatatatctattgtgtcggtagacgataccgttacatttgaattaatggtgttccattttacaacttttaacaagttgaccaattcatttctaatagtatcaaactctccatgattaaatattttaatagtatccattttatatcactacggacacaaagtagctgacataaaccattgtataatttttatgttttatgtttattagcgtacacattttggaagttccggcttccatgtatttcctggagagcaagtagatgatgaggaaccagatagtttatatccgtacttgcacttaaagtctacattgtcgttgtatgagtatgatcttttaaacccgctagacaagtatccgtttgatattgtaggatgtggacatttaacaatctgacacgtgggtggatcggaccattctcctcctgaacacaggacactagagttaccaatcaacgaatatccactattgcaactataagttacaacgctcccatcggtataaaaatcctcgtatccgttatgtcttccgttggatatagatggaggggattggcatttaacagattcacaaataggtgcctcgggattccataccatagatccagtagatcctaattcacaatacgatttagattcaccgatcaactgatatccgctattacaagagtacgttatactagagccaaagtctactccaccaatatcaagttggccattatcgatatctcgaggcgatgggcatctccgtttaatacattgattaaagagtgtccatccagtacctgtacatttagcatatataggtcccattttttgctttctgtatccaggtagacatagatattctatagtgtctcctatgttgtaattagcattagcatcagtctccacactattcttaaatttcatattaatgggtcgtgacggaatagtacagcatgatagaacgcatcctattcccaacaatgtcaggaacgtcacgctctccaccttcatatttatttatccgtaaaaatgttatcctggacatcgtacaaataataaaaagcccatatatgttcgctattgtagaaattgtttttcacagttgctcaaaaacgatggcagtgacttatgagttacgttacactttggagtctcatctttagtaaacatatcataatattcgatattacgagttgacatatcgaacaaattccaagtatttgattttggataatattcgtattttgcatctgctataattaagatataatcaccgcaagaacacacgaacatctttcctacatggttaaagtacatgtacaattctatccatttgtcttccttaactatatatttgtatagataattacgagtctcgtgagtaattccagtaattacatagatgtcgccgtcgtactctacagcataaactatactatgatgtctaggcatgggagacttttttatccaacgatttttagtgaaacattccacatcgtttaatactacatatttctcatacgtggtataaactccacccattacatatatatcatcgtttacgaataccgacgcgcctgaatatctaggagtaattaagtttggaagtcttatccatttcgaagtgccgtgtttcaaatattctgccacacccgttgaaatagaaaattctaatcctcctattacatataactttccatcgttaacacaagtactaacttctgattttaacgacgacatattagtaaccgttttccattttttcgttttaagatctacccgcgatacggaataaacatgtctattgttaatcatgccgccaataatgtatagacaattatgtaaaacatttgcattatagaattgtctatctgtattaccgactatcgtccaatattctgttctaggagagtaatgggttattgtggatatataatcagagtttttaatgactactatattatgttttataccatttcgtgtcactggctttgtagatttggatatagttaatcccaacaatgatatagcattgcgcatagtattagtcataaacttgggatgtaaaatgttgatgatatctacatcgtttggatttttatgtatccactttaataatatcatagctgtaacatcctcatgatttacgttaacgtcttcgtgggataagatagttgtcagttcatcctttgataattttccaaattctggatcggatgtcaccgcagtaatattgttgattatttctgacatcgacgcattatatagttttttaattccatatcttttagaaaagttaaacatccttatacaatttgtgaaattaatattatgaatcatagtttttacacatagatctactacaggcggaacatcaattattatggcagcaactagtatcatttctacattgtttatggtgatgtttatcttcttccagcgcatatagtctaatagcgattcaaacgcgtgatagtttataccattcaatataatcgcttcatcctttagatggtgatcctgaatgcgtttaaaaaaattatacggagacgccgtaataatttccttattcacttgtataatttccccattgatagaaaatattacgctttccattcttaaagtactataagtaattatagtataatgtaaacgtttatatattcaatatttttataaaaatcattttgacattaattcctttttaaatttccgtctatcatctatagaaacgtattctatgaatttataaaatgcttttacgtgtcctatcgtaggcgatagaaccgctaaaaagcctatcgaatttctacaaaagaatctgttatatggtatagggagagtataaaacattaaatgtccgtacttattaaagtattcagtagccaatcctaactctttcgaatacttattaatggctcttgttctgtacgaatctatttttttgaacaacggacctagtggtatatcttgttctatgtatctaaaataatgtctgactagatccgttagtttaatatccgcagtcatcttgtctagaatggcaaatctaactgcgggtttaggctttagtttagtttctatatctacatctatgtctttatctaacaccaaaaatataatagctaatattttattacaatcatccggatattcttctacgatctcactaactaatgtttctttggttatactagtatagtcactatcggacaaataaagaaaatcagatgatcgatgaataatacatttaaattcatcatctgtaagatttttgagatgtctcattagaatattattagggttagtactcattatcattcggcagctattacttattttattatttttcaccatatagatcaatcattagatcatcaaaatatgtttcaatcatcctaaagagtatggtgaatgactcttcccatctaatttctgaacgttcaccaatgtctctagccactttggcactaatagcgatcattcgcttagcgtcttctatattattaactggttgatttaatctatctagcaatggaccgtcggacagcgtcattctcatgttcttaatcaatgtacatacatcgccgtcatctaccaattcatccaacaacataagctttttaaaatcatcattataataggtttgatcgttgtcatttctccaaagaatatatctaataagtagagtcctcatgcttagttaacaactattttttatgttaaatcaattagtacaccgctatgtttaatacttattcatattttagtttttaggattgagaatcaatacaaaaattaatgcatcattaattttagaaatacttagtttccacgtagtcaatgaaacatttgaactcatcgtacaggacgttctcgtacaggacgtaactataaaccggtttatatttgttcaagatagatacaaatccgataactttttttacgaattctacgggatccactttaaaagtgtcataccgggttctttttatttttttaaacagatcaatggtgtgatgttgattaggtcttttacgaatttgatatagaatagcgtttacatattctccataatggtcaatcgccatttgttcgtatgtcataaattctttaattatatgacactgtgtattatttagttcatccttgttcattgttaggaatctatccaaaatggcaattatactagaactataggtgcgttgtatacacatattgatgtgtctgtttatacaatccatgatatttggatccatgctactaccttcgggtaaaattgtagcatcatataccatttctagtactttaggttcattattatccattgcagaggacgtcatgatcgaatcataaaaaaatatattatttttatgttattttgttaaaaataatcatcgaatacttcgtaagatactccttcatgaacataatcagttacaaaacgtttatatgaagtaaagtatctacgatttttacaaaagtccggatgcataagtacaaagtacgcgataaacggaataataatagatttatctagtctatctttttctatagctttcatagttagatacatggtctcagaagtaggattatgtaacatcagcttcgataaaatgactgggttatttagtcttacacattcgctcatacatgtatgaccgttaactacagagtctacactaaaatgattgaacaatagatagtctaccattgtttcgtattcagatagtacagcgtagtacatggcatcttcacaaattatatcattgtctaatagatatttgacgcatcttatggatcccacttcaacagccatcttaaaatcatattgctttcctttatcattaataatttctagaacatcatctctatcataaaagatacaaatattaactgtttgatccgtaataacattgctagtcaatagcaatttgttaataagatgcgctgggctcaatgtcttaataagaagtgtaagaggactatctccgaatttgttttgtttattaacatccgttgatggaagtaaaagatctataatgtctacattcttgactgttttagagcatacaatatggagaggtgtatttccatcatgatctggttttgagggactaattcctagtttcatcatccatgagattgtagaagcttttggattgtctgacataagatgtctatgaatatgatttttgccaaatttatccactatcctggcttcgaatccgatggacattatttttttaaacactctttctgaaggatctgtacacgccaacaacggaccacatccttcttcatcaaccgagttgttaatcttggctccatactgtaccaataaatttattctctctatgacttcatcatctgttcccgagagataatatagaggtgttttatgctgtttatcacacgcgtttggatctgcgccgtgcgtcagcagcatcgcgactattctattattattaattttagaagctatatgcaatggataatttccatcatcatccgtctcatttggagagtatcctctatgaagaagttcttcgacaaatcgttcatctagtcctttaattccacaatacgcatgtagaatgtgataattatttccagaaggttcgatagcttgtagcatattcctaaatacatctaaatttttactattatatttggcataaagagatagataatactcggccgacataatgttgtccattgtagtataaaaattaatatttctatttctatttctgtatatttgcaacaatttactctctataacaaatatcataacttagtttttttatgtcaagaaggcactggtttagttcatctataaatgtcacgccataactaccacgcatgccatactcagaattatgataaagatatttatccttggggtgtaggtaatggggattaatctttgttggatcagtctctaagttaacacatgtcacacatgatccatttatagttatatcacacgatgatgatttatgaattgattccggaagatcgctatcgtattttgtggttccacaattcatttccatacatgttattgtcacactaatattatgatgaactttatctagccgctgagtggtaaacaacagaacagatagtttattatctttaccaacaccctcagccgctgccacaaatctctgatccgtatccatgatggtcatgtttatttctagtccgtatccagtcaacactatgttagcatttctgtcgatatagctttcactcatatgacactcaccaataatagtagaattaatgtcgtaatttacaccaatagtgagttcggcggcaaagtaccaataccggtaatcttgtcgaggaggacatatagtattcttgtattctaccgaatacccgagagatgcgatacaaaagagcaagactaatttgtaaaccatcttactcaaaatatgtaacaatagtacgatgcaatgagtaagacaataggaaatctatcttatatacacataattattctatcaattttaccaattagttagtgtaatgttaacaaaaatgtgggagaatctaattagtttttctttacacaattgacgtacatgagtctgagttccttgtttttgctaattatttcatccaatttattattcttgacgatatcgagatcttttgtataggagtcaaacttgtattcaacatgcttttctataatcattttagctatttcggcatcatccaatagtacattttccagattagcagaatagatattaatgtcgtatttgaacagagcctgtaacatctcaatgtctttattatctatagccaatttaatgtccggaatgaagagaagggaattattggtgtttgtcgacgtcatatagtcgagcaagagaatcatcatatccacgtgtccattttttatagtgatgtgaatacaactaaggagaatagccagatcaaaagtagatggtatctctgaaagaaagtaggaaacaatacttacatcattaagcatgacggcatgataaaatgaagttttccatccagttttcccatagaacatcagtctccaatttttcttaacaaacagttttaccgtttgcatgttaccactatcaaccgcataatacaatgcggtgtttcccttgtcatcaaattgtgaatcatccagtccactgaatagcaaaatctttactattttggtatcttccaatgtggctgcctgatgtaatggaaattcattctctagaagatttttcaatgctccagcgttcaacaacgtacatactagacgcacgttattatcagctattgcataatacaaggcactatgtccatggacatccgccttaaatgtatctttactagagagaaagcttttcagctgcttagacttccaagtattaattcgtgacagatccatgtctgaaacgagacgctaattagtgtatattttttcattttttataattttgtcatattgcaccagaattaataatatctttaatagatctgattagtagatacatggctatcgcaaaacaacatatacacatttaataaaaataatatttattaagaaaattcagatttcacgtacccatcaatataaataaaataatgattccttacaccgtacccatattaaggagattccaccttacccataaacaatataaatccagtaatatcatgtctgatgatgaacacaaatggtgtattaaattccagtttttcaggagatgatctcgccgtagctaccataatagtagatgcctctgctacagttccttgttcgtcgacatctatctttgcattctgaaacattttataaatatataatgggtccctagtcatatgtttaaacgacgcattatctggattaaacatactaggagccatcatttcggctatcgacttaatatccctcttattttcgatagaaaatttagggagtttaagattgtacactttattccctaattgagacgaccaatagtctaattttgcagccgtgatagaatctgtgaaatgggtcatattatcacctattgccaggtacatactaatattagcatccttatacggaaggcgtaccatgtcatattctttgtcatcgattgtgattgtatttccttgcaatttagtaactacgttcatcatgggaaccgttttcgtaccgtacttattagtaaaactagcattgcgtgttttagtgatatcaaacggatattgccatatacctttaaaatatatagtattaatgattgcccatagagtattattgtcgagcatattagaatctactacattagacataccggatctacgttctactatagaattaattttattaaccgcatctcgtctaaagtttaatctatataggccgaatctatgatattgttgataatacgacggtttaatgcacacagtattatctacgaaactttgataagttagatcagtgtacgtatatttagatgttttcagcttagctaatcctgatattaattctgtaaatgctggacccagatctctttttctcaaatccatagtcttcaataattctattctagtattacctgatgcaggcaatagcgacataaacatagaaaacgaataaccaaacggtgagaagacaatattatcatcttgaatatttttatacgctactataccggcattggtaaatccttgtagacgataggcggacgctgaacacgctaacgatagtatcaataacgcaatcatgattttatggtattaataattaaccttatttttatgttcggtataaaaaaattattgatgtctacacatccttttgtaattgacatctatatatccttttgtataatcaactctaatcactttaacttttacagttttccctaccagtttatccctatattcaacatatctatccatatgcatcttaacactctctgccaagatagcttcagagtgaggatagtcaaaaagataaatatatagagcataatcattctcgtatactctgccctttattacatcacccgcattgggcaacgaataacaaaatgcaagcatcttgttaacgggctcgtaaattgggataaaaattatgtttttattgtcttatatctattttattcaagagaatattcaggaatttctttttccggttgtatctcgtcgcagtatatatcatttgtacattgtttcatattttttaatagtttacaccttttagtaggactagtatcgtacaattcatagctgtattttgaattccaatcacgcataaaaatatcttccaattgttgacgaagacctaatccatcatccggtgtaatattaatagatgctccacatgtatccgtaaagtaatttcctgtccaatttgaggtacctatataggccgttttatcggttaccatatatttggcatggtttaccctagaatacggaatgggaggatcagcatctggtacaataaatagctttacttctatatttatgtttttagattttagcatagcgatagatcttaaaaagtttctcatgataaacgaagatcgttgccagcaactaatcaatagcttaacggatacttgtctgtctatagcggatcttcttaattcatcttctatataaggccaaaacaaaattttacccgccttcgaataaataatagggataaagttcataacagatacataaacgaatttactcgcatttctaatacatgacaataaagcggttaaatcattggttctttccatagtacatagttgttgcggtgcagaagcaataaatacagagtgtggaacgccgcttacgttaatactaagaggatgatctgtattataatacgacggataaaagtttttccaattatatggtagattgttaactccaagataccagtatacctcaaaaatttgagtgagatccgctgccaagttcctattattgaagatcgcaatacccaattccttgacctgagttagtgatctccaatccatgttagcgcttcctaaataaatatgtgtattatcagatatccaaaattttgtatgaagaactcctcctaggatatttgtaatatctatgtatcgtacttcaactccggccatttgtagtctttcaacatcctttaatggtttgttagatttattaacggctactctaactcgtactcctcttttgggtaattgtacaatctcgtttaatattatcgtgccgaaattcgtacccacttcatccgataaactccaataaaaagatgatatatctagtgtttttgtggtattggatagaatttccctccacatgttaaatgtagacaaatatactttatcaaattgcatacctataggaatagtttctgtaatcactgcgattgtattatccggattcattttatttgttaaaagaataatcctatatcacttcactctattaaaaatccaagtttctatttctttcatgactgattttttaacttcatccgtttccttatgaagatgatgtttggcaccttcataaatttttatttctctattacaatttgcatgttgcatgaaataatatgcacctaaaacatcgctaatcttattgtttgttccctggagtatgagagtcggggggtgttaatcttggaaattatttttctaaccttgttggtagccttcaagacctgactagcaaatccagccttaattttttcatgattgactaatgggtcgtattggtatttataaactttatccatatctctagatactgattctggacatagctttccgactggcgcatttggtgtgatggttcccataagtttggcagctagcagattcagtcttgaaacagcatctgcattaactagaggagacattagaatcattgctgtaaacaagtttggattatcgtaagaggctagctcccatggaatgacccaataagtagatttaatagttaccacgtgctgtaccaaagtcatcaatcatcattttttcaccattacttcttccatgtccaatatgatcatgtgagaatactaaaattcctaacgatgatatgttttcagctagttcgtcataacgtccagaatgtttaccagctccatgacttatgaatactaatgccttaggatatgtaataggtttccaatatttacaatatatgtaatcattgtccagattgaacatacagtttgcactcatgattcacgttatataactatcaatattaacagttcgtttgatgatcatattatttttatgttttattgataattgtaaaaacatacaattaaatcaatatagaggaaggagacggctactgtcttttgtaagatagtcatggcgactaaattagattatgaggatgctgttttttactttgtggatgatgataaaatatgtagtcgcgactccatcatcgatctaatagatgaatatattacgtggagaaatcatgttatagtgtttaacaaagatattaccagttgtggaagactgtacaaggaattgatgaagttcgatgatgtcgctatacggtactatggtattgataaaattaatgagattgtcgaagctatgagcgaaggagaccactacatcaattttacaaaagtccatgatcaggaaagtttattcgctaccataggaatatgtgctaaaatcactgaacattggggatacaaaaagatttcagaatctagattccaatcattgggaaacattacagatttgatgaccgacgataatataaacatcttgatactttttctagaaaaaaaattgaattgatgatataggggtcttcataacgcataattattacgttagcattctatatccgtgttaaaaaaaattatcctatcatgtatttgagagttttatatgtagcaaacatgatagctgtgatgccaataagctttagatattcacgcgtgctagtgttagggatggtattatctggtggtgaaatgtccgttatataatctacaaaacaatcatcgcatatagtatgcgatagtagagtaaacatttttatagtttttactggattcatacatcgtctacccaattcggttataaatgaaattgtcgccaatcttacacccaaccccttgttatccattagcatagtattaacttcgttatttatgtcataaactgtaaatgattttgtagatgccatatcatacatgatattcatgtccctattataatcattactaactttatcacaatatatgttgataatatctatatatgatctagtctttgtgggcaactgtctatacaagtcgtctaaacgttgtttactcatatagtatcgaacagccatcattacatggtcccgttccgttgatagataatcgagtatgttagtggacttgtcaaatctatataccatattttctggaagtggatatacatagtcgtgatcaacattattgctagcctcatcttctatatcctgtactataccattatctatatcatctacataatctatgatattattacacataaacatcgacaacatactattgtttattatctaagtcctgttgatccaaacccttgatctcctctatttgtactatctagagattgtacttcttccagttctggataatatatacgttgatagattagctgagctattctatctccagtatttacattaaacgtacattttccattattaataagaatgactcctatgtttcccctataatcttcgtctattacaccacctcctatatcaatgccttttagtgacagaccagacctaggagctattctaccatagcagaacttaggcatggacatactaatatctgtcttaattaactgtctttctcctggagggatagtataatcgtaagcgctatacaaatcatatccggcagcacccggcgattgcctagtaggagatttagctctgttagtttccttaacaaatctaactggtgagttaatattcatgttgaacataaaactaatattttatttcaaaattatttaccatcccatatattccatgaataagtgtgatgattgtacacttctatagtatctatatacgatccacgataaaatcctcctatcaatagcagtttattatccactatgatcaattctggattatccctcggataaataggatcatctatcagagtccatgtattgctggattcacaataaaattccgcatttctaccaaccaagaataaccttctaccgaacactaacgcgcatgatttataatgaggataataagtggatggtccaaactgccactgatcatgattgggtagcaaatattctgtagttgtatcagtttcagaatgtcctcccattacgtatataacattgtttatggatgccactgctggattacatctaggtttcagaagactcggcatattaacccaagcagcatccccgtggaaccaacgctcaacagatgtgggatttggtagacctcctactacgtataatttattgttagcgggtatcccgctagcatacagtctggggctattcatcggaggaattggaatccaattgtttgatatataatttacagctatagcattgttatgtatttcattgttcatccatccaccgatgagatatactacttctccaacatgagtacttgtacacatatggaatatatctataatttgatccatgttcataggatactctatgaatggatacttgtatgatttgcgtggttgtttatcacaatgaaatattttggtacagtctagtatccattttacattatttatacctctgggagaaagataatttgacctgattacatttttgataaggagtagcagatttcctaatttatttcttcgcctcatataccacttaatgacaaaatcaactacataatcctcatctggaacatttagttcatcgctttctagaataagtttcatagatagataatcaaaattgtctatgatgtcatcttccagttccaaaaagtgtttggcaataaagtttttagtatgacataagagattggatagtccgtattctatacccatcatgtaacactcgacacaatattcctttctaaaatctcgtaagataaagtttatacaagtgtagatgataaattctacagaggttaatatagaagcacgtaataaattgacgacgttatgactatctatatatacctttccagtatatgagtaaataactatagaagttaaactgtgaatgtcaaggtctagacaaacccttgtaactggatctttatttttcgtgtatttttgacgtaaatgtgtgcgaaagtaaggagataactttttcaatatcgtagaattgactattatattgcctcctatggcatcaataattgttttgaatttcttagtcatagacaatgctaatatattcttacagtacacagtattgacaaatatcggcatttatgtttctttaaaagtcaacatctagagaaaaatgattatctttttgagacataactcccattttttggtattcacccacacgtttttcgaaaaaattagtttttccttccaatgatatattttccatgaaatcaaacggattggtaacattataaatttttttaaatcccaattcagaaatcaatctatccgcgacgaattctatatatgttttcatcatttcacaattcattcctataagtttaactggaagagccgcagtaagaaattcttgttcaatggatactgcatctgttataatagatctaacggtttcttcactcggtggatgcaataaatgtttaaacatcaaacatgcgaaatcgcagtgcagaccctcgtctctactaattagttcgttggaaaacgtgagtccgggcattaggccacgctttttaagccaaaatatggaagcgaatgatccagaaaagaaaattccttctactgcagcaaaggcaataagtctctctccataaccggcgctgtcatgtatccacttttgagcccaatcggccttcttttttacacaaggcatcgtttctatggcattaaagagatagtttttttcattactatctttaacataagtatcgatcaaaagactatacatttccgaatgaatgttttcaatggccatctgaaatccgtagaaacatctagcctcggtaatctgtacttctgtacaaaatcgttccgccaaattttcattcactattccgtcactggctgcaaaaaacgccaatacatgttttataaaatatttttcgtctggtgttagtttattccaatcattgatatctttagatatatctacttcttccactgtccaaaatgatgcctctgcctttttatacatgttccagatgtcatgatattggattgggaaaataacaaatctatttggatttggtgcaaggatgggttccataactaaattaacaataacaataaattttttttcagttatctatatgcctgtacttggattttttgtacatcgatatcgccgcaatcactacaataattacaagtattattgatagcattgttattagtactatcataattaaattatctacattcatgggtgctgaataatcgttattatcatcattatcattttgtaattgtgacatcatactagataaatcgtttgcgagattgttgtgggaagcgggcatggaggatgcattatcattattatttaacgccttccatttggattcacaaatgttacgcacattcaacattttatggaaactataattttgtgaaaacaaataacaagaaaactcgtcatcgttcaaatttttaacgatagtaaaccgattaaacgtcgagctaatttctaacgctagcgactctgttggatatgggtttccagatatatatcttttcagttcccctacgtatctataatcatctgtaggaaatggaagatatttccatttatctactgttcctaatatcatatgtggtggtgtagtagaaccattaagcgcgaaagatgttatttcgcatcgtattttaacttcgcaataatttctggttagataacgcactctaccagtcaagtcaatgatattagcctttacagatatattcatagtagtcgtaacgatgactccatcttttagatgcgatactcctttgtatgtaccagaatcttcgtacctcaaactcgatatatttaaacaagttaatgagatattaacgcgttttatgaatgatgatatataaccagaagttttatcctcggtggctagcgctataaccttatcattataataccaactagtgtgattaatatgtgacacgtcagtgtgggtacaaatatgtacattatcgtctacgtcgtattcgatacatccgcatacagccaacaaatataaaatgacaaatactctaacgccgttcgtacccatcttgatgcggtttaataaatgttttgatttcaatttattgtaaaaaaagattcggttttatactgttcgatattctcattgcttatattttcatctatcatctccacacagtcaaatccgtggttagcatgcacctcatcaaccggtaaaagactatcggactcttctatcattataactctagaatatttaatttggtcattattaatcaagtcaattatcttatttttaacaaacgtgagtattttactcattttttataaaaacttttagaaatatacagactctatcgtgtgtctatatcttctttttatatccaatgtatttatgtctgatttttcttcatttatcatatataatggtccaaattctacacgtgcttcggattcatccagatcattaaggttcttataattgtaacatccttctcttccctcttctacatcttccttcttattcttattcttagcgtcacagaatctaccacagcaggatcccatgacgagcgtcatattaaactaatccattttcaattataatatatgattagtaatgaccattaaaataaaaaatattcttcataaccggcaagaaagtgaaaagttcacattgaaactatgtcagtagtatacatcatgaaatgatgatatatatatactctattttggtggaggattatatgatataattcgtggataatcatttttaagacacatttctttattcgtaaatcttttcacgttaaatgagtgtccatattttgcaatttcttcatatgatggcggtgtacgtggacgaggctgctcctgttcttgttgtggtcgccgactgtcgtgtctgcgtttagatccctccattatcgcgattgcgtagatggagtactattttataccttgtaattaaatttttttattaattaaacgtataaaaacgttccgtatctgtatttaagagccagatttcgtctaatagaacaaatagctacagtaaaaataactagaataattgctacacccactagaaaccacggatcgtaatacggcaatcggttttcgataataggtggaacgtatattttatttaaggacttaacaattgtctgtaaaccacaatttgcttccgcggatcctgtattaactatctgtaaaagcatatgttgaccgggcggagccgaacattctccgatatctaatttctgtatatctataatattattaacctccgcatacgcattacagttcttttctagcttggataccgcactaggtacatcgtctagatctattcctatttcctcagcgatagctcttctatccttttccggaagcaatgaaatcacttcaataaatgattcaaccatgagtgtgaaactaagtcgagaattactcatgcatttgttagttattcggagcgcgcaatttttaaactgtcctataacctctcctatatgaatagcacaagtgacattagtagggatagaatgttgagctaatttttgtaaataactatctataaaaagattatacaaagttttaaactctttagtttccgccatttatccagtctgagaaaatgtctctcataataaatttttccaagaaactaattgggtgaagaatggaaacctttaatctatatttatcacagtctgttttggtacacatgatgaattcttccaatgccgtactaaattcgatatctttttcgatttctggatatgtttttaataaagtatgaacaaagaaatggaaatcgtaataccagttatgtttaactttgaaattgttttttattttcttgttaatgattccagccacttgggaaaagtcaaagtcgtttaatgccgatttaatacgttcattaaaaacaaactttttatcctttagatgaattattattggttcattggaatcaaaaagtaagatattatcgggtttaagatctgcgtgtaaaaagttgtcgcaacagggtagttcgtagattttaatgtataacagagccatctgtaaaaagataaactttatgtattgtaccaaagatttaaatcctaatttgatagctaactcggtatctactttatctgccgaatacagtgctaggggaaaaattataatgtttcctctttcatattcgtagttagttctcttttcatgttcgaaaaagtgaaacatgcggttaaaatagtttataacattaatattactgttaataactgccggataaaagtgggatagtaatttcacgaatttgatactgtcctttctctcgttaaacgcctttaaaaaaactttagaagaatatctcaatgagagttcctgaccatccatagtttgtatcaataatagcaacatatgaagaacacgtttatacagagtatgtaaaaatgttaatttatagtttaatcccatggcccacgcacacacgattaattttttttcatctccctttagattgttgtatagaaatttgggtactgtgaactccgccgtagtttccatgggactatataattttgtggcctcgaatacaaattttactacatagttatctatcttaaagactataccatatcctcctgtagatatgtgataaaaatcgtcgtttataggataaaatcgtttatccttttgttggaaaaaggatgaattaatgtaatcattctcttctatctttagtagtgtttccttattaaaattcttaaaataatttaacaatctaactgacggagcccaattttggtgtaaatctaattgggacattatattgttaaaatacaaacagtctcctaatataacagtatctgataatctatggggagacatccattgatattcaggggatgaatcattggcaacacccatttattgtacaaaaagccccaatttacaaacgaaagtccaggtttgatagagacaaacaattaactattttgtctctgtttttaacacctccacagtttttaatttctttagtaatgaaattattcacaatatcagtatcttctttatctaccagagattttactaacttgataaccttggctgtctcattcaatagggtagtaatatttgtatgtgtgatattgatatctttttgaattgtttcttttagaagtgattctttgatggtgccagcatacgaattacaataatgcagaaactcggttaacatgcaggaattatagtaagccaattccaattgttgcctgtgttgtattagagtgtcaatatgagcaatggtgtccttgcgtttctctgatagaatgcgagcagcgattttggcgttatcatttgacgatatttctggaatgacgaatcctgtttctactaactttttggtaggacaaagtgaaacaatcaagaagatagcttctcctcctatttgtggaagaaattgaactcctctagatgatctactgacgatagtatctccttgacagatattggaccgaattacagaagtacctggaatgtaaagccctgaaaccccctcattttttaagcagattgttgccgtaaatcctgcactatgcccaagatagagagctcctttggtgaatccatctctatgtttcagtttaaccaagaaacagtcagctggtctaaaatttccatctctatctaatacagcatctaacttgatgtcaggaactatgaccggtttaatgttatatgtaacattgagtaaatccttaagttcataatcatcactgtcatcagttatgtacgatccaaacaatgtttctaccggcatagtggatacgaagatgctatccatcagaatgtttccctgattagtattttctatatagctattcttctttaaacgattttccaaatcagtaactatgttcatttttttaggagtaggacgcctagccagtatggaagaggattttctagatcctctcttcaacatctttgatctcgatggaatgcaaaaccccatagtgaaacaaccaacgataaaaataatattgtttttcactttttataattttaccatctgactcatggattcattaatatctttataagagctactaacgtataattctttataactgaactgagatatatacaccggatctatggtttccataattgagtaaatgaatgctcggcaataactaatggcaaatgtatagaacaacgaaattatactagagttgttaaagttaatattttctatgagctgttccaataaattatttgttgtgactgcgttcaagtcataaatcatcttgatactatccagtaaaccgtttttaagttctggaatattatcatcccattgtaaagcccctaattcgactatcgaatatcctgctctgatagcagtttcaatatcgacggacgtcaatactgtaataaaggtggtagtattgtcatcatcgtgataaactacgggaatatggtcgttagtaggtacggtaactttacacaacgcgatatataactttccttttgtaccatttttaacgtagttgggacgtcctgcagggtattgttttgaagaaatgatatcgagaacagatttgatacgatatttgttggattcctgattattcactataatataatctagacagatagatgattcgataaatagagaaggtatatcgttggtaggataatacatccccattccagtattctcggatactctattgatgacactagttaagaacatgtcttctattctagaaaacgaaaacatcctacatggactcattaaaacttctaacgctcctgattgtgtctcgaatgcctcgtacaaggatttcaaggatgccatagattctttgaccaacgatttagaattgcgtttagcatctgatttttttattaaatcgaatggtcggctctctggtttgctaccccaatgataacaatagtcttgtaaagataaaccgcaagaaaatttatacgcatccatccaaataaccctagcaccatcggatgatattaatgtattattatagattttccatccacaattattgggccagtatactgttagcaacggtatatcgaatagattactcatgtaacctactagaatgatagttcgtgtactagtcataatatctttaatccaatctaaaaaatttaaaattagattttttacactgttaaagttaacaaaagtattacccgggtacgtggatatcatatatggcattggtccattatcagtaatagctccataaactgatacggcgatggtttttatatgtgtttgatctaacgaggaagaaattcgcgcccacaattcatctctagatatgtatttaatatcaaacggtaacacatcaatttcgggacgcgtatatgtttctaaatttttaatccaaatataatgatgacctatatgccctattatcatactgtcaactatagtacacctagggaacttacgatacatctgtttcctataatcgttaaattttacaaatctataacatgctaaaccttttgacgacagccattcattaatttctgatatggaatctgtattctcgataccgtatcgttctaaagccagtgctatatctccctgttcgtgggaacgctttcgtataatatcgatcaacggataatctgaagtttttggagaataatatgactcatgatctatttcgtccataaacaatctagacataggaattggaggcgatgatcttaattttgtgcaatgagtcgtcaatcctataacttctaatcttgtaatattcatcatcgacataatactatctatgttatcatcgtatattagtataccatgaccttcttcatttcgtgccaaaatgatatacagtcttaaatagttacgcaatatctcaatagtttcataattgttagctgttttcatcaaggtttgtatcctgtttaacatgatggcgttctataacgtctctattttctatttttaattttttaaatttttaacgatttactgtggctagatacccaatctctctcaaatatttttttagcctcgcttacaagctgtttatctatactattaaaactgacgaatccgtgattttggtaatgggttccgtcgaaatttgccgaagtgatatgaacatattcgtcgtcgactatcaacaattttgtattattctgaatagtgaaaaccttcacagatagatcattttgaacacacaacgcatctagacttttggcggttgccatagaatatacgtcgttcttatcccaattaccaactagaagtctgatcttaactcctctattaatggctgcttctataatggagttgtaaatgtcgggccaatagtagctattaccgtcgacacgtgtagtgggaactatggccaaatgttcaatatctatactagtcttagctgacctgagtttatcaataactacatcggtatctagatctctagaatatcccaataggtgttccggagaatcagtaaagaacactccacctataggattcttaatatgatacgcagtgctaactggcaaacaacaagccgcagagcataaattcaaccatgaattttttgcgctattaaaggctttaaaagtatcaaatcttctacgaagatctgtggccagcgggggataatcagaatatacacctaacgttttaatcgtatgtatagatcctccagtaaatgacgcgtttcctacataacatctttcatcatctgacacccaaaaacaaccgagtagtagtcccacattattttttttatctatattaacggttataaaatttatatccgggcagtgactttgtagctctcccagatttcttttccctcgttcatctagcaaaactattattttaatccctttttcagatgcctcttttagtttatcaaaaataagcgctcccctagtcgtactcagaggattacaacaaaaagatgctatgtatatatatttcttagctagagtgataatttcgttaaaacattcaaatgttgttaaatgatcggatctaaaatccatattttctggtagtgtttctaccagcctacattttgctcccgcaggtaccgatgcaaatggccacatttagttaacataaaaacttatacatcctgttctatcaacgattctagaatatcatcggctatatcgctaaaattttcatcaaagtcgacatcacaacctaactcagtcaatatattaagaagttccatgatgtcatcttcgtctatttctatatccgtatccattgtagattgttgaccgattatcgagtttaaatcattactaatactcaatccttcagaatacaatctgtgtttcattgtaaatttataggcggtgtatttaagttggtagattttcaattatgtattaatatagcaacagtagttcttgctcctccttgattctagcatcctcttcattattttcttctacgtacataaacatgtccaatacgttagacaacacaccgacgatggcggccgcagatctcgagttatgatctacttccttaccgtgcaataaattagaatatattttctacttttacgagaaattaattattgtatttattatttatgggtgaaaaacttactataaaaagcgggtgggtttggaattagtgaaagcttaaaaattgaaattttattttttttttttggaatataaataagctcgaagtcgacagatctaggcctggtaccaggaggaggaattcagcttaaagatgacttcgaaagtttatgatccagaacaaaggaaacggatgataactggtccgcagtggtgggccagatgtaaacaaatgaatgttcttgattcatttattaattattatgattcagaaaaacatgcagaaaatgctgttatttttttacatggtaacgcggcctcttcttatttatggcgacatgttgtgccacatattgagccagtagcgcggtgtattataccagatcttattggtatgggcaaatcaggcaaatctggtaatggttcttataggttacttgatcattacaaatatcttactgcatggtttgaacttcttaatttaccaaagaagatcatttttgtcggccatgattggggtgcttgtttggcatttcattatagctatgagcatcaagataagatcaaagcaatagttcacgctgaaagtgtagtagatgtgattgaatcatgggatgaatggcctgatattgaagaagatattgcgttgatcaaatctgaagaaggagaaaaaatggttttggagaataacttcttcgtggaaaccatgttgccatcaaaaatcatgagaaagttagaaccagaagaatttgcagcatatcttgaaccattcaaagagaaaggtgaagttcgtcgtccaacattatcatggcctcgtgaaatcccgttagtaaaaggtggtaaacctgacgttgtacaaattgttaggaattataatgcttatctacgtgcaagtgatgatttaccaaaaatgtttattgaatcggatccaggattcttttccaatgctattgttgaaggcgccaagaagtttcctaatactgaatttgtcaaagtaaaaggtcttcatttttcgcaagaagatgcacctgatgaaatgggaaaatatatcaaatcgttcgttgagcgagttctcaaaaatgaacaagcggccgccgccaccatgagcaagggcgaggaactgttcactggcgtggtcccaattctcgtggaactggatggcgatgtgaatgggcacaaattttctgtcagcggagagggtgaaggtgatgccacatacggaaagctcaccctgaaattcatctgcaccactggaaagctccctgtgccatggccaacactggtcactaccttcacctatggcgtgcagtgcttttccagatacccagaccatatgaagcagcatgactttttcaagagcgccatgcccgagggctatgtgcaggagagaaccatctttttcaaagatgacgggaactacaagacccgcgctgaagtcaagttcgaaggtgacaccctggtgaatagaatcgagctgaagggcattgactttaaggaggatggaaacattctcggccacaagctggaatacaactataactcccacaatgtgtacatcatggccgacaagcaaaagaatggcatcaaggtcaacttcaagatcagacacaacattgaggatggatccgtgcagctggccgaccattatcaacagaacactccaatcggcgacggccctgtgctcctcccagacaaccattacctgtccacccagtctgccctgtctaaagatcccaacgaaaagagagaccacatggtcctgctggagtttgtgaccgctgctgggatcacacatggcatggacgagctgtacaagtgagcggccgccctgctagcaagcttgctagcggccgctcgagatctgcggccgctacagacacgaatatgactaaaccgatgaccatttaaaaacccctctctagctttcacttaaactgtatcgatcattcttttagcacatgtataatataaaaacattattctatttcgaatttaggcttccaaaaatttttcatccgtaaaccgataataatatatatagacttgttaatagtcggaataaatagattaatgcttaaactatcatcatctccacgattagagatacaatatttacattctttttgctgtttcgaaactttatcaatacacgttaatacaaacccaggaaggagatattgaaactgaggctgttgaaaatgaaacggtgaatacaataattcagataatgtaaaatcatgattccgtattctgatgatattagaactgctaatggatgtcgatggtatgtatctaggagtatctattttaacaaagcatcgatttgctaatatacaattatccttttgattaattgttattttattcatattcttaaaaggtttcatatttatcaattcttctacattaaaaatttccatttttaatttatgtagccccgcaatactcctcattacgtttcattttttgtctataatatccattttgttcatctcggtacatagattatccaattgagaagcgcatttagtagttttgtacattttaagtttattgacgaatcgtcgaaaactagttatagttaacattttattatttgataccctgatattaatacccctgccgttactattatttataactgatgtaatccacgtaacattggaattaactatcgatagtaatgcatcgacgcttccaaaattgtctattataaactcaccgataatttttttattgcatgttttcatattcattaggattatcaaatctttaatcttattacgattgtatgcgttgatattacaagacgtcattctaaaagacggaggatctccatcaaatgccagacaatcacgtacaaagtacatggaaataggttttgttctattgcgcatcatagatttatatagaacacccgtagaaatactaatttgttttactctataaaatactaatgcatctatttcatcgttttgtataacgtctttccaagtgtcaaattccaaatttttttcattgatagtaccaaattcttctatctctttaactacttgcatagataggtaattacagtgatgcctacatgccgttttttgaaactgaatagatgcgtctagaagcgatgctacgctagtcacaatcaccactttcatatttagaatatatatatgtaaaaatatagtagaatttcattttgtttttttctatgctataaatgaattctcattttgcatctgctcatactccgttttatattaataccaaagaaggaagatatctggttctaaaagccgttaaagtatgcgatgttagaactgtagaatgcgaaggaagtaaagcttcctgcgtactcaaagtagataaaccctcatcgcccgcgtgtgagagaagaccttcgtccccgtccagatgcgagagaatgaataaccctggaaaacaagttccgtttatgaggacggacatgctacaaaatatgttcgcggctaatcgcgataatgtagcttctagacttttgtcctaaaatactattatatccttttcgatattaataaatccgtgtcgtccaggttttttatctctttcagtatgtgaatagataggtattttatctctattcatcatcgaatttaagagatccgataaacattgtttgtattctccagatgtcagcatctgatacaacaatatatgtgcacataaacctctggcacttatttcatgtaccttccccttatcactaaggagaatagtatttgagaaatatgtatacatgatattatcatgaattagatatacagaatttgtaacactctcgaaatcacacgatgtgtcggcgttaagatctaatatatcactcgataacacattttcatctagatacactagacattttttaaagctaaaatagtctttagtagtaacagtaactatgcgattattttcatcgatgatacatttcatcggcatattattacgcttaccatcaaagactataccatgtgtatatctaacgtattctagcatggttgccatacgcgcattaaacttttcaggatctttggatagatcttccaatctatctatttgagaaaacatttttatcatgttcaatagttgaaacgtcggatccactatatagatattatctataaagattttaggaactacgttcatggtatcctggcgaatattaaaactatcaatgatatgattatcgttttcatcttttatcaccatatagtttctaagatatgggattttacttaatataatattatttcccgtgataaattttattagaaaggccaaatctataagaaaagtcctagaattagtctgaagaatatctatatcgccgtatagtatatttggattaattagatatagagaatatgatccgtaacatatacaacttttattatggcgtctaagatattcttccatcaacttattaacatttttgactagggaagatacattatgacgtcccattacttttgccttgtctattactgcgacgttcatagaatttagcatatctcttgccaattcttccattgatgttacattataagaaattttagatgaaattacatttggagctttaatagtaagaactcctaatatgtccgtgtatgtggtcactaatacagattgtagttctataatcgtaaataatttacctatattatatgtttgagtctgtttagaaaagtagctaagtatacgatcttttatttctgatgcagatgtattaacatcggaaaaaaatctttttttattcttttttactaaagatacaaatatgtctttgttaaaaacagttattttctgaatatttctagcttgtaattttaacatatgatattcgttcacactaggtactctgcctaaataggtttctataatctttaatgtaatattaggaaaagtattctgatcaggattcctattcattttgaggatttaaaactctgattattgtctaatatggtctctacgcaaactttttcacagagcgatagagtttttgataactcgtttttcttaagaaatataaaactactgtctccagagctcgctctatcttttattttatctaattcgatacaaactcctgatactggttcagaaagtaattcattaattttcagtcctttatagaagatatttaatatagataatacaaaatcttcagtttttgatatcgatctgattgatcctagaactagatatattaataacgtgctcattaggcagtttatggcagcttgataattagatatagtatattccagttcatatttattagataccgcattgcccagattttgatattctatgaattcctctgaaaataaatccaaaataactagacattctattttttgtggattagtgtactctcttccctctatcatgttcactactggtgtccacgatgataaatatctagagggaatataatatagtccataggatgccaatctagcaatgtcgaataactgtaattttattcttcgctcttcattatgaattgattcttgaggtataaacctaacacaaattatattattagacttttcgtatgtaatgtctttcatgttataagtttttaatcctggaatagaatctattttaatgaggcttttaaacgcagagttctccaacgagtcaaagcataatactctgttgtttttcttatatacgatgttacgattttcttctttgaatggaataggtttttgaattagtttataattacaacataatagataaggaagtgtgcaaatagtacgcggaaaaaacataatagctcccctgttttcatccatggttttaagtaaatgatcactggcttctttagtcaatggatattcgaacattaaccgtttcatcatcattggacagaatccatatttcttaatgtaaagagtgatcaaatcattgtgtttattgtaccatcttgttgtaaatgtgtattcggttatcggatctgctcctttttctattaaagtatcgatgtcaatctcgtctaagaattcaactatatcgacatatttcatttgtatacacataaccattactaacgtagaatgtataggaagagatgtaacgggaacagggtttgttgattcgcaaactattctaatacataattcttctgttaatacgtcttgcacgtaatctattatagatgccaagatatctatataattattttgtaagatgatgttaactatgtgatctatataagtagtgtaataattcatgtattttgatatatgttccaactctgtctttgtgatgtctagtttcgtaatatctatagcatcctcaaaaaatatattcgcatatattcccaagtcttcagttctatcttctaaaaaatcttcaacgtatggaatataataatctattttacctcttctgatatcattaatgatatagtttttgacactatcttctgtcaattgattcttattcactatatctaagaaacggatagcgtccctaggacgaactactgccattaatatctctattatagcttctggacataattcatctattataccagaattaatgggaactattccgtatctatctaacatagttttaagaaagtcagaatctaagacttgatgttcatatattggttcatacatgaaatgatctctattgatgatagtgactatttcattctctgaaaattggtaactcattctatatatgctttccttgttgatgaaggatagaatatactcaatagaatttgtaccaacaaactgttctcttatgaatcgtatatcatcatctgaaataatcatgtaaggcatacatttaacaattagagacttgtctcctgttatcaatatactattcttgtgataatttatgtgtgaggcaaatttgtccacgttctttaattttgttatagtagatatcaaatccaatggagctacagttcttggcttaaacagatatagtttttctggaacaaattctacaacattattataaaggactttgggtagataagtgggatgaaatcctattttaattaatgcgatagccttgtcctcgtgcagatatccaaacgcttttgtgatagtatggcattcattgtctagaaacgctctacgaatatctgtgacagatatcatctttagagaatatactagtcgcgttaatagtactacaatttgtattttttaatctatctcaataaaaaaattaatatgtatgattcaatgtataactaaactactaactgttattgataactagaatcagaatctaatgatgacgtaaccaagaagtttatctactgccaatttagctgcattatttttagcatctcgtttagattttccatcggccttatcgaatactcttccgtcgatgtctacacaggcataaaatgtaggagagttactaggcccaactgattcaatacgaaaagaccaatctctcctagtaatttggcagtactcattaataacggtgacagggttagcatctttccaatcaataatttttttagccggaataacatcatcaaaagacttatgatcctctctcattgatttttcgcgggatacatcatctattatgacgtcagccatagcatcagcatccggcttatccgcctccgttgtcataaaccaacgaggaggaatatcgtcggagctgtacaccatagcactacgttgaagatcgtacagagctttattaacttctcgcttctccatattaagttgtctagttagttgtgcagcagtagctccttcgattccaatgtttttaatagccgcacacacaatctctgcgtcagaacgctcgtcaatatagatcttagacatttttagagagaactaacgcaaccagcaataaaactgaacctactttatcatttttttattcatcatcctctggtggttcgtcgttcctatcaaatgtagctctgattaacccgtcatctataggtgatgctggttctggagattctggaggagatggattattatctggaagaatctctgttatttccttgttttcatgtatcgattgcgttgtaacattaagattgcgaaatgctctaaatttgggaggcttaaagtgttgtttgcaatctctacacgcgtgtctaactagtggaggttcgtcagctgctctagtttgaatcatcatcggcgtagtattcctacttttacagttaggacacggtgtattgtatttctcgtcgagaacgttaaaataatcgttgtaactcacatcctttattttatctatattgtattctactcctttcttaatgcattttataccgaataagagatagcgaaggaattctttttcggtgccgctagtacccttaatcatatcacatagtgttttatattccaaatttgtggcaatagacggtttatttctatacgatagtttgtttctggaatcctttgagtattctataccaatattattctttgattcgaatttagtttcttcgatattagattttgtattacctatattcttgatgtagtactttgatgatttttccatggcccattctattaagtcttccaagttggcatcatccacatattgtgatagtaattctcggatatcagtagcggctaccgccattgatgtttgttcattggatgagtaactactaatgtatacattttccatttataacacttatgtattaactttgttcatttatattttttcattattatgttgatattaacaaaagtgaatatatatatgttaataattgtattgtggttatacggctacaattttataatgagtgaaagtcagtgtccgatgatcaatgacgatagctttactctgaaaagaaagtatcaaatcgatagtgcggagtcaacaataaaaatggataagaagaggataaagtttcagaatagagccaaaatggtaaaagaaataaatcagacaataagagcagcacaaactcattacgagacattgaaactaggatacataaaatttaagagaatgattatgactactactctagaagatatagcaccatctattccaaataatcagaaaacttataaactattctcggacatttcagccatcggcaaagcatcacagaatccgagtaagatggtatatgctctgctgctttacatgtttcccaatttgtttggagatgatcatagattcattcgttatagaatgcatccaatgagtaaaatcaaacacaagatcttctctcctttcaaacttaatcttattagaatattagtggaagaaagattctataataatgaatgcagatctaataaatggagaataattggaacacaagttgataaaatgttgatagctgaatctgataaatatacaatagatgcaaggtataacctaaaacccatgtatagaatcaagggagaatctgaagaagataccctctttatcaaacagatggtagaacaatgtgtgacatcccaggaattggtggaaaaagtgttgaagatactgtttagagatttgttcaagagtggagaatacaaagcgtacagatacgatgatgatgtagaaaatggatttattggattggatacactaaaattaaacattgttcatgatatagttgaaccatgtatgcctgttcgtaggccagtggctaagatactgtgtaaagaaatggtaaataaatactttgagaatccgctacatattattggtaaaaatcttcaagagtgcattgactttgttagtgaataggcatttcatctttctccaatactaattcaaattgttaaattaataatggatagtataaatagttattagttataagatagtaaaaataattattagaataagagtgtagtatcatagataactctcttctataaaaatggattttattcgtagaaagtatcttatatacacagtagaaaataatatagattttttaaaggatgatacattaagtaaagtaaacaattttaccctcaatcatgtactagctctcaagtatctagttagcaattttcctcaacacgttattactaaggatgtattagctaataccaatttttttgttttcatacatatggtacgatgttgtaaagtgtacgaagcggttttacgacacgcatttgatgcacccacgttgtacgttaaagcattgactaagaattatttatcgtttagtaacgcaatacaatcgtacaaggaaaccgtgcataaactaacacaagatgaaaaatttttagaggttgccgaatacatggacgaattaggagaacttataggcgtaaattatgacttagttcttaatccattatttcacggaggggaacccatcaaagatatggaaatcatttttttaaaactgtttaagaaaacagacttcaaagttgttaaaaaattaagtgttataagattacttatttgggcatacctaagcaagaaagatacaggcatagagtttgcggataatgatagacaaaatatatacactctatttcaacaaactggtagaatcgtccatagcaatctaacagaaacgtttagagattatatctttcccggagataagactagctattgggtgtggttaaacgaaagtatagctaatgatgcggatatcgttcttaatagacacgccattaccatgtatgataaaattcttagttatatatactctgagataaaacaaggacgcgttaataaaaacatgcttaagttagtttatatctttgagcctgaaaaagatatcagagaacttctgctagaaatcatatatgatattcctggagatatcctatctattattgatgcaaaaaacgacgattggaaaaaatattttattagtttttataaagctaattttattaacggtaatacatttattagtgatagaacgtttaacgaggacttattcagagttgttgttcaaatagatcccgaatatttcgataatgaacgaattatgtctttattctctacgagtgctgcggacattaaacgatttgatgagttagatattaataacagttatatatctaatataatttatgaggtgaacgatatcacattagatacaatggatgatatgaagaagtgtcaaatctttaacgaggatacgtcgtattatgttaaggaatacaatacatacctgtttttgcacgagtcggatcccatggtcatagagaacggaatactaaagaaactgtcatctataaaatccaagagtagacggctgaacttgtttagcaaaaacattttaaaatattatttagacggacaattggctcgtctaggtcttgtgttagatgattataaaggagacttgttagttaaaatgataaaccatcttaagtctgtggaggatgtatccgcattcgttcgattttctacagataaaaaccctagtattcttccatcgctaatcaaaactattttagctagttataatatttccatcatcgtcttatttcaaaggtttttgagagataatctatatcatgtagaagaattcttggataaaagcatccatctaaccaagacggataagaaatatatacttcaattgataagacacggtagatcatagaacagaccaaatatattattaataatttgtatatacatagatataattatcacacatttttgataaatgggaactgctgcaacaattcagactcccaccaaattaatgaataaagaaaatgcagaaatgattttggaaaaaattgttgatcatatagttatgtatattagtgacgaatcaagtgattcagaaaataatcctgaatatattgattttcgtaacagatacgaagactatagatctctcattataaaaagtgatcacgagtttgtaaagctatgtaaaaatcatgcggagaaaagttctccagaaacgcaacaaatgattatcaaacacatatacgaacaatatcttattccagtatctgaagtactattaaaacctataatgtccatgggtgacataattacatataacggatgtaaagacaatgaatggatgctagaacaactctctaccctaaactttaacaatctccgcacatggaactcatgtagcataggcaatgtaacgcgtctgttttatacattttttagttatctgatgaaagataaactaaatatataagtataatcccattctaatactttaacctgatgtattagcatcttattagaatattaacctaactaaaagacataacataaaaactcattacatagttgataaaaagcggtaggatataaatattatggctgccaccgttccgcgttttgacgacgtgtacaaaaatgcacaaagaagaattctagatcaagaaacattttttagtagaggtctaagtagaccgttaatgaaaaacacatatctatttgataattacgcgtatggatggataccagaaactgcaatttggagtagtagatacgcaaacctagatgctagtgactattatcccatttcgttgggattacttaaaaagttcgagtttctcatgtctctatataaaggtcctattcccgtatatgaagaaaaagtaaatactgaattcatagccaatggatcgttctctggtagatacgtatcatatcttcgaaagttttctgcccttccaacaaacgagtttattagttttttgttactgacttccattccaatctataatatcttgttctggtttaaaaacacacagtttgatattactaaacacacattattcagatacgtctatacagataatgccaaacacctggcgttggctaggtatatgcatcaaacaggagactataagcctttgtttagtcgtctcaaagagaattatatatttaccggtcccgttccaataagtatcaaagatatagatcaccctaatcttagtagagcaagaagtccatccgattatgagacattagctaatattagtactatattgtactttaccaagtatgatccggtattaatgtttttattgttttacgtacctgggtattcaattactacaaaaattactccagccgtagaatatctaatggataaactgaatctaacaaagagcgacgtacaactgttgtaaattattttatgcttcgtaaaatgtaggttttgaaccaaacattctttcaaagaatgagatgcataaaactttattatccaatagattgactatttcggacgtcaatcgtttaaagtaaacttcgtaaaatattctttgatcactgccgagtttaaaacttctatcgataattgtctcatatgttttaatatttacaagttttttggtccatggtacattagccggacaaatatatgcaaaataatatcgttctccaagttctatagtttctggattatttttattatattcagtaactaaatacatattagggttatctgcggatttataatttgagtgatgcattctactcaacataaataattctagaggagacgatctactatcaaattcggatcgtaaatctgtttctaaagaacggagaatatctatacatacctgattagaattcatccgtccttcagacaacatctcagacagtctggttttgtacatcttaatcatattcttatgaaacttggaaacatctcttctagtttcactagtacctttattaattctctcaggtacagattttgaattcgacgatgctgagtatttcatcgttgtatatttcttcttcgattgcataatcagattcttatataccgcctcaaactctattttaaaattattaaacaatactctattattaatcagtcgttctaactctttcgctatttctatagacttatctacatcttgactgtctatctctgtaaacacggagtcggtatctccatacacgctacgaaaacgaaatctgtaatctataggcaacgatgttttcacaatcggattaatatctctatcgtccatataaaatggattacttaatggattggcaaaccgtaacataccgttagataactctgctccatttagtaccgattctagatacaagatcattctacgtcctatggatgtgcaactcttagccgaagcgtatgagtatagagcactatttctaaatcccatcagaccatatactgagttggctactatcttgtacgtatattgcatggaatcatagatggccttttcagttgaactggtagcctgttttagcatctttttatatctggctctctctgccaaaaatgttcttaatagtctaggaatggttccttctatcgatctatcgaaaattgctatttcagagatgaggttcggtagtctaggttcacaatgaaccgtaatatatctaggaggtggatatttctgaagcaatagctgattatttatttcttcttccaatctattggtactaacaacgacaccgactaatgtttccggagatagatttccaaagatacacacattaggatacagactgttataatcaaagattaatacattattactaaacattttttgttttggagcaaataccttaccgccttcataaggaaacttttgttttgtttctgatctaactaagatagttttagtttccaacaatagctttaacagtggacccttgatgactgtactcgctctatattcgaataccatggattgaggaagcacatatgttgacgcacccgcgtctgtttttgtttctactccataatactcccacaaatactgacacaaacaagcatcatgaatacagtatctagccatatctaaagctatgtttagattataatccttatacatctgagctaaatcaacgtcatcctttccgaaagataatttatatgtatcattaggtaaagtaggacataatagtacgactttaaatccattttcccaaatatctttacgaattactttacatataatatcctcatcaacagtcacataattacctgtggttaaaacctttgcaaatgcagcggctttgcctttcgcgtctgtagtatcgtcaccgatgaacgtcatttctctaactcctctatttaatactttacccatgcaactgaacgcgttcttggatatagaatccaatttgtacgaatccaatttttcaaatttttgaatgaatgaatatagatcgaaaaatatagttccattattgttattaacgtgaaacgtagtattggccatgccgcctactcccttatgactagactgatttctctcataaatacagagatgtacagcttcctttttgtccggagatctaaagataattttctctcctgttaataactctagacgattagtaatatatctcagatcaaagttatgtccgttaaaggtaacgacgtagtcgaacgttagttccaacaattgtttagctattcgtaacaaaactatttcagaacatagaactagttctcgttcgtaatccatttccattagtgactgtatcctcaaacatcctctatcgacggcttcttgtatttcctgttccgttaacatctcttcattaatgagcgtaaacaataatcgtttaccacttaaatcgatataacagtaacttgtatgcgagattgggttaataaatacagaaggaaacttcttatcgaagtgacactctatatctagaaataagtacgatcttgggatatcgaatctaggtatttttttagcgaaacagttacgtggatcgtcacaatgataacatccattgttaatctttgtcaaatattgctcgtccaacgagtaacatccgtctggagatatcccgttagaaatataaaaccaactaatattgagaaattcatccatggtggcattttgtatgctgcgtttctttggctcttctatcaaccacatatctgcgacggagcattttctatctttaatatctagattataacttattgtctcgtcaatgtctatagttctcatctttcccaacggcctcgcattaaatggaggaggagacaatgactgatatatttcgtccgtcactacgtaataaaagtaatgaggaaatcgtataaatacggtctcgccatttcgacatctggatttcagatataaaaatctgttttcaccgtgactttcaaaccaattaatgcaccgaacatccatttatagaatttagaaatatattttcatttaaatgaatcccaaacattggggaagagccgtatggaccattatttttatagtactttcgcaagcgggtttagacggcaacatagaagcgtgtaaacgaaaactatatactatagttagcactcttccatgtcctgcatgtagacggcacgcgactatcgctatagaggacaataatgtcatgtctagcgatgatctgaattatatttattattttttcatcagattatttaacaatttggcatctgatcccaaatacgcgatcgatgtgacaaaggttaaccctttataaacttaacccattataaaacttatgattagtcacaactgaaataaccgcgtgattattttttggtataattctacacggcatggtttctgtgactatgaattcaacccccgttacattagtgaaatctttaacaaacagcaagggttcgtcaaagacataaaactcattgtttacaatcgaaatagaccccctatcacacttaaaataaaaaatatccttatcctttaccaccaaataaaattctgattggtcaatgtgaatgtattcacttaacagttccacaaatttatttattaactccgaggcacatacatcgtcggtattttttatggcaaactttactcttccagcatccgtttctaaaaaaatattaacgagttccatttatatcatccaatattattgaaatgacgttgatggacagatgatacaaataagaaggtacggtacctttgtccaccatctcctccaattcatgctctattttgtcattaactttaatgtatgaaaacagtacgccacatgcttccatgacagtgtgtaacactttggatacaaaatgtttgacattagtataattgtccaagactgtcaatctataatagatagtagctataatatattctatgatggtattgaagaagatgacaaccttggcatattgatcatttaacacagacatggtatcaacagatagcttgaatgaaagagaatcagtaattggaataagcgtcttctcgatagagtgtccgtataccaacatgtctgatattttgatgtattccattaaattatttagttttttctttttattctcgttaaacagcatttctgtcaacggaccccaacatcgttgaccgattaagttttgattgatttttccgtgtaaggcgtatctagtcagatcgtatagcctatccaataatccatcgtctgtgtgtagatcacatcgtacactttttaattctctatagaagagcgacagacatctggagcaattacagacagcaatttctttattctctacagatgtaagatacttgaagacattcctatgatgatgcagaattttggataacacggtattgatggtatctgttaccataattcctttgatggctgatagtgtcagagcacaagatttccaatctttgacaatttttagcaccattatctttgttttgatatctatatcagacagcatggtgcgtctgacaacacagggattaagacggaaagatgaaatgattctctcaacatcttcaatagataccttgctattttttctggcattatctatatgtgcgagaatatcctctagagaatcagtatcctttttgatgatagtggatctcaatgacatgggacgtttaaaccttcttattctatcaccagattgcatggtgatttgtcttctttcttttatcataatgtaatctctaaattcatcggcaaattgtctatatctaaaatcataatatgagatgtttacctctacaaatatctgttcgtccaatgttagagtatttacatcagttttgtattccaaattaaacatggcaacggatttaattttatattcctctattaagtcctcgtcgataataacagaatgtagataatcatttaatccgtcgtacatggttggaagatgcttgttgacaaaatctttaattgtcttgatgaaggtgggactatatctaacatcttgattaataaaatttataacattgtccataggatactttgtaactagttttatacacatctcttcatcggtaagtttagacagaatatcgtgaacaggtggtatattatattcatcagatatacgaagaacaatgtccaaatctatattgtttaatatattatatagatgtagcgtagctcctacaggaatatctttaactaagtcaatgatttcatcaaccgttagatctattttaaagttaatcatataggcattgatttttaaaaggtatgtagccttgactacattctcattaattaaccattccaagtcattgtgtgtaagaagattatattctatcataagcttgactacatttggtcccgataccattaaagaattcttatgatataaggaaacagattttaggtactcatctactctacaagaattttggagagccttaacgatatcagtgacgtttattatttcaggaggaaagaatctaacattgagaatatcggaattaatagcttccagatacagtgattttggcaatagtccgtgtaatccataatccagtaacacgagctggtgcttgctagacaccttttcaatgtttaatttttttgaaataagctttgataaagccttcctcgcaaattccggatacatgaacatgtcggcgacatgattaagtattgttttttcattatttttatattttctcaacaagttctcaataccccaatagatgatagaatatcacccaatgcgtccatgttgtctatttccaacaggtcgctatatccaccaatagaagtttttccaaaaaagattctaggaacagttctaccaccagtaatttgttcaaaataatcccgcaattcattttcgggtttaaattctttaatatcgacaatttcatacgctcctcttttgaaactaaacttatttagaatatccagtgcatttctacaaaaaggacatgtatacttgacaaaaattgtcactttgttattggccaacctttgttgtacaaattcctcggccattttaatatttaagtgatataaaactatctcgacttatttaactctttagtcgagatatatggacgcagatagctatatgatagccaactacagaaggcaaacgctataaaaaacataattacgacgagcatatttataaatatttttattcagcattacttgatatagtaatattaggcacagtcaaacattcaaccactctcgatacattaactctctcattttctttaacaaattctgcaatatcttcgtaaaaagattcttgaaactttttagaatatctatcgactctagatgaaatagcgttcgtcaacatactatgttttgtatacataaaggcgcccattttaacagtttctagtgacaaaatgctagcgatcctaggatcctttagaatcacatagattgacgattcgtctctcttagtaactctagtaaaataatcatacaatctagtacgcgaaataatattatccttgacttgaggagatctaaacaatctagttttgagaacatcgataagttcatcgggaatgacatacatactatctttaatagaactcttttcatccagttgaatggattcgtccttaaccaactgattaatgagatcttctattttatcattttccagatgatatgtatgtccattaaagttaaattgtgtagcgcttctttttagtctagcagccaatactttaacatcactaatatcgatatacaaaggagatgatttatctatggcattaagaattcgtttttcgacatccgtcaaaaccaattcctttttgcctgtatcatccagttttccatcctttgtaaagaaattattttctactagactattaataagactgataaggattcctccataattgcacaatccaaactttttaacaaaactagactttacgagatctacaggaatgcgtacttcaggttttttagcttgtgattttttcttttgcggacattttctagtaaccaactcatctaccatttcattgattttagcagtgaaataagctttcaatgcacgggcactgatactattgaaaacgagttgatcttcaaattccgccatttaagttcaccaaacaacttttaaatacaaatatatcaatagtagtagaataagaactataaaaaaaataataattaaccaaccccaacaaccggtattattagttgatgtggtagttttctcatcacttagaacagatttaacaatttctataaagtctgtcaaatcatcttccggagaccccataaatacaccaaatatagcggcgtacaacttatccatttatacattgaatattggcttttctttatcgctatcttcatcatattcatcatcaatatcaacaagtcccagattacgagccagatcttcttctacattttcagtcattgatacacgttcactatctccagagagtccgataacgttagccaccacttctctatcaatgattagtttcttgagcgcgaaagtaatttttgtttccgttccggatctatagaagacgataggtgtgataattgccttggccaattgtctttctcttttactgagtgattctagttcaccttctatagatctgagaatggatgattctccagtcgaaacatattctaccatggatccgtttaatttgttgatgaagatggattcatccttaaatgttttctctgtaatagtttccaccgaaagactatgcaaagaatttggaatgcgttccttgtgcttaatgtttccatagacggcttctagaagttgatacaacataggactagccgcggtaacttttatttttagaaagtatccatcgcttctatcttgtttagatttatttttataaagtttagtctctccttccaacataataaaagtggaagtcatttgactagataaactatcagtaagttttatagagatagacgaacaattagcgtattgagaagcatttagtgtaacgtattcgatacattttgcattagatttactaatcgattttgcatactctataacacccgcacaagtctgtagagaatcgctagatgcagtaggtcttggtgaagtttcaactctcttcttgattaccttactcatgattaaacctaaataattgtactttgtaatataatgatatatattttcactttatctcatttgagaataaaaatgtttttgtttaaccactgcatgatgtacagatttcggaatcgcaaaccaccagtggttttattttatccttgtccaatgtgaattgaatgggagcggatgcgggtttcgtacgtagatagtacattcccgtttttagaccgagactccatccgtaaaaatgcatactcgttagtttggaataactcggatctgctatatggatattcatagattgactttgatcgatgaaggctcccctgtctgcagccatttttatgatcgtcttttgtggaatttcccaaatagttttataaactcgcttaatatcttctggaaggtttgtattctgaatggatccaccatctgccataatcctattcttgatctcatcattccataattttctctcggttaaaactctaaggagatgcggattaactacttgaaattctccagacaatactctccgagtgtaaatattactggtatacggttccaccgactcattatttcccaaaatttgagcagttgatgcagtcggcataggtgccaccaataaactatttctaagaccgtatgttctgattttatcttttagaggttcccaattccaaagatccgacggtacaacattccaaagatcatattgtagaataccgttactggcgtacgatcctacatatgtatcgtatggtccttccttctcagctagttcacaactcgcctctaatgcaccgtaataaatggtttcgaagatcttcttatttagatcttgtgcttccaggctatcaaatggataatttaagagaataaacgcgtccgctaatccttgaacaccaataccgataggtctatgtctcttattagagatttcagcttctggaataggataataattaatatctataattttattgagatttctgacaattactttgaccacatccttcagtttgagaaaatcaaatcgcccatctattacaaacatgttcaaggcaacagatgccagattacaaacggctacctcattagcatccgcatattgtattatctcagtgcaaagattactacacttgatagttcctaaattttgttgattactctttttgttacacgcatccttataaagaatgaatggagtaccagtttcaatctgagattctataatcgctttccagacgactcgagcctttattatagatttgtatctcctttctctttcgtatagtgtatacaatcgttcgaactcgtctccccaaacattgtccaatccaggacattcatccggacacatcaacgaccactctccgtcatccttcactcgtttcataaagagatcaggaatccaaagagctataaatagatctctggttctatgttcctcgtttcctgtattctttttaagatcgaggaacgccataatatcagaatgccacggttccaagtatatggccataactccaggccgtttgtttcctccctgatctatgtatctagcggtgttattataaactctcaacattggaataataccgtttgatataccattggtaccggagatatagcttccactggcacgaatattactaattgatagacctattccccctgccattttagagattaatgcgcatcgttttaacgtgtcatagataccctctatgctatcatcgatcatgttaagtagaaaacagctagacatttggtgacgactagttcccgcattaaataaggtaggagaagcgtgcgtaaaccatttttcagaaagtagattgtacgtctcaatagctgagtctatatcccattgatgaattcctactgcgacacgcattaacatgtgctgaggtctttcaacgatcttgttgtttattttcaacaagtaggatttttccaaagttttaaaaccaaaatagttgtatgaaaagtctcgttcgtaaataataaccgagttgagtttatccttatatttgttaactatatccatggtgatacttgaaataatcggagaatgtttcccatttttaggattaacatagttgaataaatcctccatcacttcactaaatagtttttttgtttccttgtgtagatttgatacggctattctggcggctagaatggcataatccggatgttgtgtagtacaagtggctgctatttcggctgccagagtgtccaattctaccgttgttactccattatatattccttgaataaccttcatagctattttaataggatctatatgatccgtgtttaagccataacataattttctaatacgagacgtgattttatcaaacatgacattttccttgtatccatttcgtttaatgacaaacatttttgttggtgtaataaaaaaattatttaacttttcattaatagggatttgacgtatgtagcgtacaaaatgattgttcctggtatatagataaagagtcctatatatttgaaaatcgttacggctcgattaaactttaatgattgcatagtgaatatatcattaggatttaactccttgactatcatggcggcgccagaaattaccatcaaaagcattaatacagttataccgatcgcagttagaacggttatagcatccaccatttatatctaaaaattagatcaaagaatatgtgacaaagtcctagttgtatactgagaattgacgaaacaatgtttcttacatatttttttcttattagtaaccgacttaatagtaggaactggaaaactagacttgattattctataagtatagatacccttccaaataatattctctttgataaaagttccagaaaatgtagaattttttaaaaagttatcttttgctattaccaagattgtgtttagacgcttattattaatatgagtgatgaaatccacaccgcctctagatatcgcctttatttccacattagatggtaaatccaatagtgaaactatctttttaggaatgtatggactcgcgtttagaggagtaaacgtcttaggcgtcggaaaggatgattcatcaaacgaataaacaatttcacaaatggatgttaatgtattagtaggaaattttttgacgctattggaattgaagattctaatggatgatgttctacctatttcatccgataacatgttaatttccgacaccaacggttttaatatttcgatgatatacggtagtctctctttcggacttatatagcttattccacaatacgagtcattatatactccaaaaaacaaaataactagtataaaatctgtatcgaatgggaaaaacgaaattatcgacataggtatagaatccggaacattgaacgtattaatacttaattctttttctgtggtaagtaccgataggttattgacattgtatggttttaaatattctataacttgagacttgatagatattagtgatgaattgaaaattatttttatcaccacgtgtgtttcaggatcatcgtcgacgcccgtcaaccaaccgaacggagtaaaataaatatcattaatatatgctctagatattagtatttttatcaatcctttgattatcatcttctcgtaggcgaatgattccatgatcaagagtgatttaagaacatcctccggagtattaatgggcttagtaaacagtccatcgttgcaataataaaagttatccaagttaaaggatattatgcattcgtttaaagatatcacctcatctgacggagacaattttttggtaggttttagagactttgaagctacttgtttaacaaagttattcatcgtcgtctactattctatttaattttgtagttaatttatcacatatcacattaattgactttttggtccacttttccatacgtttatattcttttaatcctgcgttatccgtttccgttatatccagggatagatcttgcaagttaaatagaatgctcttaaataatgtcattttcttatccgctaaaaatttaaagaatgtataaacctttttcagagatttgaaactcttaggtggtgtcctagtacacaatatcataaacaaactaataaacattccacattcagattccaacagctgattaacttccacattaatacagcctattttcgctccaaatgtacattcgaaaaatctgaataaaacatcgatgtcacaatttgtattatccaatacagaatgtttgtgattcgtgttaaaaccatcggagaaggaatagaaataaaaattattatagtggtggaattcagttggaatattgcctccggagtcataaaaggatactaaacattgttttttatcataaattacacatttccaatgagacaaataacaaaatccaaacattacaaatctagaggtagaacttttaattttgtctttaagtatatacgataagatatgtttattcataaacgcgtcaaatttttcatgaatcgctaaggagtttaagaatctcatgtcaaattgtcctatataatccacttcggatccataagcaaactgagagactaagttcttaatacttcgattgctcatccaggctcctctctcaggctctattttcatcttgacgacctttggattttcaccagtatgtattcctttacgtgataaatcatcgattttcaaatccatttgtgagaagtctatcgccttagatactttttcccgtagtcgaggtttaaaaaaatacgctaacggtatactagtaggtaactcaaagacatcatatatagaatggtaacgcgtctttaactcgtcggttaactctttcttttgatcgagttcgtcgctactattgggtctgctcaggtgccccgactctactagttccaacatcataccgataggaatacaagacactttgccggcggttgtagatttatcatatttttccactacatatccgttacaatttgttaaaaatttagatacatctatattgctacataatccagctagtgaatatatatgacataataaattggtaaatcctagttctggtattttactaattactaaatctgtatatctttccatttatcatggaaaagaatttaccagatatcttcttttttccaaactgcgttaatgtattctcttacaaatattcacaagatgaattcagtaatatgagtaaaacggaacgtgatagtttctcattggccgtgtttccagttataaaacatagatggcataacgcacacgttgtaaaacataaaggaatatacaaagttagtacagaagcacgtggaaaaaaagtatctcctccatcactaggaaaacccgcacacataaacctaaccgcgaagcaatatatatacagtgaacacacaataagctttgaatgttatagttttctaaaatgtataacaaatacagaaatcaattcgttcgatgagtatatattaagaggactattagaagctggtaatagtttacagatattttccaattccgtaggtaaacgaacagatactataggtgtactagggaataagtatccatttagcaaaattccattggcctcattaactcctaaagcacaacgagagatattttcagcgtggatttctcatagacctgtagttttaactggaggaactggagtgggtaagacgtcacaggtacccaagttattgctttggtttaattatttatttggtggattctctactctagataaaatcactgactttcacgaaagaccagtcattctatctcttcctaggatagctttagttagattgcatagcaataccattttaaaatcattgggatttaaggtactagatggatctcctatttctttacggtacggatctataccggaagaattaataaacaaacaaccaaaaaaatatggaattgtattttctacccataagttatctctaacaaaactatttagttatggcactcttattatagacgaagttcatgagcatgatcaaataggagatattattatagcagtagcgagaaagcatcatacgaaaatagattctatgtttttaatgactgccacgttagaggatgacagggaacggctaaaagtatttttacctaatcccgcatttatacatattcctggagatacactgtttaaaattagcgaggtatttattcataataagataaatccatcttccagaatggcatacatagaagaagaaaagagaaatttagttactgctatacagatgtatactcctcctgatggatcatccggtatagtctttgtggcatccgttgcacagtgtcacgaatataaatcatatttagaaaaaagattaccgtatgatatgtatattattcatggtaaggtcttagatatagacgaaatattagaaaaagtgtattcatcacctaatgtatcgataattatttctactccttatttggaatccagcgttactatacgcaatgttacacacatttatgatatgggtagagtttttgtccccgctccttttggaggatcgcaacaatttatttctaaatctatgagagatcaacgaaaaggaagagtaggaagagttaatcctggtacatacgtctatttctatgatctgtcttatatgaagtctatacagcgaatagattcagaatttctacataattatatattgtacgctaataagtttaatctaacactccccgaagatttgtttataatccctacaaatttggatattctatggcgtacaaaggaatatatagactcgttcgatattagtacagaaacatggaataaattattatccaattattatatgaagatgatagagtatgctaaactttatgtactaagtcctattctcgctgaggagttggataactttgagaggacgggagaattaactagtattgtacgagaagccattttatctctaaatttacaaattaagattttaaattttaaacataaagatgatgatacgtatatacacttttgtaaaatattattcggtgtctataacggaacaaacgctactatatattatcatagacctctaacgggatatatgaatatgatttcagatactatatttgttcctgtagataataactaaaaatcaaactctaatgaccacatctttttttagagatgaaaaattttccacatctccttttgtagacacgactaaacattttgcagaaaaaagtttattagtgtttagataatcgtatacttcatcagtgtagatagtaaatgtgaacagataaaaggtattcttgctcaatagattggtaaattccatagaatatattaatcctttcttcttgagatcccacatcatttcaaccagagacgttttatccaatgatttacctcgtactataccacatacaaaactagattttgcagtgacgtcgtacctggtattcctaccaaacaaaattttacttttagttcttttagaaaattctaaggtagaatctctatttgccaatatgtcatctatggaattaccactagcaaaaaatgatagaaatatatattgatacatcgcagctggttttgatctactatactttaaaaacgaatcagattccataattgcctgtatatcatcagctgaaaaactatgttttacacgtattccttcggcatttctttttaatgatatatcttgtttagacaatgataaagttatcatgtccatgagagacgcgtctccgtatcgtataaatatttcattagatgttagacgcttcattaggggtatacttctataaggtttcttaatcagtccatcattggttgcgtcaagaactactatcggatgttgttgggtatctctagtgttacacatggccttactaaagtttgggtaaataactatgatatctctattaattatagatgcatatatttcattcgtcaaggatattagtatcgacttgctatcgtcattaatacgtgtaatgtaatcatataaatcatgcgatagccaaggaaaatttaaatagatgttcatcatataatcgtcgctataattcatattaatacgttgacattgactaatttgtaatatagcctcgccacgaagaaagctctcgtattcagtttcatcgataaaggataccgttaaatataactggttgccgatagtctcatagtctattaagtggtaagtttcgtacaaatacagaatccctaaaatattatctaatgttggattaatctttaccataactgtataaaatggagacggagtcataactattttaccgtttgtacttactggaatagatgaaggaataatctccggacatgctggtaaagacccaaatgtctgtttgaagaaatccaatgttccaggtcctaatctcttaacaaaaattacgatattcgatcccgatatcctttgcattctatttaccagcatatcacgaactatattaagattatctatcatgtctattctcccaccgttatataaatcgcctccgctaagaaacgttagtatatccatacaatggaatacttcatttctaaaatagtattcgttttctaattctttaatgtgaaatcgtatactagaaagggaaaaattatctttgagttttccgttagaaaagaaccacgaaactaatgttctgattgcgtccgattccgttgctgaattaatggatttacaccaaaaactcatataacttctagatgtagaagcattcgctaaaaaattagtagaatcaaaggatataagtagatgttccaacaagtgagcaattcccaagatttcatctatatcattctcgaatccgaaattagaaattcccaagtagatatcctttttcatccgatcgttgatgaaaatacgaactttattcggtaagacaatcatttactaaggagtaaaataggaagtaatgttcgtatgtcgttatcatcgtataaattaaaggtgtgttttttaccattaagtgacattataattttaccaatattggaattataatataggtgtatttgcgcactcgcgacggttgatgcatcggtaaatatagctgtatctaatgttctagtcggtatttcatcatttcgctgtctaataatagcgttttctctatctgtttccattacagctgcctgaagtttattggtcggataatatgtaaaataataagaaatacatacgaataacaaaaataaaataagatataataaagatgccatttagagatctaattttgtttaacttgtccaaattcctacttacagaagatgaggaatcgttggagatagtgtcttccttatgtagaggatttgaaatatcttataatgacttgataacttactttccagataggaaataccataaatatatttataaagtatttgaacatgtagatttatcggaggaattaagtatggaattccatgatacaactctgagagatttagtctatcttagattgtacaagtattccaagtgtatacggccgtgttataaattaggagataatctaaaaggcatagttgttataaaggacaggaatatttatattagggaagcaaatgatgacttgatagaatatctcctcaaggaatacactcctcagatttatacatattctaatgagcgcgtccccataactggttcaaaattaattctttgtggattttctcaagttacatttatggcgtatacaacgtcgcatataacaacaaataaaaaggtagatgttctcgtttccaaaaaatgtatagatgaactagtcgatccaataaattatcaaatacttcaaaatttatttgataaaggaagcggaacaataaacaaaatactcaggaagatattttattcggtaacaggtggccaaactccataggtagctttttctatttcggattttagaatttccaaattcaccagcgatttatcggttttggtgaaatccaaggatttattaatgtccacaaatgccatttgttttgtctgtggattgtatttgaaaatggaaacgatgtagttagatagatgcgctgcgaagtttcctattagggttccgcgcttcacgtcacccagcatacttgaatcaccatcctttaaaaaaaatgataagatatcaacatggagtatatcatactcgaattttaattcttctactgactcactgacattttcacaaatactacaatacggtttaccgaaaataatcagtacgttcttcatttatgggtatcaaaaacttaaaatcgttactgctggaaaataaatcactgacgatattagatgataatttatacaaagtatacaatggaatatttgtggatacaatgagtatttatatagccgtcgccaattgtgtcagaaacttagaagagttaactacggtattcataaaatacgtaaacggatgggtaaaaaagggagggcatgtaaccctttttatcgatagaggaagtataaaaattaaacaagacgttagagacaagagacgtaaatattctaaattaaccaaggacagaaaaatgttagaattagaaaagtgtacatccgaaatacaaaatgttaccggatttatggaagaagaaataaaggcagaaatgcaattaaaaatcgataaactcacatttcaaatatatttatctgattctgataacataaaaatatcattgaatgagatactaacacatttcaacaataatgagaatgttacattattttattgtgatgaacgagacgcagaattcgttatgtgtctcgaggctaaaacacatttctctaccacaggagaatggccgttgataataagtaccgatcaggatactatgctatttgcatctgctgataatcatcctaagatgataaaaaacttaactcaactgtttaaatttgttccctcggcagaggataactatttagcaaaattaacggcgttagtgaatggatgtgatttctttcctggactctatggggcatctataacacccaccaacttaaacaaaatacaattgtttagtgattttacaatcgataatatagtcactagtttggcaattaaaaattattatagaaagactaactctaccgtagacgtgcgtaatattgttacgtttataaacgattacgctaatttagacgatgtctactcgtatattcctccttgtcaatgcactgttcaagaatttatattttccgcattagatgaaaaatggaatgaatttaaatcatcttatttagaaagcgtgccgttaccctgccaattaatgtacgcgttagaaccacgcaaggagattgatgtttcagaagttaaaactttatcatcttatatagatttcgaaaatactaaatcagatatcgatgttataaaatctatatcctcgatcttcggatattctaacgaaaactgtaacacgatagtattcggcatctataaggataatttactactgagtataaataattcattttactttaacgatagtctgttaataaccaatactaaaagtgataatataataaatataggttactagattaaaaatggtgttccaactcgtgtgctctacatgcggtaaagatatttctcacgaacgatataaattgattatacgaaaaaaatcattaaaggatgtactcgtcagtgtaaagaacgaatgttgtaggttaaaattatctacacaaatagaacctcaacgtaacttaacagtgcaacctctattggatataaactaatatggatccggttaattttatcaagacatatgcgcctagaggttctattatttttattaattataccatgtcattaacaagtcatttgaatccatcgatagaaaaacatgtgggtatttattatggtacgttattatcggaacacttggtagttgaatctacctatagaaaaggagttcgaatagtcccattggatagtttttttgaaggatatcttagtgcaaaagtatacatgttagagaatattcaagttatgaaaatagcagctgatacgtcattaactttattgggtattccgtatggatttggtcatgatagaatgtattgttttaaattggtagctgactgttataaaaatgccggtattgatacatcgtctaaacgaatattgggcaaagatatttttctgagccaaaacttcacagacgataatagatggataaagatatatgattctaataatttaacattttggcaaattgattaccttaaagggtgagttaatatgcataactactcctccgttgttttttccctcgttctttttcttaacgttgtttgccatcactctcataatgtaaagatattctaaaatggtaaacttttgcatatcggacgcagaaattggtataaatgttgtaattgtattatttcccgtcaatggactagtcacagctccatcagttttatatcctttagagtatttctcactcgtgtctaacattctagagcattccatgatctgtttatcgttgatattggccggaaagatagattttttattttttattatattactattggcaattgtagatataacttctggtaaatatttttctaccttttcaatctcttctattttcaagccggctatatattctgctatattgttgctagtatcaataccttttctggctaagaagtcatatgtggtattcactatatcagttttaactggtagttccattagcctttccacttctgcagaataatcagaaattggttctttaccagaaaatccagctactataataggctcaccgatgatcattggcaaaatcctatattgtaccagattaatgagagcatatttcatttccaataattctgctagttcttgagacattgatttatttgatgaatctagttggttctctagatactctaccatttctgccgcatacaataacttgttagataaaatcagggttatcaaagtgtttagcgtggctagaatagtgggcttgcatgtattaaagaatgcggtagtatgagtaaaccgttttaacgaattatatagtctccagaaatctgtggcgttacatacatgagccgaatgacatcgaagattgtccaatatttttaatagctgctctttgtccattatttctatatttgactcgcaacaattgtagataccattaatcaccgattcctttttcgatgccggacaatagcacaattgtttagctttggactctatgtattcagaattaatagatatatctctcaatacagattgcactatacattttgaaactatgtcaaaaattgtagaacgacgctgttctgcagccatttaactttaaataatttacaaaaatttaaaatgagcatccgtataaaaatcgataaactgcgccaaattgtggcatatttttcagagttcagtgaagaagtgtctataaatgtagactcgacggatgagttaatgtatatttttgccgccttgggcggatctgtaaacatttgggcaattatacctctaagtgcatcagtgttttaccgaggagccgaaaatattgtgtttaatcttcctgtgtccaaggtaaaatcgtgtttgtgtagttttcacaatgatgccatcatagatatagaacctgatctggaaaataatctagtaaaactttctagttatcatgtagtaagtgtcgattgtaacaaggaactgatgcctattaggacagatactactatttgtctaagtatagatcaaaagaaatcttacgtgtttaattttcacaagtatgaagaaaaatgttgtggtagaaccgtcattcatctagaatggttgttgggctttatcaagtgtattagtcagcatcagcatctggctattatgtttaaagatgacaatattattatgaagactcctggtaatactgatgcgttttccagggaatattctatgactgaatgttctcaagaactacaaaagttttctttcaaaatagctatctcgtctctcaacaaactacgaggattcaaaaagagagtcaatgtttttgaaactagaatcgtaatggataatgacgataacattttaggaatgttgttttcggatagagttcaatcctttaagatcaacatctttatggcgtttttagattaatactttcaatgagataaatatgggtggcggagtaagtgttgagctccctaaacgggatccgcctccgggagtacccactgatgagatgttattaaacgtggataaaatgcatgacgtgatagctcccgctaagcttttagaatatgtgcatataggaccactagcaaaagataaagaggataaagtaaagaaaagatatccagagtttagattagtcaacacaggacccggtggtctttcggcattgttaagacaatcgtataatggaaccgcacccaattgctgtcgcacttttaatcgtactcattattggaagaaggatggaaagatatcagataagtatgaagagggtgcagtattagaatcgtgttggccagacgttcacgacactggaaaatgcgatgttgatttattcgactggtgtcagggggatacgttcgatagaaacatatgccatcagtggatcggttcagcctttaataggagtaatagaactgtagagggtcaacaatcgttaataaatctgtataataagatgcaaacattatgtagtaaagatgctagtgtaccaatatgcgaatcatttttgcattatttacgcgcacacaatacagaagatagcaaagagatgatcgattatattctaagacaacagtctgcggactttaaacagaaatatatgagatgtagttatcccactagagataagttagaagagtcattaaaatatgcggaacctcgagaatgttgggatccagagtgttcgaatgccaatgttaatttcttactaacacgtaattataataatttaggactttgcaatattgtacgatgtaataccagcgtgaacaacttacagatggataaaacttcctcattaagattgtcatgtggattaagcaatagtgatagattttctactgttcccgtcaatagagcaaaagtagttcaacataatattaaacactcgttcgacctaaaattgcatttgatcagtttattatctctcttggtaatatggatactaattgtagctatttaaatgggtgccgcggcaagcatacagacgacggtgaatacactcagcgaacgtatctcgtctaaattagaacaagaagcgaacgctagtgctcaaacaaaatgtgatatagaaatcggaaatttttatatccgacaaaaccatggatgtaacctcactgttaaaaatatgtgctctgcggacgcggatgctcagttggatgctgtgttatcagccgctacagaaacatatagtggattaacaccggaacaaaaagcatacgtgccagctatgtttactgctgcgttaaacattcagacgagtgtaaacactgttgttagagattttgaaaattatgtgaaacagacttgtaattctagcgcggtcgtcgataacaaattaaagatacaaaacgtaatcatagatgaatgttacggagccccaggatctccaacaaatttggaatttattaatacaggatctagcaaaggaaattgtgccattaaagcgttgatgcaattgacgactaaggccactactcaaatagcacctagacaagttgctggtacaggagttcagttttatatgattgttatcggtgttataatattggcagcgttgtttatgtactatgccaagcgtatgttgttcacatccaccaatgataaaatcaaacttattttagccaataaggaaaacgtccattggactacttacatggacacattctttagaacttctccgatggttattgctaccacggatatgcaaaactgaaaatatattgataatattttaatagattaacatggaagttatcgctgatcgtctagacgatatagtgaaacaaaatatagcggatgaaaaatttgtagattttgttatacacggtctagagcatcaatgtcctgctatacttcgaccattaattaggttgtttattgatatactattatttgttatagtaatttatatttttacggtacgtctagtaagtagaaattatcaaatgttgttggtggtgctagtcatcacattaactattttttattactttatactataatagtactagactgacttctaacaaacatctcacctgccataaataaatgcttgatattaaagtcttctatttctaacactattccatctgtggaaaataatactctgacattatcgctaattgacacatcggtgagtgatatgcctataaagtaataatcttctttgggcacatataccagtgtaccaggttctaacaacctatttactggtgctcctgtagcatactttttctttaccttgagaatatccatcgtttgcttggtcaatagcgatatgtgattttttatcaaccactcaaaaaagtaattggagtgttcatatcctctacgggctattgtctcatggccgtgtatgaaatttaagtaacacgactgtggtagatttgttctatagagccgattgccgcaaatagatagaactaccaatatgtctgtacaaatgttaaacattaattgattaacagaaaaaacaatgttcgttctgggaatagaaaccagatcaaaacaaaattcgttagaatatatgccacgtttatacatggaatataaaataactacagtttgaaaaataacagtatcatttaaacatttaacttgcggggttaatctcacaactttactgtttttgaactgttcaaaatatagcatcgatccgtgagaaatacgtttagccgcctttaatagaggaaatcccaccgcctttctggatctcaccaacgacgatagttctgaccagcaactcatttcttcatcatccacctgttttaacatataataggcaggagatagatatccgtcattgcaatattccttctcgtaggcacacaatctaatattgataaaatctccattctcttctctgcatttattatcttgtctcggtggctgattaggctgtggtcttggtttaggccttggtctatcgttgttgaatctattttggtcattaaatctttcatttcttcctggtatatttctatcacctcgtttggttggatttttgtctatattatcgtttgtaacatcggtacgggtattcatttatcacaaaaaaaacttctctaaatgagtctactgctagaaaacctcatcgaagaagataccatattttttgcaggaagtatatctgagtatgatgatttacaaatggttattgccggcgcaaaatccaaatttccaagatctatgctttctatttttaatatagtacctagaacgatgtcaaaatatgagttggagttgattcataacgaaaatatcacaggagcaatgtttaccacaatgtataatataagaaacaatttgggtctaggagatgataaactaactattgaagccattgaaaactatttcttggatcctaacaatgaagttatgcctcttattattaataatacggatatgactgccgtcattcctaaaaaaagtggtaggagaaagaataagaacatggttatcttccgtcaaggatcatcacctatcttgtgcattttcgaaactcgtaaaaagattaatatttataaagaaaatatggaatccgcgtcgactgagtatacacctatcggagacaacaaggctttgatatctaaatatgcgggaattaatgtcctgaatgtgtattctccttccacatccataagattgaatgccatttacggattcaccaataaaaataaactagagaaacttagtactaataaggaactagaatcgtatagttctagccctcttcaagaacccattaggttaaatgattttctgggactattggaatgtgttaaaaagaatattcctctaacagatattccgacaaaggattgattactataaatggagaatgttcctaatgtatactttaatcctgtgtttatagagcccacgtttaaacattctttattaagtgtttataaacacagattaatagttttatttgaagtattcgttgtattcattctaatatatgtattttttagatctgaattaaatatgttcttcatgcctaaacgaaaaatacccgatcctattgatagattacgacgtgctaatctagcgtgtgaagacgataaattaatgatctatggattaccatggatgacaactcaaacatctgcgttatcaataaatagtaaaccgatagtgtataaagattgtgcaaagcttttgcgatcaataaatggatcacaaccagtatctcttaacgatgttcttcgcagatgatgattcattttttaagtatttggctagtcaagatgatgaatcttcattatctgatatattgcaaatcactcaatatctagactttctgttattattattgatccaatcaaaaaataaattagaagctgtgggtcattgttatgaatctctttcagaggaatacagacaattgacaaaattcacagactttcaagattttaaaaaactgtttaacaaggtccctattgttacagatggaagggtcaaacttaataaaggatatttgttcgactttgtgattagtttgatgcgattcaaaaaagaatcctctctagctaccaccgcaatagatcctgttagatacatagatcctcgtcgcaatatcgcattttctaacgtgatggatatattaaagtcgaataaagtgaacaataattaattctttattgtcatcatgaacggcggacatattcagttgataatcggccccatgttttcaggtaaaagtacagaattaattagacgagttagacgttatcaaatagctcaatataaatgcgtgactataaaatattctaacgataatagatacggaacgggactatggacgcatgataagaataattttgaagcattggaagcaactaaactatgtgatgtcttggaatcaattacagatttctccgtgataggtatcgatgaaggacagttctttccagacattgttgaattagatcgataaaaattaattaattacccgggtaccaggcctagatctgtcgagatccggtggtggtgcaaatcaaagaactgctcctcagtggatgttgcctttacttctaggcctgtacggaagtgttacttctgctctaaaagctgctgcagggggggggggggggtgggggggccggttagggccgccatcccctcagagcgtcgggatatcgggtggcggctcgggacggaggacgcgctagtgttcttctgtgtggcagttcagaatgatggatcaagctagatcagcattctctaacttgtttggtggagaaccattgtcatatacccggttcagcctggctcggcaagtagatggcgataacagtcatgtggagatgaaacttgctgtagatgaagaagaaaatgctgacaataacacaaaggccaatgtcacaaaaccaaaaaggtgtagtggaagtatctgctatgggactattgctgtgatcgtctttttcttgattggatttatgattggctacttgggctattgtaaaggggtagaaccaaaaactgagtgtgagagactggcaggaaccgagtctccagtgagggaggagccaggagaggacttccctgcagcacgtcgcttatattgggatgacctgaagagaaagttgtcggagaaactggacagcacagacttcaccagcaccatcaagctgctgaatgaaaattcatatgtccctcgtgaggctggatctcaaaaagatgaaaatcttgcgttgtatgttgaaaatcaatttcgtgaatttaaactcagcaaagtctggcgtgatcaacattttgttaagattcaggtcaaagacagcgctcaaaactcggtgatcatagttgataagaacggtagacttgtttacctggtggagaatcctgggggttatgtggcgtatagtaaggctgcaacagttactggtaaactggtccatgctaattttggtactaaaaaagattttgaggatttatacactcctgtgaatggatctatagtgattgtcagagcagggaaaatcacctttgcagaaaaggttgcaaatgctgaaagcttaaatgcaattggtgtgttgatatacatggaccagactaaatttcccattgttaacgcagaactttcattctttggacatgctcatctggggacaggtgacccttacacacctggattcccttccttcaatcacactcagtttccaccatctcggtcatcaggattgcctaatatacctgtccagacaatctccagagctgctgcagaaaagctgtttgggaatatggaaggagactgtccctctgactggaaaacagactctacatgtaggatggtaacctcagaaagcaagaatgtgaagctcactgtgagcaatgtgctgaaagagataaaaattcttaacatctttggagttattaaaggctttgtagaaccagatcactatgttgtagttggggcccagagagatgcatggggccctggagctgcaaaatccggtgtaggcacagctctcctattgaaacttgcccagatgttctcagatatggtcttaaaagatgggtttcagcccagcagaagcattatctttgccagttggagtgctggagactttggatcggttggtgccactgaatggctagagggatacctttcgtccctgcatttaaaggctttcacttatattaatctggataaagcggttcttggtaccagcaacttcaaggtttctgccagcccactgttgtatacgcttattgagaaaacaatgcaaaatgtgaagcatccggttactgggcaatttctatatcaggacagcaactgggccagcaaagttgagaaactcactttagacaatgctgctttccctttccttgcatattctggaatcccagcagtttctttctgtttttgcgaggacacagattatccttatttgggtaccaccatggacacctataaggaactgattgagaggattcctgagttgaacaaagtggcacgagcagctgcagaggtcgctggtcagttcgtgattaaactaacccatgatgttgaattgaacctggactatgagaggtacaacagccaactgctttcatttgtgagggatctgaaccaatacagagcagacataaaggaaatgggcctgagtttacagtggctgtattctgctcgtggagacttcttccgtgctacttccagactaacaacagatttcgggaatgctgagaaaacagacagatttgtcatgaagaaactcaatgatcgtgtcatgagagtggagtatcacttcctctctccctacgtatctccaaaagagtctcctttccgacatgtcttctggggctccggctctcacacgctgccagctttactggagaacttgaaactgcgtaaacaaaataacggtgcttttaatgaaacgctgttcagaaaccagttggctctagctacttggactattcagggagctgcaaatgccctctctggtgacgtttgggacattgacaatgagttttaaatgtgatacccatagcttccatgagaacagcagggtagtctggtttctagacttgtgctgatcgtgctaaattttcagtagggctacaaaacctgatgttaaaattccatcccatcatcttggtactactagatgtctttaggcagcagcttttaatacagggtagataacctgtacttcaagttaaagtgaataaccacttaaaaaatgtccatgatggaatattcccctatctctagaattttaagtgctttgtaatgggaactgcctctttcctgttgttgttaatgaaaatgtcagaaaccagttatgtgaatgatctctctgaatcctaagggctggtctctgctgaaggttgtaagtggtcgcttactttgagtgatcctccaacttcatttgatgctaaataggagataccaggttgaaagaccttctccaaatgagatctaagcctttccataaggaatgtagctggtttcctcattcctgaaagaaacagttaactttcagaagagatgggcttgttttcttgccaatgaggtctgaaatggaggtccttctgctggataaaatgaggttcaactgttgattgcaggaataaggccttaatatgttaacctcagtgtcatttatgaaaagaggggaccagaagccaaagacttagtatattttcttttcctctgtcccttcccccataagcctccatttagttctttgttatttttgtttcttccaaagcacattgaaagagaaccagtttcaggtgtttagttgcagactcagtttgtcagactttaaagaataatatgctgccaaattttggccaaagtgttaatcttaggggagagctttctgtccttttggcactgagatatttattgtttatttatcagtgacagagttcactataaatggtgtttttttaatagaatataattatcggaagcagtgccttccataattatgacagttatactgtcggttttttttaaataaaagcagcatctgctaataaaacccaacagatactggaagttttgcatttatggtcaacacttaagggttttagaaaacagccgtcagccaaatgtaattgaataaagttgaagctaagatttagagatgaattaaatttaattaggggttgctaagaagcgagcactgaccagataagaatgctggttttcctaaatgcagtgaattgtgaccaagttataaatcaatgtcacttaaaggctgtggtagtactcctgcaaaattttatagctcagtttatccaaggtgtaactctaattcccattttgcaaaatttccagtacctttgtcacaatcctaacacattatcgggagcagtatcttccataatgtataaagaacaaggtagtttttacctaccacagtgtctgtatcggagacagtgatctccatatgttacactaagggtgtaagtaattatcgggaacagtgtttcccataattttcttcatgcaatgacatcttcaaagcttgaagatcgttagtatctaacatgtatcccaactcctataattccctatcttttagttttagttgcagaaacattttgtggtcattaagcattgggtgggtaaattcaaccactgtaaaatgaaattactacaaaatttgaaatttagcttgggtttttgttacctttatggtttctccaggtcctctacttaatgagatagtagcatacatttataatgtttgctattgacaagtcattttaactttatcacattatttgcatgttacctcctataaacttagtgcggacaagttttaatccagaattgaccttttgacttaaagcagagggactttgtatagaaggtttgggggctgtggggaaggagagtcccctgaaggtctgacacgtctgcctacccattcgtggtgatcaattaaatgtaggtatgaataagttcgaagctccgtgagtgaaccatcattataaacgtgatgatcagctgtttgtcatagggcagttggaaacggcctcctagggaaaagttcatagggtctcttcaggttcttagtgtcacttacctagatttacagcctcacttgaatgtgtcactactcacagtctctttaatcttcagttttatctttaatctcctcttttatcttggactgacatttagcgtagctaagtgaaaaggtcatagctgagattcctggttcgggtgttacgcacacgtacttaaatgaaagcatgtggcatgttcatcgtataacacaatatgaatacagggcatgcattttgcagcagtgagtctcttcagaaaacccttttctacagttagggttgagttacttcctatcaagccagtacgtgctaacaggctcaatattcctgaatgaaatatcagactagtgacaagctcctggtcttgagatgtcttctcgttaaggagatgggccttttggaggtaaaggataaaatgaatgagttctgtcatgattcactattctagaacttgcatgacctttactgtgttagctctttgaatgttcttgaaattttagactttctttgtaaacaaatgatatgtccttatcattgtataaaagctgttatgtgcaacagtgtggagattccttgtctgatttaataaaatacttaaacactgaaaaaaaaaaaaaaaaaaaaaaaaaaaaaaaaaaaaaaaaaaaaaaaaaaaaaaaaaaaaaaaaaaaaaaaaaaaaaaaaagtaccttctgaggcggaaagaaccagccggatctcgacttcgagcttatttatattccaaaaaaaaaaaataaaatttcaatttttaagctttcactaattccaaacccacccgctttttatagtaagtttttcacccataaataataaatacaataattaatttctcgtaaaagtagaaaatatattctaatttattgcacggtaaggaagtagatcataactcgagcatgggagatcccgtcgttttacaacgtcgtgactgggaaaaccctggcgttacccaacttaatcgccttgcagcacatccccctttcgccagctggcgtaatagcgaagaggcccgcaccgatcgcccttcccaacagttgcgcagcctgaatggcgaatggcgctttgcctggtttccggcaccagaagcggtgccggaaagctggctggagtgcgatcttcctgaggccgatactgtcgtcgtcccctcaaactggcagatgcacggttacgatgcgcccatctacaccaacgtgacctatcccattacggtcaatccgccgtttgttcccacggagaatccgacgggttgttactcgctcacatttaatgttgatgaaagctggctacaggaaggccagacgcgaattatttttgatggcgttaactcggcgtttcatctgtggtgcaacgggcgctgggtcggttacggccaggacagtcgtttgccgtctgaatttgacctgagcgcatttttacgcgccggagaaaaccgcctcgcggtgatggtgctgcgctggagtgacggcagttatctggaagatcaggatatgtggcggatgagcggcattttccgtgacgtctcgttgctgcataaaccgactacacaaatcagcgatttccatgttgccactcgctttaatgatgatttcagccgcgctgtactggaggctgaagttcagatgtgcggcgagttgcgtgactacctacgggtaacagtttctttatggcagggtgaaacgcaggtcgccagcggcaccgcgcctttcggcggtgaaattatcgatgagcgtggtggttatgccgatcgcgtcacactacgtctgaacgtcgaaaacccgaaactgtggagcgccgaaatcccgaatctctatcgtgcggtggttgaactgcacaccgccgacggcacgctgattgaagcagaagcctgcgatgtcggtttccgcgaggtgcggattgaaaatggtctgctgctgctgaacggcaagccgttgctgattcgaggcgttaaccgtcacgagcatcatcctctgcatggtcaggtcatggatgagcagacgatggtgcaggatatcctgctgatgaagcagaacaactttaacgccgtgcgctgttcgcattatccgaaccatccgctgtggtacacgctgtgcgaccgctacggcctgtatgtggtggatgaagccaatattgaaacccacggcatggtgccaatgaatcgtctgaccgatgatccgcgctggctaccggcgatgagcgaacgcgtaacgcgaatggtgcagcgcgatcgtaatcacccgagtgtgatcatctggtcgctggggaatgaatcaggccacggcgctaatcacgacgcgctgtatcgctggatcaaatctgtcgatccttcccgcccggtgcagtatgaaggcggcggagccgacaccacggccaccgatattatttgcccgatgtacgcgcgcgtggatgaagaccagcccttcccggctgtgccgaaatggtccatcaaaaaatggctttcgctacctggagagacgcgcccgctgatcctttgcgaatacgcccacgcgatgggtaacagtcttggcggtttcgctaaatactggcaggcgtttcgtcagtatccccgtttacagggcggcttcgtctgggactgggtggatcagtcgctgattaaatatgatgaaaacggcaacccgtggtcggcttacggcggtgattttggcgatacgccgaacgatcgccagttctgtatgaacggtctggtctttgccgaccgcacgccgcatccagcgctgacggaagcaaaacaccagcagcagtttttccagttccgtttatccgggcaaaccatcgaagtgaccagcgaatacctgttccgtcatagcgataacgagctcctgcactggatggtggcgctggatggtaagccgctggcaagcggtgaagtgcctctggatgtcgctccacaaggtaaacagttgattgaactgcctgaactaccgcagccggagagcgccgggcaactctggctcacagtacgcgtagtgcaaccgaacgcgaccgcatggtcagaagccgggcacatcagcgcctggcagcagtggcgtctggcggaaaacctcagtgtgacgctccccgccgcgtcccacgccatcccgcatctgaccaccagcgaaatggatttttgcatcgagctgggtaataagcgttggcaatttaaccgccagtcaggctttctttcacagatgtggattggcgataaaaaacaactgctgacgccgctgcgcgatcagttcacccgtgcaccgctggataacgacattggcgtaagtgaagcgacccgcattgaccctaacgcctgggtcgaacgctggaaggcggcgggccattaccaggccgaagcagcgttgttgcagtgcacggcagatacacttgctgatgcggtgctgattacgaccgctcacgcgtggcagcatcaggggaaaaccttatttatcagccggaaaacctaccggattgatggtagtggtcaaatggcgattaccgttgatgttgaagtggcgagcgatacaccgcatccggcgcggattggcctgaactgccagctggcgcaggtagcagagcgggtaaactggctcggattagggccgcaagaaaactatcccgaccgccttactgccgcctgttttgaccgctgggatctgccattgtcagacatgtataccccgtacgtcttcccgagcgaaaacggtctgcgctgcgggacgcgcgaattgaattatggcccacaccagtggcgcggcgacttccagttcaacatcagccgctacagtcaacagcaactgatggaaaccagccatcgccatctgctgcacgcggaagaaggcacatggctgaatatcgacggtttccatatggggattggtggcgacgactcctggagcccgtcagtatcggcggaattccagctgagcgccggtcgctaccattaccagttggtctggtgtcaaaaataataataaccgggcaggggggatccaattctgtgagcgtatggcaaacgaaggaaaaatagttatagtagccgcactcgatgggacatttcaacgtaaaccgtttaataatattttgaatcttattccattatctgaaatggtggtaaaactaactgctgtgtgtatgaaatgctttaaggaggcttccttttctaaacgattgggtgaggaaaccgagatagaaataataggaggtaatgatatgtatcaatcggtgtgtagaaagtgttacatcgactcataatattatattttttatctaaaaaactaaaaataaacattgattaaattttaatataatacttaaaaatggatgttgtgtcgttagataaaccgtttatgtattttgaggaaattgataatgagttagattacgaaccagaaagtgcaaatgaggtcgcaaaaaaactgccgtatcaaggacagttaaaactattactaggagaattattttttcttagtaagttacagcgacacggtatattagatggtgccaccgtagtgtatataggatctgctcccggtacacatatacgttatttgagagatcatttctataatttaggagtgatcatcaaatggatgctaattgacggccgccatcatgatcctattttaaatggattgcgtgatgtgactctagtgactcggttcgttgatgaggaatatctacgatccatcaaaaaacaactgcatccttctaagattattttaatttctgatgtgagatccaaacgaggaggaaatgaacctagtacggcggatttactaagtaattacgctctacaaaatgtcatgattagtattttaaaccccgtggcgtctagtcttaaatggagatgcccgtttccagatcaatggatcaaggacttttatatcccacacggtaataaaatgttacaaccttttgctccttcatattcagctgaaatgagattattaagtatttataccggtgagaacatgagactgactcgagttaccaaattagacgctgtaaattatgaaaaaaagatgtactaccttaataagatcgtccgtaacaaagtagttgttaactttgattatcctaatcaggaatatgactattttcacatgtactttatgctgaggaccgtgtactgcaataaaacatttcctactactaaagcaaaggtactatttctacaacaatctatatttcgtttcttaaatattccaacaacatcaactgaaaaagttagtcatgaaccaatacaacgtaaaatatctagcaaaaattctatgtctaaaaacagaaatagcaagagatccgtacgcggtaataaatagaaacgtactactgagatatactaccgatatagagtataatgatttagttactttaataaccgttagacataaaattgattctatgaaaactgtgtttcaggtatttaacgaatcatccataaattatactccggttgatgatgattatggagaaccaatcattataacatcgtatcttcaaaaaggtcataacaagtttcctgtaaattttctatacatagatgtggtaatatctgacttatttcctagctttgttagactagatactacagaaactaatatagttaatagtgtactacaaacaggcgatggtaaaaagactcttcgtcttcccaaaatgttagagacggaaatagttgtcaagattctctatcgccctaatataccattaaaaattgttagatttttccgcaataacatggtaactggagtagagatagccgatagatctgttatttcagtcgctgattaatcaattagtagagatgagataagaacattataataatcaataatatatcttatatcttatatcttatatcttatatcttgtttagaaaaatgctaatattaaaatagctaacgctagtaatccaatcggaagccatttgatatctataatagggtatctaatttcctgatttaaatagcggacagctatattctcggtagctactcgtttggaatcacaaacattatttacatctaatttactatctgtaatggaaacgtttcccaatgaaatggtacaatccgatacattgcattttgttatatttttttttaaagaggctggtaacaacgcatcgcttcgtttacatggctcgtaccaacaataatagggtaatcttgtatctattcctatccgtactatgcttttatcaggataaatacatttacatcgtatatcgtctttgttagcatcacagaatgcataaatttgttcgtccgtcatgataaaaatttaaagtgtaaatataactattatttttatagttgtaataaaaagggaaatttgattgtatactttcggttctttaaaagaaactgacttgataaaaatggctgtaatctctaaggttacgtatagtctatatgatcaaaaagagattaatgctacagatattatcattagtcatgttaaaaatgacgacgatatcggtaccgttaaagatggtagactaggtgctatggatggggcattatgtaagacttgtgggaaaacggaattggaatgtttcggtcactggggtaaagtaagtatttataaaactcatatagttaagcctgaatttatttcagaaattattcgtttactgaatcatatatgtattcactgcggattattgcgttcacgagaaccgtattccgacgatattaacctaaaagagttatcgggacacgctcttaggagattaaaggataaaatattatccaagaaaaagtcatgttggaacagtgaatgtatgcaaccgtatcaaaaaattactttttcaaagaaaaaggtttgtttcgtcaacaagttggatgatattaacgttcctaattctctcatctatcaaaagttaatttctattcatgaaaagttttggccattattagaaattcatcaatatccagctaacttattttatacagactactttcccatccctccgttgattattagaccggctattagtttttggatagatagtatacccaaagagaccaatgaattaacttacttattaggtatgatcgttaagaattgtaacttgaatgctgatgaacaggttatccagaaggcggtaatagaatacgatgatattaaaattatttctaataacactaccagtatcaatttatcatatattacatccggcaaaaataatatgattagaagttatatcgtcgcccgacgaaaagatcagaccgctagatctgtaattggtcccagtacatctatcaccgttaatgaggtaggaatgcccgcatatattagaaatacacttacagaaaagatatttgttaatgcctttacagtggataaagttaaacaactattagcgtcaaaccaagttaaattttactttaataaacgattaaaccaattaacaagaatacgccaaggaaagtttattaaaaataaaatacatttattgcctggtgattgggtagaagtagctgttcaagaatatacaagtattatttttggaagacagccgtctctacatagatacaacgtcatcgcttcatctatcagagctaccgaaggagatactatcaaaatatctcccggaattgccaactctcaaaatgctgatttcgacggggatgaggaatggatgatattagaacaaaatcctaaagctgtaattgaacaaagtattcttatgtatccgacgacgttactcaaacacgatattcatggagcccccgtttatggatctattcaagatgaaatcgtagcagcgtattcattgtttaggatacaagatctttgtttagatgaagtattgaacatcttggggaaatatggaagagagttcgatcctaaaggtaaatgtaaattcagcggtaaagatatctatacttacttgataggtgaaaagattaattatccgggtctcttaaaggatggtgaaattattgcaaacgacgtagatagtaattttgttgtggctatgaggcatctgtcattggctggactcttatccgatcataagtcgaacgtggaaggtatcaactttattatcaagtcatcttatgtttttaagagatatctatctatttacggttttggggtgacattcaaagatctgagaccaaattcgacgttcactaataaattggaggccatcaacgtagaaaaaatagaacttatcaaagaagcatacgccaaatatctcaacgatgtaagagacgggaaaatagttccattatctaaagctttagaggcggactatgtggaatccatgttatccaacttgacaaatcttaatatccgagagatagaagaacatatgagacaaacgctgatagatgatccagataataacctcctgaaaatggccaaagcgggttataaagtaaatcccacagaactaatgtatattctaggtacgtatggacaacaaaggattgatggtgaaccagcagagactcgagtattgggtagagttttaccttactatcttccagactctaaggatccagaaggaagaggttacattcttaattctttaacaaaaggattaacgggttctcaatattacttttcgatgctggttgccagatctcaatctactgatatcgtctgtgaaacatcacgtaccggaacactggctagaaaaatcattaaaaagatggaggatatggtggtcgacggatacggacaagtagttataggtaatacgctcatcaagtacgccgccaattataccaaaattctaggctcagtatgtaaacctgtagatcttatctatccagatgagtccatgacttggtatttggaaattagtgctctgtggaataaaataaaacagggattcgtttactctcagaaacagaaacttgcaaagaagacattggcgccgtttaatttcctagtattcgtcaaacccaccactgaggataatgctattaaggttaaggatctgtacgatatgattcataacgtcattgatgatgtgagagagaaatacttctttacggtatctaatatagattttatggagtatatattcttgacgcatcttaatccttctagaattagaattacaaaagaaacggctatcactatctttgaaaagttctatgaaaaactcaattatactctaggtggtggaactcctattggaattatttctgcacaggtattgtctgagaagtttacacaacaagccctgtccagttttcacactactgaaaaaagtggtgccgtcaaacaaaaacttggtttcaacgagtttaataacttgactaatttgagtaagaataagaccgaaattatcactctggtatccgatgatatctctaaacttcaatctgttaagattaatttcgaatttgtatgtttgggagaattaaatccaaacatcactcttcgaaaagaaacagataaatatgtagtagatataatagtcaatagattatacatcaagagagcagaaataaccgaattagtcgtcgaatatatgattgaacgatttatctcctttagcgtcattgtaaaggaatggggtatggagacattcattgaggacgaggataatattagatttactgtctacctaaatttcgttgaaccggaagaattgaatcttagtaagtttatgatggttcttccgggggcagccaacaagggaaagattagtaaattcaagattcctatctctgattatacgggatatgacgacttcaatcaaacaaaaaagctcaataagatgactgtagaactcatgaatctaaaagaattgggttctttcgatttggaaaacgtcaacgtgtatcctggagtatggaatacatacgatatcttcggtatcgaggccgctcgtgaatacttgtgcgaagccatgttaaacacctatggagaagggttcgattatctgtatcagccttgtgatcttctcgctagtttactatgtgctagttacgaaccagaatcagtgaataaattcaagttcggcgcagctagtactcttaagagagctacgttcggagacaataaagcattgttaaacgcggctcttcataaaaagtcagaacctattaacgataatagtagctgccacttttttagcaaggtccctaatataggaactggatattacaaatactttatcgacttgggtcttctcatgagaatggaaaggaaactatctgataagatatcttctcaaaagatcaaggaaatggaagaaacagaagacttttaattcttatcaataacatatttttctatgatctgtcttttaaacgatggattttccacaaatgcgcctctcaagtccctcatagaatgatacacgtataaaaaatatagcataggcaatgactccttatttttagacattagatatgccaaaatcatagccccgcttctatttactcccgcagcacaatgaaccaacacgggctcgtttcgttgatcacatttagataaaaaggcggttacgtcgtcaaaatatttactaatatcggtagttgtatcatctaccaacggtatatgaataatattaatattagagttaggtaatgtatatttatccatcgtcaaatttaaaacatatttgaacttaacttcagatgatggtgcatccatagcatttttataatttcccaaatacacattattggttacccttgtcattatagtgggagatttggctttgtgcatatctccagttgaacgtagtagtaagtatttatacaaacttttcttatccatttataacgtacaaatggataaaactactttatcggtaaacgcgtgtaatttagaatacgttagagaaaaggctatagtaggcgtacaagcagccaaaacatcaacacttatattctttgttattatattggcaattagtgcgctattactctggtttcagacgtctgataatccagtctttaatgaattaacgagatatatgcgaattaaaaatacggttaacgattggaaatcattaacggatagcaaaacaaaattagaaagtgatagaggtagacttctagccgctggtaaggatgatatatttgaattcaaatgtgtggatttcggcgcctattttatagctatgcgattggataagaaaacatatctgccgcaagctattaggcgaggtactggagacgcgtggatggttaaaaaggcggcaaaggtcgatccatctgctcaacaattttgtcagtatttgataaaacacaagtctaataatgttattacttgtggtaatgagatgttaaatgaattaggttatagcggttattttatgtcaccgcattggtgttccgattttagtaatatggaatagtgttagataaatgcggtaacgaatgttcctgtaaggaaccataacagcttagatttaacgttaaagatgagcataaacataataaacaaaattacaatcaaacttataacattaatatcaaacaatccaaaaaatgaaatcagtggagtagtaaacgcgtacataactcctggataacgtttagcagctgccgttcctattctagaccaaaaattcggtttcatgttttcgaaacggtattctgcaacaagtcgaggatcgtgttctacatatttggcggcattatccagtatctgcctattgatcttcatttcgttttcgattctggctatttcaaaataaaatcccgatgatagacctccagactttataatttcatctacgatgttcagcgccgtagtaactctaataatataggctgataagctaacatcataccctcctgtatatgtgaatatggcatgatttttgtccattacaagctcggttttaactttattgcctgtaataatttctctcatctgtaggatatctatttttttgtcatgcattgccttcaagacgggacgaagaaacgtaatatcctcaataacgttatcgttttctacaataactacatattctacctttttattttctaactcggtaaaaaaattagaatcccatagggctaaatgtctagcgatatttcttttcgtttcctctgtacacatagtgttacaaaaccctgaaaagaagtgagtatacttgtcatcatttctaatgtttcctccagtccactgtataaacgcataatccttgtaatgatctggatcatccttgactaccacaacatttcttttttctggcataacttcgttgtcctttacatcatcgaacttctgatcattaatatgctcatgaacattaggaaatgtttctgatggaggtctatcaataactggcacaacaataacaggagttttcaccgccgccatttagttattgaaattaatcatatacaactctttaatacgagttatattttcgtctatccattgtttcacattgacatatttcgacaaaaagatataaaatgcgtattccaatgcttctctgtttaatgaattactaaaatatacaaacacgtcactgtctggcaataaatgatatcttagaatattgtaacaatttattttgtattgcacatgttcgtgatctatgagttcttcttcgaatggcataggatctccgaatctgaaaacgtataaataggagttagaataataatatttgagagtattggtaatatataaactctttagcggtataattagtttttttctctcaatttctatttttagatgtgatggaaaaatgactaattttgtagcattagtatcatgaactctaatcaaaatcttaatatcttcgtcacacgttagctctttgaagtttttaagagatgcatcagttggttctacagatggagtaggtgcaacaattttttgttctacacatgtatgtactggagccattgttttaactataatggtgcttgtatcgaaaaactttaatgcagatagcggaagctcttcgccgcgactttctacgtcgtaattgggttctaacgccgatctctgaatggatactagttttctaagttctaatgtgattctctgaaaatgtaaatccaattcctccggcattatagatgtgtatacatcggtaaataaaactatagtatccaacgatcccttctcgcaaattctagtcttaaccaaaaaatcgtatataaccacggagatggcgtatttaagagtggattcttctaccgttttgttcttggatgtcatataggaaactataaagtccgcactactgttaagaatgattactaacgcaactatatagtttaaattaagcattttggaaacataaaataactctgtagacgatacttgactttcgaataagtttgcagacaaacgaagaaagaacagacctctcttaatttcagaagaaaactttttttcgtattcctgacgtctagagtttatatcaataagaaagttaagaattagtcggttaatgttgtatttcattacccaagtttgagatttcataatattatcaaaagacatgataatattaaagataaagcgctgactatgaacgaaatagctatatggttcgctcaagaatatagtcttgttaaacgtggaaacgataactgtatttttaatcacgtcagcggcatctaaattaaatataggtatatttattccacacactctacaatatgccacaccatcttcataataaataaattcgttagcaaaattattaattttagtgaaatagttagcgtcaactttcatagcttccttcaatctaatttgatgctcacacggtgcgaattccactctaacatcccttttccatgcctcaggttcatcgatctctataatatctagttttttgcgtttcacaaacacaggctcgtctctcgcgatgagatctgtatagtaactatgtaaatgataactagatagaaagatgtagctatatagatgacgatcctttaagagaggtataataactttaccccaatcagatagactgttgttatggtcttcggaaaaagaatttttataaatttttccagtattttccaaatatacgtacttaacatctaaaaaatccttaatgataataggaatggataatccgtctattttataaagaaatacatatcgcacattatacttttttttggaaatgggaataccgatgtgtctacataaatatgcaaagtctaaatattttttagagaatcttagttggtccaaattcttttccaagtacggtaatagatttttcatattgaacggtatcttcttaatctctggttctagttccgcattaaatgatgaaactaagtcactatttttataactaacgattacatcacctctaacatcatcatttaccagaatactgatcttcttttgtcgtaaatacatgtctaatgtgttaaaaaaaagatcatacaagttatacgtcatttcatctgtggtattcttgtcattgaaggataaactcgtactaatctcttctttaacagcctgttcaaatttatatcctatatacgaaaaaatagcaaccagtgtttgatcatccgcgtcaatattctgttctatcgtagtgtataacaatcgtatatcttcttctgtgatagtcgatacgttataaaggttgataacgaaaatatttttatttcgtgaaataaagtcatcgtaggattttggacttatattcgcgtctagtagatatgcttttatttttggaatgatctcaattagaatagtctctttagagtccatttaaagttacaaacaactaggaaattggtttatgatgtataatttttttagtttttatagattctttattctatacttaaaaaatgaaaataaatacaaaggttcttgagggttgtgttaaattgaaagcgagaaataatcataaattatttcattatcgcgatatccgttaagtttgtatcgtaatggcgtggtcaattacgaataaagcggatactagtagcttcacaaagatggctgaaatcagagctcatctaaaaaatagcgctgaaaataaagataaaaacgaggatattttcccggaagatgtaataattccatctactaagcccaaaaccaaacgagccactactcctcgtaaaccagcggctactaaaagatcaaccaaaaaggaggaagtggaagaagaagtagttatagaggaatatcatcaaacaactgaaaaaaattctccatctcctggagtcagcgacattgtagaaagcgtggccgctgtagagctcgatgatagcgacggggatgatgaacctatggtacaagttgaagctggtaaagtaaatcatagtgctagaagcgatctctctgacctaaaggtggctaccgacaatatcgttaaagatcttaagaaaattattactagaatctctgcagtatcgacggttctagaggatgttcaagcagctggtatctctagacaatttacttctatgactaaagctattacaacactatctgatctagtcaccgagggaaaatctaaagttgttcgtaaaaaagttaaaacttgtaagaagtaaatgcgtgcacttttttataaagatggtaaactctttaccgataataattttttaaatcctgtatcagacgataatccagcgtatgaggttttgcaacatgttaaaattcctactcatttaacagatgtagtagtatatgaacaaacgtgggaggaggcgttaactagattaatttttgtgggaagtgattcaaaaggacgtagacaatacttttacggaaaaatgcatgtacagaatcgcaacgctaaaagagatcgtatttttgttagagtatataacgttatgaaacgaattaattgttttataaacaaaaatataaagaaatcgtccacagattccaattatcagttggcggtttttatgttaatggaaactatgttttttattagatttggtaaaatgaaatatcttaaggagaatgaaacagtagggttattaacactaaaaaataaacacatagaaataagtcccgatgaaatagttatcaagtttgtaggaaaggacaaagtttcacatgaatttgttgttcataagtctaatagactatataaaccgctattgaaactgacggatgattctagtcccgaagaatttctgttcaacaaactaagtgaacgaaaggtatacgaatgtatcaaacagtttggtattagaatcaaggatctccgaacgtatggagtcaattatacgtttttatataatttttggacaaatgtaaagtccatatctcctcttccgtcaccaaaaaagttaatagcattaactatcaaacaaactgctgaagtggtaggtcatactccatcaatttcaaaaagagcttatatggcaacgactattttagaaatggtaaaggataaaaattttttagatgtagtatctaaaactacgttcgatgaattcctatctatagtcgtagatcacgttaaatcatctacggatggatgatatagatctttacacaaataattacaagaccgataaatggaaatggataagcgtatgaaatctctcgcaatgacagctttcttcggagagctaagcacattagatattatggcattgataatgtctatatttaaacgccatccaaacaataccattttttcagtggataaggatggtcagtttatgattgatttcgaatacgataattataaggcttctcaatatttggatctgaccctcactccgatatctggagatgaatgcaagactcacgcatcgagtatagccgaacaattggcgtgtgcggatattattaaagaggatattagcgaatatatcaaaactactccccgtcttaaacgatttataaaaaaataccgcaatagatcagatactcgtatcagtcgagatacagaaaagcttaaaatagctctagctaaaggcatagattacgaatatataaaagacgcttgttaataagtaaatgaaaaaaaactagtcgtttataataaaacacgatatggatgccaacgtagtatcattttctactattgcgacgtatatagacgctttagcgaagaatgcttcggaattagaacagaggtctaccgcatacgaaataaataatgaattggaactagtatttattaagccgccattgattactttgacaaatgtagtgaatatctctacgattcaggaatcgtttattcgatttaccgttactaataaggaaggtgttaaaattagaactaagattccattatctaaggtacatggtctagatgtaaaaaatgtacagttagtagatgctatagataacatagtttgggaaaagaaatcattagtgacggaaaatcgtcttcacaaagaatgcttgttgagactatcgacagaggaacgtcatatatttttggattacaagaaatatggatcctctatccgactagaattagtcaatcttattcaagcaaaaacaaaaaactttacgatagactttaagctaaaatattttctaggatccggtgcccagtctaaaagttctttgttgcacgctattaatcatccaaagtcaaggcctaatacatctctggaaatagaattcacacctagagacaatgaaacagttccatatgatgaactaataaaggaattgacgactctctcgcgtcatatatttatggcttctccagagaatgtaattctttctccgcctattaacgcgcctataaaaacctttatgttgcctaaacaagatatagtaggtttggatctggaaaatctatatgccgtaactaagactgacggcattcctataactatcagagttacatcaaacgggttgtattgttattttacacatcttggttatattattagatatcctgttaagagaataatagattccgaagtagtagtctttggtgaggcagttaaggataagaactggaccgtatatctcattaagctaatagagcctgtgaatgcaatcaatgatagactagaagaaagtaagtatgttgaatctaaactagtggatatttgtgatcggatagtattcaagtcaaagaaatacgaaggtccgtttactacaactagtgaagtcgtcgatatgttatctacatatttaccaaagcaaccagaaggtgttattctgttctattcaaagggacctaaatctaacattgattttaaaattaaaaaggaaaatactatagaccaaactgcaaatgtagtatttaggtacatgtccagtgaaccaattatctttggagaatcgtctatctttgtagagtataagaaatttagcaacgataaaggctttcctaaagaatatggttctggtaagattgtgttatataacggcgttaattatctaaataatatctattgtttggaatatattaatacacataatgaagtgggtattaagtccgtggttgtacctattaagtttatagcagaattcttagttaatggagaaatacttaaacctagaattgataaaaccatgaaatatattaactcagaagattattatggaaatcaacataatatcatagtcgaacatttaagagatcaaagcatcaaaataggagatatctttaacgaggataaactatcggatgtgggacatcaatacgccaataatgataaatttagattaaatccagaagttagttattttacgaataaacgaactagaggaccgttgggaattttatcaaactacgtcaagactcttcttatttctatgtattgttccaaaacatttttagacgattccaacaaacgaaaggtattggcgattgattttggaaacggtgctgacctggaaaaatacttttatggagagattgcgttattggtagcgacggatccggatgctgatgctatagctagaggaaatgaaagatacaacaaattaaactctggaattaaaaccaagtactacaaatttgactacattcaggaaactattcgatccgatacatttgtctctagtgtcagagaagtattctattttggaaagtttaatatcatcgactggcagtttgctatccattattcttttcatccgagacattatgctaccgtcatgaataacttatccgaactaactgcttctggaggcaaggtattaatcactaccatggacggagacaaattatcaaaattaacagataaaaagacttttataattcataagaatttacctagtagcgaaaactatatgtctgtagaaaaaatagctgatgatagaatagtggtatataatccatcaacaatgtctactccaatgactgaatacattatcaaaaagaacgatatagtcagagtgtttaacgaatacggatttgttcttgtagataacgttgatttcgctacaattatagaacgaagtaaaaagtttattaatggcgcatctacaatggaagatagaccgtctacaaaaaactttttcgaactaaatagaggagccattaaatgtgaaggtttagatgtcgaagacttacttagttactatgttgtttatgtcttttctaagcggtaaataataatatggtatgggttctgatctcccagttctaaatgcattaaataattccaatagagcgatttttgttcctataggaccttccaactgtggatactctgtattgttaatagatatattaatacttttgtcgggtaacagaggttctacgtcttctaaaaataaaagttttataacatctggcctgttcataaataaaaacttggcgattctatatatactcttattatcaaatctagccattgtcttatagatgtgagctactgtaggtgtaccatttgattttctttctaatactatatatttctctcgaagaagttcttgcacatcatctgggaataaaatactactgttgagtaaatcagttattttttttatatcgatattgatggacatttttatagttaaggataataagtatcccaaagtcgataacgacgataacgaagtatttatacttttaggaaatcacaatgactttatcagattaaaattaacaaaattaaaggagcatgtatttttttctgaatatattgtgactccagatacatatggatctttatgcgtcgaattaaatgggtctagttttcagcacggcggtagatatatagaggtggaggaatttatagatgctggaagacaagttagatggtgttctacatccaatcatatatctaaagatatacccgaagatatgcacactgataaatttgtcatttatgatatttatacgtttgattcgttcaagaataaacgattggtattcgtacaggtacctccgtcgttaggagatgatagtcatttgactaatccgttattgtcaccgtattatcgtaattcagtagccagacaaatggtcaatgatatgatttttaatcaagattcatttttaaaatatttattagaacatctgattagaagccactatagagtttctaaacatataacaatagttagatacaaggataccgaagaattaaatctaacgagaatatgttataatagagataagtttaaggcgtttgtattcgcttggtttaacggcgtttcggaaaatgaaaaggtactagatacgtataaaaaggtatctaatttgatataatgaattcagtgactgtatcacacgcgccatatactattacttatcacgatgattgggaaccagtaatgagtcaattggtagagttttataacgaagtagccagttggctgctacgagacgagacgtcgcctattcctgataagttctttatacagttgaaacaaccgcttagaaataaacgagtatgtgtgtgtggtatagatccgtatccgaaagatggaactggtgtaccgttcgaatcaccaaattttacaaaaaaatcaattaaggagatagcttcatctatatctagattaaccggagtaattgattataaaggttataaccttaatataatagacggggttataccctggaattattacttaagttgtaaattaggagaaacaaaaagtcacgcgatttactgggataagatttccaagttactgctgcagcatataactaaacacgttagtgttctttattgtttgggtaaaacagatttctcgaatatacgggccaagttagaatccccggtaactaccatagtcggatatcatccagcggctagagaccgccaattcgagaaagatagatcatttgaaattatcaacgttttactggaattagacaacaaggcacctataaattgggctcaagggtttatttattaatgctttagtgaaattttaacttgtgttctaaatggatgcggctattagaggtaatgatgttatctttgttcttaagactataggtgtcccgtcagcgtgcagacaaaatgaagatccaagatttgtagaagcatttaaatgcgacgagttagaaagatatattgagaataatccagaatgtacactattcgaaagtcttagggatgaggaagcatactctatagtcagaattttcatggatgtagatttagacgcgtgtctagacgaaatagattatttaacggccattcaagattttattatcgaggtgtcaaactgtgtagctagattcgcgtttacagaatgcggcgccattcatgaaaatgtaataaaatccatgagatctaatttttcattgactaagtctacaaatagagataaaacaagttttcatattatctttttagatacgtataccactatggatacattgatagctatgaaacgaacactattagaattaagtagatcatctgaaaatccactaaccagatcgatagacactgccgtatataggagaaaaacaactcttcgggttgtaggtactaggaaaaatccaaattgcgacactattcatgtaatgcaaccaccgcatgataatatagaagattacctattcacttacgtggatatgaacaacaatagttattacttttctctacaacaacgattggaggatttagttcctgataagttatgggaaccagggtttatttcattcgaagacgctataaaaagagtttcaaaaatattcattaattctataataaactttaatgatctcgatgaaaataattttacaacggtaccactggtcatagattacgtaacaccttgtgcattatgtaaaaaacgatcgcataaacatccgcatcaactatcgttggaaaatggtgctattagaatttacaaaactggtaatccacatagttgtaaagttaaaattgttccgttggatggtaataaactgtttaatattgcacaaagaattttagacactaactctgttttattaaccgaacgaggagaccatatagtttggattaataattcatggaaatttaacagcgaagaacccttgataacaaaactaattttgtcaataagacatcaactacctaaggaatattcaagcgaattactctgtccaagaaaacgaaagactgtagaagctaacatacgagacatgttagtagattcagtggagaccgatacctatccggataaacttccgtttaaaaatggtgtattggacctggtagacggaatgttttactctggagatgatgctaaaaaatatacgtgtactgtatcaaccggatttaaatttgacgatacaaagttcgtcgaagacagtccagaaatggaagagttaatgaatatcattaacgatatccaaccattaacggatgaaaataagaaaaatagagagctatatgaaaaaacattatctagttgtttatgcggtgctaccaaaggatgtttaacattcttttttggagaaactgcaactggaaagtcgacaaccaaacgtttgttaaagtctgctatcggtgacctgtttgttgagacgggtcaaacaattttaacagatgtattggataaaggacctaatccatttatcgctaacatgcatttgaaaagatctgtattctgtagcgaactacctgattttgcctgtagtggatcaaagaaaattagatctgacaatattaaaaagttgacagaaccttgtgtcattggaagaccgtgtttctccaataaaattaataatagaaaccatgcgacaatcattatcgatactaattacaaacctgtttttgataggatagataacgcattaatgagaagaattgccgtcgtgcgattcagaacacacttttctcaaccttctggtagagaggctgctgaaaataatgacgcgtacgataaagtcaaactattagacgaggggttagatggtaaaatacaaaataatatatatagatttgcatttctatacttgttggtgaaatggtacaaaaaatatcatgttcctattatgaaactatatcctacacccgaagagattcctgactttgcattctatctcaaaataggtactctgttggtatctagctctgtaaagcatattccattaatgacggacctctccaaaaagggatatatattgtacgataatgtggtcactcttccgttgactactttccaacagaaaatatccaagtattttaattctagactatttggacacgatatagagagcttcatcaatagacataagaaatttgccaatgttagtgatgaatatctgcaatatatattcatagaggatatttcatctccgtaaatatatgctcatatatttatagaagatatcacatatctaaatgaataccggaatcatagatttatttgataatcatgttgatagtataccaactatattacctcatcagttagctactctagattatctagttagaactatcatagatgagaacagaagcgtgttattgttccatattatgggatcaggtaaaacaataatcgctttgttgttcgccttggtagcttccagatttaaaaaggtttacattctagtgccgaacatcaacatcttaaaaattttcaattataatatgggtgtagctatgaacttgtttaatgacgaattcatagctgagaatatctttattcattccacaacaagtttttattctcttaattataacgataacgtcattaattataacggattatctcgctacaataactctatttttatcgttgatgaggcacataatatctttgggaataatactggagaacttatgaccgtgataaaaaataaaaacaagattccttttttactattgtctggatctcccattactaacacacctaatactctgggtcatattatagatttaatgtccgaagagacgatagattttggtgaaattattagtcgtggtaagaaagtaattcagacacttcttaacgaacgcggtgtgaatgtacttaaggatttgcttaaaggaagaatatcatattacgaaatgcctgataaagatctaccaacgataagatatcacggacgtaagtttctagatactagagtagtatattgtcacatgtctaaacttcaagagagagattatatgattactagacgacagctatgttatcatgaaatgtttgataaaaatatgtataacgtgtcaatggcagtattgggacaacttaatctgatgaataatttagatactttatttcaggaacaggataaggaattgtacccaaatctgaaaataaataatggcgtgttatacggagaagaattggtaacgttaaacattagttccaaatttaaatactttattaatcggatacagacactcaacggaaaacattttatatacttttctaattctacatatggcggattggtaattaaatatatcatgctcagtaatggatattctgaatataatggttctcagggaactaatccacatatgataaacggcaaaccaaaaacatttgctatcgttactagtaaaatgaaatcgtctttagaggatctattagatgtgtataattctcctgaaaacgatgatggtagtcaattgatgtttttgttttcatcaaacattatgtccgaatcctatactctaaaagaggtaaggcatatttggtttatgactatcccagatactttttctcaatacaaccaaattcttggacgatctattagaaaattctcttacgccgatatttctgaaccagttaatgtatatcttttagccgccgtatattccgatttcaatgacgaagtgacgtcattaaacgattacacacaggatgaattaattaatgttttaccatttgacatcaaaaagctgttgtatctaaaatttaagacgaaagaaacgaatagaatatactctattcttcaagagatgtctgaaacgtattctcttccaccacatccatcaattgtaaaagttttattgggagaattggtcagacaatttttttataataattctcgtattaagtataacgataccaagttacttaaaatggttacatcagttataaaaaataaagaagacgctaggaattacatagatgatattgtaaacggtcacttctttgtatcgaataaagtatttgataaatctcttttatacaaatacgaaaacgatattattacagtaccgtttagactttcctacgaaccatttgtttggggagttaactttcgtaaagaatataacgtggtatcttctccataaaactgatgagatatataaagaaataaatgtcgagctttgttaccaatggatacctttccgttacattggaaccacacgagctgacgttagacataaaaactaatattaggaatgccgtatataagacgtatctccatagagaaattagtggtaaaatggccaagaaaatagaaattcgtgaagacgtggaattacctctcggcgaaatagttaataattctgtagttataaacgttccgtgtgtaataacctacgcgtattatcacgttggggatatagtcagaggaacattaaacatcgaagatgaatcaaatgtaactattcaatgtggagatttaatctgtaaactaagtagagattcgggtactgtatcatttagcgattcaaagtactgcttttttcgaaatggtaatgcgtatgacaatggcagcgaagtcactgccgttctaatggaggctcaacaaggtatcgaatctagttttgtttttctcgcgaatatcgtcgactcataaaaaagagaatagcggtaagtataaacacgaatactatggcaataattgcgaatgttttattctcttcgatatatttttgataatatgaaaaacatgtctctctcaaatcggacaaccatctcataaaatagttctcgcgcgctggagaggtagttgccgctcgtataatctctccagaataatatacttgcgtgtcgtcgttcaatttatacggatttctatagttctctgttatataatgcggtttgccctcatgattagacgacgacaatagtgttctaaatttagatagttgatcagaatgaatgtttattggcgttggaaaaattatccatacagcgtctgcagagtggttgatagttgttcctagatatgtaaaataatccaacttactaggcagcaaattgtctagataaaatactgaatcaaacggtgcagacgtattggcggatctaatggaatccaattgattaactatcttttgaaaatatacatttttatgatccaatacttgtaagaatatagaaataatgataagtccatcatcgtgtttttttgcctcttcataagaactatattttttcttattccaatgaacaagattaatctctccagagtatttgtacacatctatcaagtgattggatccataatcgtcttcctttccccaatatatatgtagtgatgataacacatattcattggggagaaaccctccacttatatatcctcctttaaaattaatccttactagttttccagtgttctggatagtggttggtttcgactcattataatgtatgtctaacggcttcaatcgcgcgttagaaattgcttttttagtttctatattaataggagatagttgttgcggcatagtaaaaatgaaatgataactgtttaaaaatagctcttagtatgggaattacaatggatgaggaagtgatatttgaaactcctagagaattaatatctattaaacgaataaaagatattccaagatcaaaagacacgcatgtgtttgctgcgtgtataacaagtgacggatatccgttaataggagctagaagaacttcattcgcgttccaggcgatattatctcaacaaaattcagattctatctttagagtatccactaaactattacggtttatgtactacaatgaactaagagaaatctttagacggttgagaaaaggttctatcaacaatatcgatcctcactttgaagagttaatattattgggtggtaaactagataaaaaggaatctattaaagattgtttaagaagagaattaaaagaggaaagtgatgaacgtataacagtaaaagaatttggaaatgtaattctaaaacttacaacacgggataaattatttaataaagtatatataagttattgcatggcgtgttttattaatcaatcgttggaggatttatcgcatactagtatttacaatgtagaaattagaaagattaaatcattaaatgattgtattaacgacgataaatacgaatatctgtcttatatttataatatgctagttaatagtaaatgaacttttacagatctagtataattagtcagattattaagtataatagacgactagctaagtctattatttgcgaggatgactctcaaattattacactcacggcattcgttaaccaatgcctatggtgtcataaacgagtatccgtgtccgctattttattaactactgataacaaaatattagtatgtaacagacgagatagttttctctattctgaaataattagaactagaaacatgtttagaaagaaacgattatttctgaattattccaattatttgaacaaacaggaaagaagtatactatcgtcatttttttctctagatccagctactactgataatgatagaatagacgctatttatccgggtggcatacccaaaaggggtgagaatgttccagagtgtttatccagggaaattaaagaagaagttaatatagacaattcttttgtattcatagacactcggttttttattcatggcatcatagaagataccattattaataaattttttgaggtaatcttctttgtcggaagaatatctctaacgagtgatcaaatcattgatacatttaaaagtaatcatgaaatcaaggatctaatatttttagatccgaattcaggtaatggactccaatacgaaattgcaaaatatgctctagatactgcaaaacttaaatgttacggccatagaggatgttattatgaatcattaaaaaaattaactgaggatgattgattaaaaaatataaattaatttaccatcgtgtatttttataacgggattgtccggcatatcatgtagatagttaccgtctacatcgtatactcgaccatctacgcctttaaatcctctatttattgacattaatctattagaattggaataccaaatattagtaccctcaattagtttattggtaatattttttttagacgatagatcgatggctcttgaaaccaaggttttccaaccggactcattgtcgatcggtgagaagtctttttcattagcatgaatccattctaatgatgtatgtttaaacactctaaacaattggacaaattcttttgatttgctttgaatgatttcaaataggtcttcgtctacagtaggcataccattagataatctagccattataaagtgcacgtttacatatctacgttctggaggagtaagaacgtgactattgagacgaatggctcttcctactatctgacgaagagacgcctcgttccatgtcatatctaaaatgaagatatcattaattgagaaaaaactaataccctcgcctccactagaagagaatacgcatgttttaatgcattctccgttagtgtttgattcttggttaaactcagccaccgccttgattctagtatcttttgttctagatgagaactctatattagagataccaaagactttgaaatatagtaataagatttctattcctgactgattaacaaatggttcaaagactagacatttaccatgggatgctaatattcccaaacatacatctataaatttgacgcttttctcttttaattcagtaaatagagagatatcagccgcactagcatcccctttcaatagttctccctttttaaaggtatctaatgcggatttagaaaactctctatctcttaatgaatttttaaaatcattatatagtgttgctatctcttgcgcgtattcgcccggatcacgattttgtctttcaggaaagctatcgaacgtaaacgtagtagccatacgtctcagaattctaaatgatgatatacctgtttttatttcagcgagtttagccttttgataaatttcttcttgctttttcgacatattaacgtatcgcattaatactgttttcttagcgaatgatgcagacccttctacgtcatcaaaaatagaaaactcgttattaactatatacgaacatagtcctcctagtttggagactaattctttttcatcgactagacgtttattctcaaatagcgattggtgttgtaaggatcctggtcgtagtaagttaaccaacatggtgaattcttgcacactattgacgataggtgtagccgataaacaaatcatcttatggttttttaacgcaatggtcttagataaaaaattatatactgaacgagtaggacggatcttaccatcttctttgattaatgatttagaaatgaagttatgacattcatcaataatgacgcatattctactcttggaattaatagttttgatattagtaaaaaatttatttctaaaattttgatcatcgtaattaataaaaatacaatccttcgttatctctggagcgtatctgagtatagtgttcatccaaggatcttctatcaaagcctttttcaccaataagataatagcccaattcgtataaatatccttaagatgtttgagaatatatacagtagtcattgttttaccgacacccgtttcatggaacaataaaagagaatgcatactgtctaatcctaagaaaactcttgctacaaaatgttgataatccttgaggcgtactacgtccgaccccatcatttcaacgggcatattagtagttctgcgtaaggcataatcgatataggccgcgtgtgatttactcatttatgagtgataagtaataactatgttttaaaaatcacagcagtagtttaactagtcttctctgatgtttgttttcgatactttttgaatcagaagtcatactagaataaagcaacgagtgaacgtaatagagagcttcgtatactctattcgaaaactctaagaacttattaatgaattccgtatccactggattgtttaaaatactaaattgaacactgttcacatccttccaagaagaagacttagtgacggacttaacatgagacataaataaatccaaattttttttacaaacatcactagccaccataatggcgctatctttcaaccagctatcgcttacgcattttagcagtctaacatttttaaagagactacaatatattctcatagtatcgattacacctctaccgaataaagttggaagtttaataatacaatatttttcgtttacaaaatcaaataatggtcgaaacacgtcgaaggttaacatcttataatcgctaatgtatagattgttttcagtgagatgattattagatttaatagcatctcgttcacgtttgaacagtttattgcgtgcgctgaggtcggcaactacggcgtccgctttagtactcctcccataatactttacgctattaatctttaaaatttcatagactttatctagatcgctttctggtaacatgatatcatgtgtaaaaagttttaacatgtcggtcggcattctatttagatcattaactctagaaatctgaagaaagtaattagctccgtattccagactaggtaatgggcttttacctagagacagattaagttctggcaatgtttcataaaatggaagaaggacatgcgttccctcccggatattttttacaatttcatccatttacaactctatagtttgttttcattattattagttattatctcccataatcttggtaatacttaccccttgatcgtaagataccttatacaggtcattacatacaactaccaattgtttttgtacataatagattggatggttgacatccatggtggaataaactactcgaacagatagtttatctttccccctagatacattagccgtaatagttgtcggcctaaagaatatctttggtgtaaagttaaaagttagggttcttgttccattattgctttttgtcagtagttcattataaattctcgagatgggtccgttctctgaatatagaacatcatttccaaatctaacttctagtctagaaataatatcggtcttattcttaaaatctattcccttgatgaagggatcgttaatgaacaaatccttggcctttgattcggctgatctattatctccgttatagacgttacgttgactagtccaaagacttacaggaatagatgtatcgatgatgttgatactatgtgatatgtgagcaaagattgttctcttagtggcatcactatatgttccagtaatggcggaaaactttttagaaatgttatatataaaagaattttttcgtgttccaaacattagcagattagtatgaagataaacactcatattatcaggaacattatcaatttttacatacacatcagcatcttgaatagaaacgataccatcttctggaacctctacgatctcggcagactccggataaccagtcggtgggccatcgctaacaataactagatcatccaacaatctactcacatatgcatctatataatctttttcatcttgtgagtaccctggatacgaaataaatttattatccgtatttccataataaggtttagtataaacagagagagatgttgccgcatgaacttcagttacagtcgccgttggttggtttatttgacctattactctcctaggtttctctataaacgatggtttaatttgtacattcttaaccatatatccaataaagctcaattcaggaacataaacaaattctttgttgaacgtttcaaagtcgaacgaagagtcacgaataacgatatcggatactggattgaaggttaccgttacggtaatttttgaatcggatagtttaagactgctgaatgtatcttccacatcaaacggagttttaatataaacgtatactgtagatggttctttaatagtgtcattaggagttaggccaatagaaatatcattaagttcactagaatatccagagtgtttcaaagcaattgtattattgatacaattattatataattcttcgccctcaatttcccaaataacaccgttacacgaagagatagatacgtgattaatacatttatatccaacatatggtacgtaactgaatcttcccatacctttaacttctggaagttccaaactcagaaccaaatgattaagcgcagtaatatactgatccctaatttcgaagctagcgatagcctgattgtctggaccatcgtttgtcataactccggatagagaaatatattgcggcatatacaaagttggaatttgactatcgactgcgaagacattagaccgtttaatagagtcatccccaccgatcaaagaattaatgatagtattattcattttctatttaaaatggaaaaagcttacaataaactccgtagagaaatatctataatttgtgagttttccttaaagtaacagcttccgtaaacgccgtctttatctcttagtaggtttattgtatttatgaccttttccttatcttcatagaatactaaaggcaacaaagaaatttttggttcttctctaagagctacgtgagacttaaccatagaagccaacgaatccctacatattttagaacagaaataccctacttcaccacccttgtatgtctcaatactaataggtctaaaaaccaaatcttgattacaaaaccaacacttatcaattacactatttgtcttaatagacacatctgccatagatttataatactttggtagtatacaagcgagtgcttcttctttagcgggcttaaagactgctttaggtgctgaaataaccacatctggaaggcttactcgcttagccatttaattacggaactatttttttatacttctaatgagcaagtagaaaacctctcatctacaaaaacgtactcgtgtccataatcctctaccatagttacacgttttttagatctcatatgtgctaaaaagttttcccatactaattggttactattatttttcgtataatttttaacagtttgaggttttagatttttagttacagaagtgatatcgaatattttatccaaaaagaatgaataattaattgtcttagaaggagtgttttcttggcaaaagaataccaagtgcttaaatatttctactacttcattaatcttttctgtactcagattcagtttctcatcttttacttgattgattatttcaaagactaacttataatcctttttatttattctctcgttagccttaagaaaactagatacaaaatttgcatctacatcatccgtggatatttgatttttttccatgatatccaagagttccgagataatttctccagaacattgatgagacaataatctccgcaatacatttctcaaatgaataagtttattagacacgtggaagtttgactttttttgtacctttgtacatttttgaaataccgactcgcaaaaaatacaatattcatatccttgttcagatactataccgttatgtctacaaccgctacataatcgtagattcatgttaacactctacgtatctcgtcgtccaatattttatataaaaacattttatttctagacgttgccagaaaatcctgtaatatttttagttttttgggctgtgaataaagtatcgccctaatattgttaccgtcttccgccaatatagtagttaaattatccgcacatgcagaagaacaccgcttaggcggattcagtacaatgttatatttttcgtaccaactcatttaaatatcataatctaaaatagttctgtaatatgtctagcgctaatatattgatcataatcctgtgcataaattaagatacaacaatgtctcgaaatcatcgacatggcttcttccatagttagaagatcgtcgtcaaagttagcaacgtgattcatcaacatttgctgttttgaggcagcaaatactgaaccgtcgccattcaaccattcataaaaaccatcgtctgaatccattgataatttcttgtactggtttttgagagctcgcatcaatctagcatttctagctcccggattgaaaacagaaagaggatcgtacatccagggtccattttctgtaaatagaatcgtataatgtcccttcaagaagatatcagacgatccacaatcaaagaattggtctccgagtttgtaacaaactgcggactttaacctatacatgataccgtttagcataatttctggtgatacgtcaatcggagtatcatctattagagatctaaagccggtgtaacattctccaccaaacatattcttattctgacgtcgttctacataaaacatcattgctccattaacgataacaggggaatgaacagcactacccatcacattagttcccaatggatcaatgtgtgtaactccagaacatcttccatagcctatgttaggaggagcgaacaccactcttccactattgccatcgaatgccatagaataaatatccttggaattgatagaaatcggactgtcggatgttgtgatcatcttcataggattaacaactatgtatggtgccgcctgaagtttcatatcgtaactgatgccgtttataggtctagccacagaaaccaacgtaggtctaaatccaactatagacaaaatagaagccaatatctgttcctcatctgtcataacttgagagcatccagtatgaataatcttcattagatggggatctaccgcatcatcatcgttacaataaaaaattcccattctaatgttcataattgcttttctaatcatggtatgcatgtttgctctctgaatctctgtggaaattagatctgatacacctgtaatcactatcggattatcctccgtaagacgattaaccaacaacatataattataagactttacttttctaaattcataaagttgctggattaggctataggtgtctccatgtacatacgcgttctcgagcgcaggaagtttaataccgaatagtgccatcagaataggatgaatatagtaattagtttctggttttctataaataaaagacaaatcttgtgaactagacatatcggtaaaatgcatggattggaatcgtgtagtcgacagaagaatatgatgattagatggagagtatattttatctaactctttgagttggtcaccgattctaggactagctcgagaatgaataagtactaaaggatgagtacatttcacagaaacactagcattgttcaatgtgctctttacatgggtaaggagttgaaatagctcgtttctatttgttctgacaatatttagtttattcataatgttaagcatatcctgaatagtaaagttagatgtgtcatacttgttagtagttagatatttagcaattgcattcccatcatttctcaatctcgtactccaatcatgcgtggatgctacttcgtcgatggaaaccatacaatcctttttgataggctgttgagattgatcatttcctgcacgtttaggtttggtacgttgatttctagcccctgcggatataaagtcatcgtctacaatttgggacaatgaattgcatacactacaagacaaagatttatcagaagtgtgaatatgatcttcatctaccaaagaaagagtttgattagtataactagattttagtcctgcgttagatgttaaaaaaacatcgctattgaccacggcttccattatttatattcgtagtttttactcgaaagcgtgattttaatatccaatcttattacttttggaatcgttcaaaacctttgactagttgtagaatttgatctattgccctacgcgtatactcccttgcatcatatacgttcgtcaccagatcgtttgtttcggcctgaagttggtgcatatctctttcaacattcgacatgagatccttaagggccatatcgtctagattttgttgagatgctgctcctggatttggattttgttgtgctgttgtacatactgtaccaccagtaggtgtaggagtacatacagtggccacaataggaggttgagaaagtgtaaccgttggagtagtacaagaaatacttccatccgattgttgtgtacatgtagttgttggtaacgtctgagaaggttgggtagatggcggcgtcgtcgttttttgatctttattaaatttagagataatatcctgaacagcattgctcggcgtcaacgctggaaggagtgaactcgccggcgcatcagtatcttcagacagccaatcaaaaagattagacatatcagatgatgtattagtttgttgtcgtggttttggtgtaggagcagtactactaggtagaagaataggagccgatgtagctgttggaaccggctgtggagttatatgaatagttggttgtagcggttggataggctgtctgctggcggccatcatattatctctagctagttgttctcgcaactgtctttgataatacgactcttgagactttagtcctatttcaatcgcttcatcctttttcgtatccggatccttttcttcagaataatagattgacgactttggtgtagaggattctgccagcctctgtgagaacttgttaaagaagtccatttaaggctttaaaattgaattgcgattataagattaaatggcagacacagacgatattatcgactatgaatccgatgatctcaccgaatacgaggatgatgaagaagaggaagaagatggagagtcactagaaactagtgatatagatcccaaatcttcttataagattgtagaatcagcatccactcatatagaagatgcgcattccaatcttaaacatatagggaatcatatatctgctcttaaacgacgctatactagacgtataagtctatttgaaatagcgggtataatagcagaaagctataacttgcttcaacgaggaagattacctctagtttcagaattttctgacgaaacgatgaagcaaaatatgctacatgtaattatacaagagatagaggagggttcttgtcctatagtcatcgaaaagaacggagaattgttgtcggtaaacgattttgacaaagatggtctaaaattccatctagactatattatcaaaatttggaaacttcaaaaacgatattagaatttatacgaatatcgttctctaaatgtcacaatcaagtctcgcatgttcagcaatttattgtcgtactttatatcgtgttcattaacgatatcttgcaaaatagtaatgattctatcttccttcgatagatattcttcagagattattgtcttatattctttcttgttatcagatatgaatttgataagactttgaacattattgatacccgtctgtttaattttttctacagatattttagttttggcagattctatcgtatctgtcaatagacatccaacatcgacattcgacgtcaattgtctataaatcaacgtataaattttagaaataacattagcgaattgttgtgcgttgatgtcgttattctgaaacagtatgattttaggtagcattttcttaacaaagagaacgtatttattgttactcagttgaacagatgatatatccagattactaacgcatctgattccgtataccaaactttcagaagaaatggtatacaattgtttgtattcattcaatgtctctttttcagaaattagtttagagtcgaatactgcaataattttcaagagatagttttcatcagataagattttatttagtgtagatatgataaaactattgttttgttggagaacttgatacgccgcgttctctgtagtcgacgctctcaaatgggaaacaatctccattatttttttggaatcggatactatatcttcggtatcttgacgcagtctagtatacatagagttaagagagattagagtttgtacattaagcaacatgtctctaaatgtggctacaaacttttcctttttcacatcatctagtttattatataccgatttcacaacggcaccagatttaaggaaccagaatgaaaaactctgataactacaatatttcatcatagttacgattttatcatcttctatagttggtgtaatagcgcatacctttttctccaagactggaaccaacgtcataaaaatgtttaaatcaaaatccatatcaacatctgatgcgctaagaccagtctcgcgttcaagattatctttactaatggtgacgaactcatcgtataaaactctaagtttgtccattatttatttacagatttagttgtttaatttatttgtgctcttccagagttgggatagtatttttctaacgtcggtattatattattaggatctacgttcatatgtatcataatattaatcatccacgttttgataaatctatctttagcttctgaaataacgtatttaaacaaaggagaaaaatatttagctacggcatcagacgcaataacattttttgtaaatgtaacgtatttagacgacagatcttcgttaaaaagttttccatctatgtagaatccatcggttgttaacaccattcccgcgtcagattgaataggagtttgaatagtttgttttggaaatagatccttcaataacttatagttgggtgggaaaaaatcgattttatcactagactctttcttttttactatcattacctcatgaactatttcttgaatgagtatatgtattttctttcctatatcggacgcgttcattggaaaatataccatgtcgttaactataagaatatttttatcctcgtttacaaactgaataatatcagatgtagttcgtaaacgaactatatcatcaccagcacaacatctaactatatgatatccactagtttcctttagccgtttattatcttgttccatattagcagtcattccatcatttaagaaggcgtcaaaaataatagggagaaatgacattttggattctgttacaactttaccaaaattaaggatatacggacttactatctttttctcaacgtcaatttgatgaacacacgatgaaaatgtgcttctatgagattgatcatgtagaaaacaacaagggatacaatatttccgcatatcatgaaatatattaagaaatcccaccttattatatttccccaaaggatccatgcacgtaaacattatgccgttatcattaataaagacttctttctcatcggatctgtaaaagttgttactgatttttttcattccaggatctagataattaataatgatgggttttctattcttattctttgtattttggcatatcctagaccagtaaacagtttccactttggtaaaatcagcagacttttgaacgctattaaacatggcattaatggcaataactaaaaatgtaaaatatttttctatgttaggaatatggtttttcactttaatagatatatggtttttggccaaaatgatagatatttttttatccgaggatagtaaaatattattagtcgccgtctctataaaaatgaagctagtctcgatatccaattttattctagaattgataggagtcgccaaatgtaccttatacgttatatctcccttgatgcgttccatttgtgtatctatatcggacacaagatctgtaaatagttttacgttattaatcatcacggtatcgccgtcgctagataacgctaatgtaccatccaagtcccaaatggagagatttaactgttcatcgtttagaataaaatgattaccggtcatattaataaagtgttcatcgtatctagataacaacgacttataattaatgtccaagtcttgaactcgctgaatgatcttttttaacccagttagttttagattggtacgaaatatattgttaaactttgattctacagtaatgtccaaatctagttgtggaaatacttccatcaacattgtttcaaacttgataatattattatctacatcttcgtacgatccaaattccggaatagatgtatcgcacgctctggccacccagataaccaaaaagtcacacgctccaggatatacattgtataaaaagctatcgttttttagtagggtttttttctgcgtgtatacgaagggattaaaaatagtattatcaacgtaactatattccaaattattcttatgagaatagataataatatcgtccttaatatctaacaaatttcctaaatatccctttaattgagtcattcgaagcgtcaatagaatatgtctcttaactatttccggctgttgtatatttaaatgacttcgtaaaaaataatatatgggcgacttctcatctatgtaatcatatggagtgagatatagggctcgttctacctcctgccccttacccacctgtaataccaattgcggacttactatatatcgcatatttatatcgtggggtaaagtgaaaatctactaccgatgatgtaagtcttacaatgttcgaaccagtaccagatcttaatttggaggcctccgtagaactaggggaggtaaatatagatcaaacaacacctatgataaaggagaatagcggttttatatcccgcagtagacgtctattcgcccatagatctaaggatgatgagagaaaactagcactacgattctttttacaaagactttattttttagatcatagagagattcattatttgttcagatgcgttgacgctgtaaaagacgtcactattaccaaaaaaaataacattatcgtggcgccttatatagcacttttaactatcgcatcaaaaggatgcaaacttacagaaacaatgattgaagcattctttccagaactatataatgaacatagtaagaaatttaaattcaactctcaagtatccatcatccaagaaaaactcggataccagtttggaaactatcacgtttatgattttgaaccgtattactctacagtagctctggctattcgagatgaacattcatctggcatttttaatatccgtcaagagagttatctggtaagttcattatctgaaataacatatagattttatctaattaatctaaaatctgatcttgttcaatggagtgctagtacgggcgctgtaattaatcaaatggtaaatactgtattgattacagtgtatgaaaagttacaactggtcatagaaaatgattcacaatttacatgttcattggctgtggaatcaaaacttccaataaaattacttaaagatagaaatgaattatttacaaaattcattaacgagttaaaaaagaccagttcattcaagataagcaaacgcgataaggatacgctactaaaatattttacttaggactggagttagaatttatagacgactcatttcgtttatcattgttactattattactattactatcattattagtgttggcattattagtattcttcttgtcatcttgttcagaaatatacagcaatgctatacctaatactaaatacattatcatgctcgcaatggctctaacaacaacgaaccaaaatgaatttggtcgtagcttttgttcacaaaaatacataaagaaatgtctacataaatctatggcgccattggctacttgaaatagcgccagtcctcctacagattttaatatagctgtataacatgacatttattcatcatcaaaagagacagagtcaccatctgtcatatttagattttttttcatgtgttcaaagtatcctctactcatttcattataatagtttatcatacttagaattttaggacggatcaatgagtaagacttgactagatcgtcagtagtaatttgtgcatcgtctattctgcatccgcttcgtcgaataatgtatagcatcgctttgagattctccatagctatcaagtctttatacaatgacatggaaatatctgtgaatactttatacttctccaacatcgatgccttaacatcatcgcctactttagcattgaaaatacgttctattgtgtagatggatgtagcaagatttttaaacaacaatgccatcttacacgatgattgcctcaagtctccaatcgtttgtttagaacgattagctacagagtccaatgcttggctgactagcatattattatctttagaaattgtattcttcaatgaggcgtttatcatatctgtgatttcgttagtcatattacagtctgactgggttgtaatgttatccaacatatcacctatggatacggtacacgtaccagcatttgtaataatcctatctaagatgttgtatggcattgcgcagaaaatatcttctcctgtaatatctccactctcgataaatctactcagattattcttaaatgccttattctctggagaaaagatatcagtgtccatcatttcattaatagtatacgcagaaaagataccacgagtatcaattctatccaagatacttatcggttccgagtcacagataatggtttcctctccttcgggagatcctgcatagaaatatctaggacaatagtttctatactgtctgtaactctgataatctctaaagtcactaactgataccatgaaattgagaagatcaaacgctgaagtaattaatttttctgcctcgtttttactacaactagttttcatcaatgtagtgacgatgtattgtttagttacttttggtctaatactgatgatagagatattattgcttcccataatggatcttctagtagtcaccttaaagcccattgatgcgaatagcagatagataaagtcttggtatgactcctttctaatatagtacggactacctttgtcacccaactttatacccacataagccataacaacctctttaatagccgtttcatgaggtttatcagccatgagcctgagtagttggaagaatctcatgaatcccgtctcagaaagtcctatatgcatgatagatttatctttcctgggaaactctcgtatagtcatagatgaaatactctttaaagtttctgaaataagattagtaacagtcttacctccgactactctaggtaacaaacaaactctaataggtgttttctctgcggagataatatcagaaaggatagagcaataagtagtattattgtgattataaagaccgaatacataacaggtagaatttataaacatcatgtcctgaaggtttttagacttgtattcctcgtaatccataccgtcccaaaacatggatttggtaactttgatagccgtagatctttgttccttcgccaacaggttaaagaaattaataaagaatttgttgtttctatttatgtccacaaattgcacgtttggaagcgccacggttacattcactgcagcattttgaggatcgcgagtatgaagtacgatgttattgtttactggtatatctggaaagaaatctaccagtctaggaataagagattgatatcgcatagaaatagtaaagtttataatctcatcatcgaagagcattttgttaccattgtaataaatatccactctgtcatatgtataaatgaagtactgttcaaacatgatgagatgtttatatgttggcatagtagtgagatcgacgtttggtaatggcaatgtattaagattaactccataatgtctagcagcatctgcgatgttataagcgtcgtcaaagcggggtcgatcttgtattgttatatattgtctaacacctataagattatcaaaatcttgtctgcttaatacaccgttaacaatttttgccttgaattcttttattggtgcattaataacatccttatagaggatgttaaacaaataagtgttatcaaagttaagatctggatatttcttttctgctagaacatccattgagtcggagccatctggtttaatataaccaccgataaatctagctctgtattctgtatccgtcaatctaatattaagaaggtgttgagtgaaaggtggaagatcgtaaaagctgtgagtattaatgataggattagtttccgaactaatgttaattggggtattaataatatctatatttccagcgttaagtgtaacattaaacagttttaattcacgtgacgtggtatcaattaaataattaatgcccaatttggatatagcagcctgaagctcatcttgtttagttacggatcctaatgagttattaagcaatatatcgaacggatgaacgaaggttgttttaagttggtcacatactttgtaatctagacatagatgcggaagaacggtagaaactatacgaaataaatattcagagtcctctaattgatcaagagtaactattgacttaataggcatcatttatttagtattaaatgacgaccgtaccagtgacggatatacaaaacgatttaattacagagttttcagaagataattatccatctaacaaaaattatgaaataactcttcgtcaaatgtctattctaactcacgttaacaacgtggtagatagagaacataatgccgccgtagtgtcatctccagaggaaatatcctcacaacttaatgaagatctatttccagatgatgattcaccggccactattatcgaacgagtacaacctcatactactattattgacgatactccacctcctacgtttcgtagagagttattaatatcggaacaacgtcaacaacgagaaaaaagatttaatattacagtatcgaaaaatgctgaagcaataatggaatctagatctatgataacttctatgccaacacaaacaccatccttgggagtagtttatgataaagataaaagaattcagatgttagaggatgaagtggttaatcttagaaatcaacgatctaatacaaaatcatctgataatttagataattttaccaaaatactatttggtaagactccgtacaaatcaacagaagttaataagcgtatagccatcgttaattatgcaaatttgaacgggtcccccttatcagtcgaggacttggatgtttgttcggaggatgaaatagatagaatctataaaacgattaaacaatatcacgaaagtagaaaacgaaaaattatcgtcactaacgtgattattattgtcataaacattatcgagcaggcattgctaaaactcggatttgaagaaatcaaaggactgagtaccgatatcacttcagaaattatcgatgtggagatcggagatgactgcgatgctgtagcatctaaactaggaatcggtaacagtccggttcttaatattgtattgtttatactcaagatattcgttaaacgaattaaaattatttaatttaatacattcccatatccagacaacaatcgtctggattaatctgttcctgtcgtctcataccggacgacatattaatctttttattagtgggcatctttttagatggtttctttttcccagcattaactgagtcgatacctagaagatcgtgattgatctctccgaccattccacgaacttctaattggccgtctctgacggtaccataaactattttaccagcattagtaacagcttggacaatctgaccatccatcgcattgtacgatgtagtagtaactgttgttctacgtctaggagcaccagaagtatttttggagcccttggatgttgatgtagaagaagacgaggattttgattttggtttacatgtaatacattttgaactctttgattttgtatcacatgcgccggcagtcacatctgtttgagaattaagattattgttgcctcctttgacggctgcatctccaccgatttgcgctagtagatttttaagctgtggtgtaatcttattaactgtttcgatataatcatcgtaactgcttctaacggctaaattttttttatccgccatttagaagctaaaaatatttttatttatgcagaagatttaactagattatacaatgaactaatatgatccttttccagattatttacaaacttggtattttttggttctggaggaggcgaatttaaattcggacttggattcggattttgtaagttcttgatcttattatacatcgagtataggatggcgacagtaactgctacacaaataccgatcaaaagaagaataccaatcatttattgacaataacttcactattgatcaagtatgcaatatatcatcttttcactaaataagtagtaataatgattcaacaatgtcgagatatatggacgataataatttagttcatggaaatatcgctatgattggtgtgaatgactccgctaactctgtggggtgcgcagtgctttccccacatagaataaattagcattccgactgtgataataataccaagtataaacgccataatactcaatactttccatgtacgagtgggactggtagacttactaaagtcaataaaggcgaagatacacgaaagaatcaaaagaatgattccagcgattagcacgccggaaaaataatttccaatcataagcatcatgtccatttaactaataaaaattttaaatcgccgaatgaacaaagtggaatataaaccatataaaaacaatagtttgtactgcaaaaataatatctatttttgttttcgaagatatggtaaaattaaatagtagtacacagcatgttataactaacagcagcaacggctcgtaattacttatcatttactagacgaaaaggtggtgggatattttcttgctcaaataatacgaatatatcacccatccattttatgcgatgtttatatactctaatctttaatagatctatagacgacgggtttaccaacaatatagattttatcgattcatctaatttaaacccttccttaaacgtgaatgatctattatctggcataacgatgaccctacctgatgaatcggacaatgtactgggccatgtagaataaattatcaacgaattatcgtctacgaacatttatatcatttgttttaattttaggacgcgaataaatggatataaaatagaaaataacagatattacaaccagtgttatggccgcgcccaaccaggtaggcagttttattttatcttttactacaggttctcctggatgtacgtcaccaacggcggacgtagttctagtacaattagacgtaagttccgcttgggaattttttaacgctaaagagttaacgttaatcgtgcacccaacgtatttacatctagttcgttgaacatcttgattataatataaccattttctatctctagattcgtcagtgcactcatgtaaccaacataccctaggtcctaaatatttatctccggaattagattttggataattcgcgcaccaacaatttctatttcctttatgatcgttacaaaagacgtataatgccgtatccccaaaagtaaaataatcaggacgaataattctaataaactcagaacaatatctcgcatccatatgtttggagcaaatatcggaataagtagacatagccggtttccgttttgcacgtaaccattctaaacaattggggtttccaggatcgtttctacaaaatccagtcatgaaatcgtcacaatgttctgtcttgtaattattattaaatatttttggacagtgtttggtatttgtcttagaacaacattttgccacgctatcactatcgcccaggagataatccttttttataaaatgacatcgttgcccggatgctatataatcagtagcgtgttttaaatccttaatatattcaggagttacctcgttctgataatagattaatgatccaggacgaaatttgaaagaactacatggttctccatgaattaatacatattgtttagcaaattcaggaactataaaactactacaatgatctatcgacataccatctatcaaacaaaacttgggtttaatttctcccggagatgtttcataatagtacgtataactttcttctgcaaacttaacagctctattatattcaggataattaaaacctaattccatatatttgtctcgtatatctgctattcctggtgctattttgattctattaagagtaacagctgcccccattcttaataatcgtcagtatttaaactgttaaatgttggtatatcaacatctaccttatttcccgcagtataaggtttgttgcaggtatactgttcaggaatggttacatttatacttcttctatagtcctgtctttcgatgttcatcacatatgcaaagaacagaataaacaaaataatgtaagaaataatattaaatatctgtgaattcgtaaatacattgattgccataataattacagcagctacaatacacacaatagacattcccacagtgttgccattacctccacgatacatttgagttactaagcaataggtaataactaagctagtaagaggcaatagaaaagatgagataaatatcatcaatatagagattagaggagggctatatagagccaagacgaacaaaatcaaaccgagtaacgttctaacatcattatttttgaagattcccaaataatcattcattcctccataatcgttttgcatcatacctccatctttaggcataaacgattgctgctgttcctctgtaaataaatctttatcaagcactccagcacccgcagagaagtcgtcaagcatattgtaatatcttaaataactcatttatatattaaaaaatgtcactattaaagatggagtataatctttatgccgaactaaaaaaaatgacttgtggtcaacccctaagtctttttaacgaagacggggatttcgtagaagttgaaccgggatcatcctttaagtttctgatacctaagggattttacgcctctccttccgtaaagacgagtctagtattcgagacattaacaacgaccgataataaaatcactagtatcaatccaacaaatgcgccaaagttatatcctcttcaacgcaaagtcgtatctgaagtagtttctaatatgaggaaaatgatcgaatcaaaacgtcctctatacatcactcttcacttggcgtgtggatttggtaagactattaccacgtgttatcttatggctacacacggtagaaaaaccgtcatttgcgtacccaataaaatgttaatacatcaatggaagacacaggtagaggcagtcggattggaacataagatatccatagatggagtaagtagtctattaaaggaactaaagactcaaagtccggatgtattaatagtagtcagtagacatctgacaaacgatgccttttgtaaatatatcaataagcattatgatttgttcatcttggatgaatcacatacgtataatctgatgaacaatacagcagttacaagatttttagcgtattatcctccgatgatgtgttattttttaactgctacacctagaccatctaaccgaatttattgtaacagtattattaatattgccaagttatccaatctaaaaaaaactatctatgcagtagatagtttttttgagccatattccacagataatattagacatatggtaaaacgactagatggaccatctaataaatatcatatatataccgagaagttattatctgtagacgagcctagaaatcaacttattcttgataccctggtagaagaattcaagtcaggaactattaatcgcattttagttattactaaactacgtgaacatatggtattattctacaaacgattattagattttttcggaccagaggttgtatttataggagacgcccaaaatagacgtactccagatatggtcaaatcaatcaaggaactaaatagatttatattcgtatccaccttattttattccggtactggtttagatattcctagtttggattcgttgttcatttgctcggcagtaatcaacaatatgcaaatagagcaattactagggagggtatgtcgagaaacagaactattagataggacggtatatgtatttcctaacacatccatcaaagaaataaagtacatgataggaaatttcatgcaacgaattattagtctgtctgtagataaactaggatttaaacaaaaaagttatcggaaacatcaagaatccgatcccacttctgcatgtacaacatcatccagagaagaacgtgtattaaatagaatatttaactcgcaaaatcgttaagaagtttaagcgacgatccgcatgctgcgcaggccagtgtattacccctcatagtattaatataatccaatgatacttttgtgatgtcggaaatcttaaccaatttagactgacaggcagaacacgtcatgcaatcatcatcgtcatcgataactgtagtcttgggcttctttttgcgactcttcattccggaacgcacattggtgctatccatttaggtagtaaaaaataagtcagaatatgccctataacacgatcgtgcaaaacctggtatatcgtctctatctttatcacaatatagtgtatcgacatttttattattattgacctcgtttatcttggaacatggaatgggaacatttttgttatcaacggccatctttgccttaattccagatgttgtaaaattataactaaacagtctatcatcgacacaaatgaaattcttgtttagacgtttgtagtttacgtatgcggctcgttcgcgtctcattttttcagatattgcaggtactataatattaaaaataagaatgaaataacataggattaaaaataaagttatcatgacttctagcgctgatttaactaacttaaaagaattacttagtctgtacaaaagtttgagattttcagattctgcggctatagaaaagtataattctttggtagaatggggaacatctacttactggaaaataggcgtgcaaaaggtagctaatgtcgagacgtcaatatctgattattatgatgaggtaaaaaataaaccgtttaatattgatccgggctattacattttcttaccggtatattttgggagcgtctttatttattcgaagggtaaaaatatggtagaacttggatctggaaactcttttcaaataccagatgatatgcgaagtgcgtgtaacaaagtattagacagcgataacggaatagactttctgagatttgttttgttaaacaatagatggataatggaagatgctatatcaaaatatcagtctccagttaatatatttaaactagctagtgagtacggattaaacatacccaaatatttagaaattgaaatagaggaagacacattatttgacgacgagttatactctattatagaacgctctttcgatgataaatttccaaaaatatccatatcgtatattaagttgggagaacttagacggcaagttgtagactttttcaaattctcattcatgtatattgagtccatcaaggtagatcgtataggagataatatttttattcctagcgttataacaaaatcaggaaaaaagatattagtaaaagatgtagaccatttaatacgatccaaggttagagaacatacatttgtaaaagtaaaaaagaaaaacacattttccattttatacgactatgatggaaacggaacagaaactagaggagaagtaataaaacgaattatagacactataggacgagactattatgttaacggaaagtatttctctaaggttggtagtgcaggcttaaagcaattgactaataaattagatattaatgagtgcgcaactgtcgatgagttagttgatgagattaataaatccggaactgtaaaacgaaaaataaaaaaccaatcagcatttgatttaagcagagaatgtttgggatatccagaagcggattttataacgttagttaataacatgcggttcaaaatagaaaattgtaaggttgtaaatttcaatattgaaaatactaattgtttaaataacccgagtattgaaactatatatggaaactttaaccagttcgtctcaatctttaatgtcgtcaccgatgtcaaaaaaagattattcgagtgaaataatatgcgcctttgatataggtgcaaaaaatcctgccagaactgttttagaagtcaaggataactccgttagggtattggatatatcaaaattagactggagttctgattgggaaaggcgcatagctaaagatttgtcacaatatgaatacactacagttcttctagaacgtcagcctagaaggtcgccgtatgttaaatttatctattttattaaaggctttttatatcatacatcggctgccaaagttatttgcgtctcgcctgtcatgtctggtaattcatatagagatcgaaaaaagagatcggtcgaagcatttcttgattggatggacacattcggattgcgagactccgttccggatagacgcaaattagacgatgtagcggatagtttcaatttggctatgagatacgtattagataaatggaatactaattatacaccttataataggtgtaaatctagaaattacataaaaaaaatgtaataacgttagtaacgccattatggataatctatttacctttctacatgaaatagaagatagatatgccagaactatttttaactttcatctaataagttgcgatgaaataggagatatatatggtcttatgaaagaacgcatttcctcagaggatatgtttgataatatagtgtataataaagatatacatcctgccattaagaaactagtgtattgcgacatccaacttactaaacacattattaatcagaatacgtatccggtatttaacgattcttcacaagtgaaatgttgtcattatttcgacataaactcagataatagcaatattagctctcgtacagtagagatatttgagagggaaaagtcatctcttgtatcatatattaaaactaccaataagaagagaaaggtcaattacggcgaaataaagaaaactgttcatggaggcactaatgcaaattacttttccggtaaaaagtctgacgagtatctgagtactacagttagatccaacattaatcaaccttggatcaaaaccatctctaagaggatgagagttgatatcattaatcactctatagtaacgcgtggaaaaagctctatattacaaactatagaaattatttttactaatagaacatgtgtgaaaatattcaaggattctactatgcacattattctatccaaggacaaggatgaaaaggggtgtatacacatgattgacaaattattctatgtctattataatttatttctgttgttcgaagatatcatccaaaacgagtactttaaagaagtagctaatgttgtaaaccacgtactcacggctacggcattagatgagaaattattcctaattaagaaaatggctgaacacgatgtttatggagttagcaatttcaaaatagggatgtttaacctgacatttattaagtcgttggatcataccgttttcccctctctgttagatgaggatagcaaaataaagttttttaaggggaaaaagctcaatattgtagcattacgatctctggaggattgtataaattacgtgactaaatccgagaatatgatagaaatgatgaaggaaagatcgactattttaaatagcatagatatagaaacggaatcggtagatcgtctaaaagaattgcttctaaaatgaaaaaaaacactaattcagaaatggatcaacgactagggtataagtttttggtgcctgatcctaaagccggagttttttatagaccgttacatttccaatatgtatcgtattctaattttatattgcatcgattgcatgaaatcttgaccgtcaagcggccactcttatcgtttaagaataatacagaacgaattatgatagaaattagcaatgttaaagtgactcctccagattactcacctataatcgcgagtattaaaggtaagagttatgacgcattagccacgttcactgtaaatatctttaaagaggtaatgaccaaagagggtatatccatcactaaaataagtagttatgagggaaaagattctcatttgataaaaattccgctactaataggatacgggaataaaaatccacttgatacagccaagtatcttgttcctaatgtcataggtggagtctttatcaataaacaatctgtcgaaaaagtaggaattaatctagtagaaaagattacaacatggccaaaatttagggttgttaagccaaactcattcactttctcgttttcctccgtatcccctcctaatgtattaccgacaagatatcgccattacaagatatctctggatatatcacaattggaagcgttgaatatatcatcgacaaagacatttataacggtcaatattgttttgctgtctcaatatttatctagagtgagtctagaattcattagacgtagtttatcatacgatatgcctccagaagttgtctatctagtaaacgcgataatagatagtgctaaacgaattactgaatctattactgactttaatattgatacatacattaatgacctggtggaagctgaacacattaaacaaaaatctcagttaacgatcaacgagttcaaatatgaaatgctgcataactttttacctcatatgaactatacacccgatcaactaaagggattttatatgatatctttactaagaaagtttctctactgtatcttccacacttctagatatccagatagagattcgatggtttgtcatcgcatcctaacgtacggcaaatattttgagacgttggcacatgatgaattagagaattacataggcaacatccgaaacgatatcatgaacaatcacaagaacagaggcacttacgcggtaaacattcatgtactaacaactcccggacttaatcacgcgttttctagcttattgagtggaaagttcaaaaagtcagacggtagttatcgaacacatcctcactattcatggatgcagaatatttctattcctaggagtgttggattttatccggatcaagtaaagatttcaaagatgttttctgtcagaaaataccatccaagtcaatatctttacttttgttcatcagacgttccggaaagaggtcctcaggtaggtttagtatctcaattgtctgtcttgagttccattacaaatatactaacgtctgagtatttggatttggaaaagaaaatttgtgagtatatcagatcatattataaagatgatataagttactttgaaacaggatttccaatcactatagaaaatgctctagtcgcatctcttaatccaaatatgatatgtgattttgtaactgactttagacgtagaaaacggatgggattcttcggtaacttggaggtaggtattactttagttagggatcacatgaatgaaattcgcattaatattggagcgggaagattagtcagaccattcttggttgtggataacggagagctcatgatggatgtgtgtccggagttagaaagcagattagacgacatgacattctctgacattcagaaagagtttccgcatgtcatcgaaatggtagatatagaacaatttacttttagtaacgtatgtgaatcggttcaaaaatttagaatgatgtcaaaggatgaaagaaagcaatacgatttatgtgactttcctgccgaatttagagatggatatgtagcatcttcattagtgggaatcaatcacaattctggacccagagctattcttggatgtgctcaagctaaacaagctatctcttgtctgagctcggatatacgaaataaaatagacaatggaattcatttgatgtatccagagaggccaatcgtgattagtaaggctttagaaacttcaaagattgcggctaattgcttcggccaacatgttactatagcattaatgtcgtacaaaggtatcaatcaagaggatggaattatcatcaaaaaacaatttattcagagaggcggtctcgatattgttacagccaagaaacatcaagtagaaattccattggaaaactttaataacaaagaaagagataggtctaacgcctattcaaaattagaaagtaatggattagttagactgaatgctttcttggaatccggagacgctatggcacgaaatatctcatcaagaactcttgaagatgattttgctagagataatcagattagcttcgatgtttccgagaaatataccgatatgtacaaatctcgcgttgaacgagtacaagtagaacttactgacaaagttaaggtacgagtattaaccatgaaagaaagaagacccattctaggagacaaatttaccactagaacgagtcaaaagggaacagtcgcgtatgtcgcggatgaaacggaacttccatacgacgaaaatggtatcacaccagatgtcattattaattctacatccatcttctctagaaaaactatatctatgttgatagaagttattttaacagccgcatattctgctaagccgtacaacaataagggagaaaaccgacctgtctgttttcctagtagtaacgaaacatccatcgatacatatatgcaattcgctaaacaatgttatgagcattcaaatccgaaattgtccgatgaagaattatcggataaaatcttttgtgaaaagattctctatgatcctgaaacggataagccttatgcatccaaagtattttttggaccaatttattacttgcgtctgaggcatttaactcaggacaaggcaaccgttagatgtagaggtaaaaagacgaagctcattagacaggcgaatgagggacgaaaacgtggaggaggtatcaagttcggagaaatggagagagactgtttaatagcgcatggtgcagccaatactattacagaagttttgaaagattcggaagaagattatcaagatgtgtatgtttgtgaaaattgtggagacatagcagcacaaatcaagggtattaatacatgtcttagatgttcaaaacttaatctctctcctctcttaacaaaaattgataccacgcacgtatctaaagtatttcttactcaaatgaacgccagaggcgtaaaagtcaaattagatttcgaacgaaggcctccttcgttttataaaccattagataaagttgatctcaagccgtcttttctggtgtaatattctagtttggtagtagatacatatcaatatcatcaaattcgagatccgaattataaaatgggcgtggattgttaactatagaatcggacgtctgatattcgaaaatctgtggagtttcaggttttggtggaggtgtaactgctacttgggatactgaagtctgatattcagaaagctgtggatgttctggttcggcatccaccgatggtgtcacatcactaatcggttcggtaacgtctgtggatggaggtgctacttctacagaacctgtagcctcagttgtcaacggagatacatttttaatgcgagaaaatgtataatttggtaatggtttcttatgtggatctgaagaagaggtaagatatctactagaaagataccgatcacgttctagttctcttttgtagaacttaactttttctttctccgcatctagttgatattccaacctcttcacgttactacgttcagattccaattcacgttcgcatgggttacctccgcagtttttacgagcgatttcacgttcagccttcatgcgtctctccctctctctatcgagtttatcagagcagtctttctgaaggcgatcgaactccataaatttctccaacgctttgattgtttccatagatttccgaagttcagcttttaggactgtgattctttttctttcgaattcacagctggatgtacaaccgtttccattaccgccatctctaagtttcttttctagatcggcaacatttcatccccatgccttttacattcctcgagtctactgtcgtcgaaatatcgttccagctccttttcgacatcaataactttagcacgttgtctctcaagctctcttttgtagttatctgattccctggcacgtttaagatcttcatgcaattgagtcagctcttaacttcctctcttgcttcttcgtcatagtacgcgcaatcactgtgagatccattgttaccacgtctacactcggcgagctcgcgtttaagagattcaatttcccgtttgtattggtccatgtttccattgctaccaccattagatttacaggctgctagttgtcgttcgagatcagaaatacgggttttcttggaattgatttcgtcgatgtacttggcatcgaaacacttattaagttctttttccaattctacgattttatttctttcgcgagtcaattccctcctgtagtaactatctgttttgtcagattcacgctctctacgtagactttcttgcaagttactaatttgttccctagcacgtccgagtttagttttatatgctgaatagagttctgattcatcctttgagcagatctctagcgatcgtttaagattcctaattctagtctttagcctatttacctcctcagaagatgttccgttaccgttgcgtttacactcgttaagctgtctatcaagatccatgattctatctctaagacgttgcatctctctttccatatcagcattgctttcattattacgtctgcagtcactcaactgtctttcaatatctgagattctatctctaagacgtcgcatctctctctgtttcggcattggtttcattattacgtttacagtcgttcaactgtctttcaagatctgatattctagattggagtctgctaatctctgtagcattttcacggcattcactcagttgtctttcaagatctgaaattttagattggagtctgctaatctctgtaagatttcctcctccgctctcgatgcagtcggtcaacttattctctagttctctaatacgcgaacgcagtgcatcaacttcttgcgtgtcttcctggttgcgtgtacattcatcgagatctctaacgcgtcgtcgttcttcctcaagttctctgcgtactacagaaagcgtgtccctatcttgttgatatttagcaatttctgattctagagtactgattttgcttacgtagttactaatagttgtcttggccttatcaagatcctccttgtatttgtcgcattccttgatatccctacgaagtctggacagttcccattcgacattacgacgtttatcgatttcagctcggagatcgtcatcgcgttgttttagccacatacgactgagttcaagttctcgttgacaagatccatctacttttccattcctaatagtatccagttccttttctagttctgaacgcatttctcgttccctatcaagcgattctctcaattctcggatagtcttcttatcaatttctaataaatctgaaccatcatctgtcccattttgaatatccctgtgttctttgatctcttttgtaagtcggtcgattctttcggttttataaacagaatccctttccaaagtcctaatcttactgagtttatcactaagttctgcattcaattcggtgagttttctcttggcttcttccaactctgttttaaactctccactatttccgcattcttcctcgcatttatctaaccattcaattagtttattaataactagttggtaatcagcgattcctatagccgttcttgtaattgtgggaacataattaggatcttctaatggattgtatggcttgatagcatcatctttatcattattagggggatggacaaccttaattggttggtcctcatctcctccagtagcgtgtggttcttcaataccagtgttagtaataggcttaggcaaatgcttgtcgtacgcgggcacttcctcatccatcaagtatttataatcgggttctacttcagaatattcttttctaagagacgcgacttcgggagttagtagaagaactctgtttctgtatctatcaacgctggaatcaatactcaagttaaggatagcgaatacctcatcgtcatcatccgtatcttctgaaacaccatcatatgacatttcatgaagtctaacgtattgataaatagaatcagatttagtattaaacagatccttaacctttttagtaaacgcatatgtatattttagatctccagatttcataatatgatcacatgccttaaatgtcagtgcttccatgatataatctggaacactaatgggtgacgaaaaagatacagcaccatatgctacgttgataaataaatctgaaccactaagtagataatgattaatgttaagaaagaggaaatattcagtgtataggtatgtcttggcgtcatatcttgtactaaacacgctaaacagtttgttaatgtgatcaatttccaatagattaattagagcagcgggaataccaacaaacatattaccacatccgtattttctatgaatatcacatatcatgttaaaaaatcttgatagaagagcgaatatctcgtctgacttaatgagtcgtagttcagcagcaacataagtcataactgtaaatagaacatactttcctgtagtgttgattctagactccacatcaacaccattattaaaaatagttttatatacatctttaatctgctctccgttaatcgtcgaacgttctagtatacggaaacactttgatttcttatctgtagttaatgacttagtgatatcacgaagaatattacgaattacatttcttgtttttcttgagagacctgattcagaactcaactcatcgttccatagtttttctacctcagtggcgaaatctttggagtgcttggtacatttttcaataaggttcgtgacctccatttattataaaaaatttattcaaaacttaactacaatcgggtaattataagatcgtagatctcccatgtggcggaatactaccatctatcgcatgtggatggacagtaggtaatggccatgggaacagtaatgtttgcatatttatctttcttgctagtattactgcatattgtcccaatgtttcgatgtgatgttctaacctatcaactgccgctgtatcacaacaatagtgtccgatgaaattaagattatgatccaatgtgtttaatatatgattatcaagtcttatacgatccgcgtcttttttgacaggatcaggttcttctacaggaagaagtttcggcctcttatgatattcatgtctgggaaacggtggtctagggtgaggctccggtatcggagtgggttttggattataatcatcatcgtctatgacatcatcttcgacttcgatatttattttgctatcttgatgatgtcctgtatcagttgcattttcagcactcgactgaatattagcgcattcattgtctattattaccatatttctaaacccaaaatgtatgtgttgaacatcagtactatcgttgatgagtcttatagcatgaattcgcttatcgttatcgggtttatcttctgtcaccttagcaattccttttttattaaactctacataatcatatccatttctattgtttgttctaatataaacgagtatagcatcattgctaaatttttcaatagtatcaaaaacagaatatcctaaaccatataatatatattcaggaacactcaaactaaatgtccaggattctcctaaatacgtaaactttaatagtgcgaaatcattcaaaaatctaccacttatagatagatagtacataaatgcgtatagtagtctacctatctctttattatgaaaaccggcattacgatcatatatgtcgtgatatacctgtgatccgtttacgttaaaccataaatacatgggtgatcctataaacatgaatttatttctaattctcagagctatagttaattgaccgtgtaatatttgcttacatgcatacttgatacgcttattaataagatttttatcattgctcgttatttcagaatcgtatatataaggagtaccatcgtgattcttaccagatattatacaaaatactatatataaaatatattgacccacgttagtaatcatataaatgtttaacgttttaaattttgtattcaatgatccattatcatacgctatcatggtcttgtaatattcattctttaaaatataatattgtgttagccattgcattggagctcctaatggagattttctattctcatccattttaggataggctttcataaagtccctaataacttcgtgaataatgtttctatgttttctactgatgcatgtatttgcttcgatttttttatcccatgtttcatctatcatagatttaaacgcagtaatgctcgcaacattaacatcttgaaccgttggtacaattccgttccataaatttataatgttcgccatttatataactcattttttgaatatacttttaattaacaaaagagttaagttactcatatggacgccgtccagtctgaacatcaatctttttagccagagatatcatagccgctcttagagtttcagcgtgattttccaacctaaatagaacttcatcgttgcgtttacaacacttttctatttgttcaaactttgttgttacattagtaatctttttttccaaattagttagccgttgtttgagagtttcctcattgtcgtcttcatcggctttaacaattgcttcgcgtttagcctctggctttttagcagcctttgtagaaaaaaattcagttgctggaattgcaagatcgtcatctccggggaaaagagttccgtccatttaaagtacagattttagaaactgacactctgcgttatttatatttggtacaacacatggattataaatattgatgttaataacatcagaaaatgtaaagtctatacattgttgcatcgtgttaaattttctaatggatctagtattattgggtccaacttctgcctgaaatccaaatatggaagcggatacaaaaccgtttcctggataaaccacacatctccacttttgctttacatcagaaattgtgtcgttgacatcttgaactctcctatctaatgccggtgttccacctatagattttgaatattcgaatgctgcatgagtagcattaaattccttaatattgccataattttcatatattgagtaaccctggataaaaagtaaacacaccgcagccgtcgctaccacaataaaaaaaattgatagagagttcatttataatctattagaagctgacaaaatttttttacacgcatcagacaatgctttaataaatagttcaacatctacttttgtcatatcgaaccgatggtatgattctaacctagaattacatccgaaaaagttgactatgttcatagtcattaagtcattaacaaacaacattccagactctggattataagacgatactgtttcgtcacaattacctaccttaatcatgtgattatgaatattggctattagagcaccttctaagaaatctataatatctttgaaacacgatttaaaatcaaaccacgaatatacttctacgaagaaagttagtttacccataggagaaataactataaatggagatctaaatacaaaatccggatctatgatagttttaacattattatattctctattaaatacctccacatctaaaaatgttaattttgaaactatgtcttcgtttattaccgtacctgaactaaacgctataagctctattgtttgagaactctttaaacgatattcttgaaatacatgtaacaaagtttcctttaactcggtcggtttatctaccatagttacagaatttgtatccttatctataatataataatcaaaatcgtataaagttatataattatcgcgttcagattgtgatcttttcaaatagactaaaaaccccatttctctagtaagtatcttatgtatatgtttgtaaaatatcttcatggtgggaatatgctctaccgcagttagccattcctcattgacagcggtagatgtattagacaaaactattccaatgtttaacaagggccattttacgagattattaaatccttgtttgataaatgtagccaatgagggttcgagttcaacgacgattgaattctcttcccgcggatgctgcatgatgaacgacgggatgttgttcgattgatttggaattctttttcgactttttgtttatattaaatattttaaaatttatagcggatagcaattcatgtaccacggataatgtagacgcgtattgcgcatcgatatctttattattagataaatttatcaataaatgtgagaagtttgcctcgttaaggtcttccatttaaatattatataaacatttgtgtttgtatcttattcgtcttttatggaatagttttttactagtaaagctgcaattacacactttgtccgtaaaacataaatataaacaccagcttttatcaatcgttccaaaaagtcgacggcggacatttttaacatggcatctattttaaatacacttaggtttttggaaaaaacatcattttataattgtaacgattcaataactaaagaaaagattaagattaaacataagggaatgtcatttgtattttataagccaaagcattctaccgttgttaaatacttgtctggaggaggtatatatcatgatgatttggttgtattggggaaggtaacaattaataatctaaagatgatgctattttacatggatttatcatatcatggagtgacaagtagtggagcaatttacaaattgggatcgtctatcgatagactttctctaaataggactattgttacaaaagttaataattatgatgatacattttttgacgacgatgattgatcgctattgcacaattttgtttttgtactttctaatatagtgtttaggttctttttcatatgagaatattgatttactaaaatatctatgtttaacttttgttctatgacgtccttatcggcggtatcggtacatatacgtaattcaccttcacaaaatacggagtcttcgataataatagccaatcgattattggatctagctgtctgtatcatattcaacatgtttaatatatcctttcgtttcccctttacaggcatcgatcgtagcatattttccgcgtctgatatggaaatgttaaaactacaaaaatgcgtaatgttagcccgtcctaatattggtacgtgtctataagtttggcatagtagaataatagacgtgtttaaatgccttccaaagtttaagaattctattagagtattgcattttgatagtttatcgcctacatcatcaaaaataagtaaaaagtgtgctgattttttatgattttgtgcgacagcaatacatttttctatgttacttttagttcgtatcagattatattctagagattcctgactactaacgaaattaatatgatttggccaaatgtatccatcataatctgggttataaacgggtgtaaacaagaatatatgtttatattttttaactagtgtagaaaacagagatagtaaatagatagtttttccagatccagatcctcctgttaaaaccattctaaacggcatttttaataaattttctcttgaaaattgtttttcttggaaacaattcataattatatttacagttactaaattaatttgataataaatcaaaatatggaaaactaaggttgttagtagggaggagaacaaagaaggcacatcgtgatataaataacatttattatcatgatgacaccagaaaacgacgaagagcagacatctgtgttctccgctactgtttacggagacaaaattcagggaaagaataaacgcaaacgcgtgattggtctatgtattagaatatctatggttatttcactactatctatgattaccatgtccgcgtttctcatagtgcgcctaaatcaatgcatgtctgctaacgaggctgctattactgacgccgctgttgccgttgctgctgcatcatctactcatagaaaggttgcgtctagcactacacaatatgatcacaaagaaagctgtaatggtttatattaccagggttcttgttatatattacattcagactaccagttattctcggatgctaaagcaaattgcactgcggaatcatcaacactacccaataaatccgatgtcttgactacctggctcattgattatgttgaggatacatggggatctgatggtaatccaattacaaaaactacatccgattatcaagattctgatgtatcacaagaagttagaaagtatttttgtgttaaaacaatgaactaatatttatttttgtacattaataaatgaaatcgcttaatagacaaactgtaagtaggtttaagaagttgtcggtgccggccgctataatgatgatactctcaaccattattagtggcataggaacatttctgcattacaaagaagaactgatgcctagtgcttgcgccaatggatggatacaatacgataaacattgttatttagatactaacattaaaatgtctacagataatgcggtttatcagtgtcgtaaattacgagctagattgcctagacctgatactagacatctgagagtattgtttagtattttttataaagattattgggtaagtttaaaaaagaccaatgataaatggttagatattaataatgataaagatatagatattagtaaattaacaaattttaaacaactaaacagtacgacggatgctgaagcgtgttatatatacaagtctggaaaactggttaaaacagtatgtaaaagtactcaatctgtactatgtgttaaaaaattctacaagtgacaacaaaaaatgaattaataataagtcgttaacgtacgccgccatggacgccgcgtttgttattactccaatgggtgtgttgactataacagatacattgtatgatgatctcgatatctcaatcatggactttataggaccatacattataggtaacataaaaactgtccaaatagatgtacgggatataaaatattccgacatgcaaaaatgctactttagctataagggtaaaatagttcctcaggattctaatgatttggctagattcaacatttatagcatttgtgccgcatacagatcaaaaaataccatcatcatagcatgcgactatgatatcatgttagatatagaagataaacatcagccattttatctattcccatctattgatgtttttaacgctacaatcatagaagcgtataacctgtatacagctggagattatcatctaatcatcaatccttcagataatctgaaaatgaaattgtcgtttaattcttcattctgcatatcagacggcaatggatggatcataattgatgggaaatgcaatagtaattttttatcataaaagttgtaaagtaaataataaaacaataaatattgaactagtagtacgtatattgagcaatcagaaatgatgctggtacctcttatcacggtgaccgtagttgcgggaacaatattagtatgttatatattatatatttgtaggaaaaagatacgtactgtctataatgacaataaaattatcatgacaaaattaaaaaagataaagagttctaattccagcaaatctagtaaatcaactgatagcgaatcagactgggaggatcactgtagtgctatggaacaaaacaatgacgtagataatatttctaggaatgagatattggacgatgatagcttcgctggtagtttaatatgggataacgaatccaatgttatggcgcctagcacagaacacatttacgatagtgttgctggaagcacgctgctaataaataatgatcgtaatgaacagactatttatcagaacactacagtagtaattaatgaaacggagactgttgaagtacttaatgaagataccaaacagaatcctaactattcatccaatcctttcgtaaattataataaaaccagtatttgtagcaagtcaaatccgtttattacagaacttaacaataaatttagtgagaataatccgtttagacgagcacatagcgatgattatcttaataagcaagaacaagatcatgaacacgatgatatagaatcatcggtcgtatcattggtgtgattagtttcctttttataaaattgaagtaatatttagtattattgctgccgtcacgttgtacaaatggagatattccctgtattcggcatttctaaaattagcaattttattgctaataatgactgtagatattatatagatacagaacatcaaaaaattatatctgatgagatcaatagacagatggatgaaacggtacttcttaccaacatcttaagcgtagaagttgtaaatgacaatgagatgtaccatcttattcctcatagattatcgacgattatactctgtattagttctgtcggaggatgtgttatctctatagataatgacatcaatggcaaaaatattctaacctttcccattgatcatgctgtaatcatatccccactgagtaaatgtgtcgtagttagcaagggtcctacaaccatattggttgttaaagcggatatacctagcaaacgattggtaacatcgtttacaaacgacatactatatgtaaacaatctgtcactgattaattatttgccgttgtctgtattcattattagacgagtcaccgactatttggatagacacatatgcgatcagatatttgctaataataagtggtattcccttataaccatcgacgataagcaatatcctattccatcaaactgtataggtatgtcctctgccaagtacataaattctagcatcgagcaagatactttaatccatgtttgtaacctcgagcatccgttcgactcagtatacaaaaaaatgcagtcgtacaattctctacctatcaaggaacaaatattgtacggtagaattgataatataaatatgagcattagtatttctgtggattaatagatttctagtatggggatcattaatcatctctaatctctaaatacctcataaaacgaaaaaaaagctattatcaaatactgtacggaatggattcattctcttctctttttatgaaactctgttgtatatctactgataaaactggaagcaaaaaatctgatagaaagaataagaataagatcaaggattatatggaacacgattattataaaataacaatagttcctggttcctcttccacgtctactagctcgtggtattatacacatgcctagtaatagtctctttgcgttgacggaaagcagactagaaataacaggctaaaatgttcagacaccataatagttcccaacccagataataacagagttccatcaacacattcctttaaactcaatcccaaacccaaaaccgttaaaatgtatccggccaattgatagtagataatgaggtgtacagcgcatgataatttacacagtaaccaaaatgaaaatactttagtaattataagaaatatagacggtaatgtcatcatcaacaatccgataatatgcctgagagtaaacattgacggataaaacaaaaatgctccgcataactctatcatggcaataacacaaccaaatacttgtaagattcctaaattagtagaaaatacaacgaatatcgatgtataagtgatctcgagaaataataagaataaagtaatgcccgtaaagataaacatcaacattgtttggtaatcattaaaccaattagtatgaagttgaactaatttcacagtagattttattccagtgttatcctcgcatgtataagtacctggtaagatatctttatattccataatcaatgagacatcactatctgataacgaatgaagtctagcactagtatgccatttacttaatattgtcgtcttggaagttttattataagttaaaatatcatggttatccaatttccatctaatatactttgtcggattatctatagtacacggaataatgatggtatcattacatgctgtatactctatggtctttgtagttgttataacaaccaacgtatagaggtatatcaacgatattctaactcttgacattttttatttatttaaaatgatacctttgttatttattttattctattttgctaacggtattgaatggcataagtttgaaacgagtgaagaaataatttctacttacttattagacgacgtattatacacgggtgttaatggggcggtatacacattttcaaataataaactaaacaaaactggtttaactaataataattatataacaacatctataaaagtagaggatgcggataaggatacattagtatgcggaaccaataacggaaatcccaaatgttggaaaatagacggttcagacgacccaaaacatagaggtagaggatacgctccttatcaaaatagcaaagtaacgataatcagtcacaacggatgtgtactatctgacataaacatatcaaaagaaggaattaaacgatggagaagatttgacggaccatgtggttatgatttattcacggcggataacgtaattccaaaagatggtttacgaggagcattcgtcgataaagacggtacttatgacaaagtttacattcttttcactgatactatcggctcaaagagaattgtcaaaattccgtatatagcacaaatgtgcctaaacgacgaaggtggtccatcatcattgtctagtcatagatggtcgacgtttctcaaagtcgaattagaatgtgatatcgacggaagaagttatagacaaattattcattctagaactataaaaacagataatgatacgatactatatgtattcttcgatagtccttattccaagtccgcattatgtacctattctatgaataccattaaacaatctttttctacgtcaaaattggaaggatatacaaagcaattgccgtctccagctcctggtatatgtttaccagctggaaaagttgttccacataccacgtttgaagtcatagaacaatataatgtactagatgatattataaagcctttatctaaccaacctatcttcgaaggaccgtctggtgttaaatggttcgatataaaggagaaggaaaatgaacatcgggaatatagaatatacttcataaaagaaaattctatatattcgttcgatacaaaatctaaacaaactcgtagctcgcaagtcgatgcgcgactattttcagtaatggtaactgcgaaaccgttatttatagcagatatagggataggagtaggaatgccacaaatgaaaaaaatacttaaaatgtaatcttaatcgagtacaccacacgacaatgaacaaacataagacagattatgctggttatgcttgctgcgtaatatgcggtctaattgtcggaattatttttacagcgacactattaaaagttgtagaacgtaaattagttcatacaccattaatagataaaacgataaaagatgcatatattagagaagattgtcctactgactggataagctataataataaatgtatccatttatctactgatcgaaaaacctgggaggaaggacgtaatgcatgcaaagctctaaattcaaattcggatctaattaagatagagactccaaacgagttaagttttttaagaagccttagacgaggctattgggtaggagaatccgaaatattaaaccagacaaccccatataattttatagctaagaatgccacgaagaatggaactaaaaaacggaaatatatttgtagcacaacgaatactcccaaactgcattcgtgttacactatataacaattacactacatttttatcataccactacttcggttagatgttttagaaaaaaataaatatcgccgtaccgttcttgtttttataaaaataacaattaacaattatcaaattttttctttaatattttacgtggttgaccattcttggtggtaaaataatctcttagtgttggaatggaatgctgtttaatgtttccacactcatcgtatattttgacgtatgtagtcacatcgtttacgcaatagtcagactgtagttctatcatgcttcctacatcagaaggaggaacagttttaaagtctcttggttttaatctattaccgttagttttcatgaaatcctttgttttatccacttcacattttaaataaatgtccactatacattcttttgttaattttactagatcgtcatgggtcatagaatttataggttccgtagtccatggatccaaactagcaaacttcgcgtatacggtatcgcgattagtgtatacaccaactgtatgaaaattaagaaaacagtttaataaatcaacagaaatatttaatcctccgtttgatacagatgcgccatatttatggatttcggattcacacgttgtttgtctgaggtgttcgtctagtgttgcttctacgtaaacttcgattcccatatattctttattgtcagaatcgcataccgatttatcatcatacactgtttgaaaactaaatggtatacacatcaaaataataaataataacgagtacattctgcaatattgttatcgtaattggaaaaatagtgttcgagtgagttggattatgtgagtattggattgtatattttattttatattttgtaataagaataaaatgctaatgtcaagtttattccaatagatgtcttattaaaaacatatataataaataacaatggctgaatggcataaaattatcgaggatatctcaaaaaataataagttcgaggatgccgccatcgttgattacaagactacaaagaatgttctagctgctattcctaacagaacatttgccaagattaatccgggtgaaattattcctctcatcactaatcgtaatattctaaaacctcttattggtcagaaatattgtattgtatatactaactctctaatggatgagaacacgtatgctatggagttgcttactgggtacgcccctgtatctccgatcgttatagcgagaactcataccgcacttatatttttgatgggtaagccaacaacatccagacgtgacgtgtatagaacgtgtagagatcacgctacccgtgtacgtgcaactggtaattaaaataaaaagtaatattcatatgtagtgtcaattttaaatgatgatgatgaaatggataatatccatattgacgatgtcaataatgccggtattggcatacagttcatcgatttttagatttcattcagaggatgtggaattatgttatgggcatttgtattttgataggatctataatgtagtaaatataaaatataatccgcatattccatatagatataattttattaatcgcacgttaaccgtagatgaactagacgataatgtcttttttacacatggttattttttaaaacacaaatatggttcacttaatcctagtttgattgtctcattatcaggaaacttaaaatataatgatatacaatgctcagtaaatgtatcgtgtctcattaaaaatttggcaacgagtacatctactatattaacatctaaacataagacttattctctacatcggtccacgtgtattactataataggatacgattctattatatggtataaagatataaatgacaagtataatgacatctatgattttactgcaatatgtatgctaatagcgtctacattgatagtgaccatatacgtgtttaaaaaaataaaaatgaactcttaattatgctatgctattagaaatggataaaatcaaaattacggttgattcaaaaattggtaatgttgttaccatatcgtataacttggaaaagataactattgatgtcacacctaaaaagaaaaaagaaaaggatgtattattagcgcaatcagttgctgtcgaagaggcaaaagatgtcaaggtagaagaaaaaaatattatcgatattgaagatgacgatgatatggatgtagaaagcgcgtaatacgatctataaaaataagtatataaatactttttatttactgtactcttactgtgtagtggtgataccctactcgattatttttttaaaaaaaaaatacttattctgattcttctagccatttccgtgttcgtttgaatgccacatcgacgtcaaagataggggagtagttgaaatctagttctgcattgttggtacgcacctcaaatgtagtgttggatatcttcaacgtatagttgttgagtagtgatggttttctaaatagaattctcttcatatcattcttgcacgcgtacatttttagcatccatcttggaatcctagatccttgttctattcccaatggtttcatcaatagaagattaaacatatcgtacgaacacgatggagagtaatcgtagcaaaagtaagcatttcctttaatcttagatcccggatactggatatattttgcagccaacacgtgcatccatgcagcatttcctacatatacccggctatgcaccgcgtcatcatcgactgtacgatacataatgttaccgtgttgcttacattgctcgtaaaagactttcatcaatttgtctccttctccgtaaattccagtgggtcttaggcaacaagtatacaattttgctccattcatgattacggaattattggctttcataaccagttgctcggccatacgtttactttttgcgtatacatgtcctggtgatatatcataaagggtatgctcatggccgatgaatggatcaccgtgtttattgggtcctattgcttccatgctactagtatagatcaaatacttgattcctaggtccacacaagctgccaaaatagtctgtgttccataatagtttactttcatgatttcattatcggtgtattttccaaatacatccactagagcagccgtatgaataatcagatttaccccatctagcgcttctctcaccttatcaaagtcgtttatatcacattgtatatagtttataaccttaactttcgaggttattggttgtggatcttctacaatatctatgactctgatttcttgaacatcatctgcactaattaacagttttactatatacctgcctagaaatccggcaccaccagtaaccgcgtacacggccattgctgccactcataatatcagactacttattctattttactaaataatggctgtttgtataatagaccacgataatatcagaggagttatttactttgaaccagtccatggaaaagataaagttttaggatcagttattggattaaaatccggaacgtatagtttgataattcatcgttacggagatattagtcaaggatgtgattccataggcagtccagaaatatttatcggtaacatctttgtaaacagatatggtgtagcatatgtttatttagatacagatgtaaatatatttacaattattggaaaggcgttatctatttcaaaaaatgatcagagattagcgtgtggagttattggtatttcttacataaatgaaaagataatacattttcttacaattaacgagaatggcgtttgatatatcagttaatgcgtctaaaacaataaatgcattagtttacttttctactcagcaaaataaattagtcatacgtaatgaagttaatgatacacactacactgtcgaatttgatagggacaaagtagttgacacgtttatttcatataatagacataatgacaccatagagataagaggggtgcttccagaggaaactaatattggttgcgcggttagtatgacttacttgtataataagtatagttttaaactgattttagcagaatatataagacacagaaatactatatccggcaatatttattcggcattgatgacactagatgatttggctattaaacagtatggagacattgatctattatttaatgagaaacttaaagtagactccgattcgggactatttgactttgtcaactttgtaaaggatatgatatgttgtgattctagaatagtagtagctctatctagtctagtatctaaacattgggaattgacaaataaaaaatataggtgtatggcattagccgaacatatatctgatagtattccaatatctgagctatctagactacgatacaatctatgtaagtatctacgcggacacactgagagcatagaggataaatttgattattttgaagacgatgattcgtctacatgttctgccgtaaccgacagggaaacggatgtataattttttttatagcgtgaaggatatgataaaaaatataattgttgtatttatcccattccaatcaccttatatgattctgtaacacaataaaggagtcttatagatgtatagaggtcagatactggtttgataaactgtttattccacataagtatgtttgactttatggttagacccgcatactttaacaaatcactgaaaattggagttaggtattgacctctcagaatcagttgccgttctggaacattaaatgtattttttatgatatactccaacgcatttatgtgggcatacaacaagtcattactaatggaatattccaagagttttagttgtctagtatttaacaagagaagagatttcaacagactgtttatgaactcgaatgccgcctcattgtcgcttatattgatgatgtcgaattctcccaatatcatcaccgatgagtagctcatcttgttatcgggatccaagttttctaaagatgtcattaaaccctcgatcatgaatggatttatcatcatcgtttttatgttggacatgagcttagtccgtttgtccacatctatagaagatgatttctgaattatttcatatatctctctctttaactccaggaacttgtcaggatggtctactttaatatgttctcgtctaagagatgaaaatctttggatggttgcacgcgacttttctctaaaggatgacgttgcccaagatcctctcttaaatgaatccatcttatccttggacaagatggacagtctattttccttagatggtttaatatttttgttacccatgatctataaaggtagacctaatcgtctcggatgaccatatatttattttcagttttattatacgcataaattgtaaaaaatatgttaggtttacgaaaatgtctcgtggggcattaatcgtttttgaaggattggacaaatctggaaaaacaacacaatgtatgaacatcatggaatcaataccttcaaacacaataaaataccttaactttcctcagagatccactgtcactggaaagatgatagatgactatctaactcgtaaaaaaacctataatgatcatatagttaatctattattttgtgcaaatagatgggagtttgcatcttttatacaagaacaactagaacagggaattactttaatagttgatagatacgcattttctggagtagcgtatgccgccgctaaaggcgcgtcaatgactctcagtaagagttatgaatctggattgcctaaacccgacttagttatattcttggaatctggtagcaaagaaattaatagaaacgtcggtgaggaaatttatgaagatgttacattccaacaaaaggtattacaagaatataaaaaaatgattgaagaaggagatattcattggcaaattatttcttctgaattcgaggaagatgtaaagaaggagttgattaagaatatagttatagaggctatacacacggttactggaccagtggggcaactgtggatgtaatagtgaaattacattttttataaatagatgttagtacagtgttataaatggatgaagcatattactctggcaacttggaatcagtactcggatacgtgtccgatatgcataccgaactcgcatcaatatctcaattagttattgccaagatagaaactatagataatgatatattaaacaaggacattgtaaattttatcatgtgtagatcaaacttggataatccatttatctctttcctagatactgtatatactattatagatcaagagaactatcagactgagttgattaattcattagacgacaatgaaattatcgattgtatagttaataagtttatgagcttttataaggataacctagaaaatatagtagatgctatcattactctaaaatatataatgaataatccagattttaaaactacgtatgccgaagtactcggttccagaatagccgatatagatattaaacaagtgatacgtaagaatatactacaattgtctaataatatccgcgaacgatatttgtgaaaatattaaaaaaaaatactttttttattaaatgacgtcttttcgtgaatttagaaaattatgctgtgctatatatcacgcatcaggatataaagaaaaatctaaattaattagagactttataacagatagggatgataaatatttgatcattaagctattgcttcccggattagacgatagaatttataacatgaacgataaacaaattataaaattatatagtataatatttaaacaatctcaggaagatatgctacaagatttaggatacggatatataggagacactattaggactttcttcaaagagaacacagaaatccgtccacgagataaaagcattttaactttagaagaagtggatagttttttaactacgttatcatccgtaactaaagaatcgcatcaaataaaattattgactgatgtagcatctgtttgtacatgtaatgatttaaaatgtgtagtcatgcttattgataaagatctaaaaattaaagcgggtcctcggtacgtacttaacgctattagtcctaatgcctatgatgtgtttagaaaatctaataacttgaaagagataatagaaaattcatctaaacaaaatctagactctatatctatttctgttatgactccaattaatcccatgttagcggaatcgtgtgattctgtcaataaggcgtttaaaaaatttccatcaggaatgtttgcggaagtcaaatacgatggtgaaagagtacaagttcataaaaataataacgagtttgccttctttagtagaaacatgaaaccagtactctctcataaagtggattatctcaaagaatacataccgaaagcatttaaaaaagctacgtctatcgtattggattctgaaattgttcttgtagacgaacataatgtaccgctcccgtttggaagtttaggtatacacaaaaagaaagaatataaaaactctaacatgtgtttgttcgtgtttgactgtttgtactttgatggattcgatatgacggacattccattgtacgaacgaagatcttttctcaaagatgttatggttgaaatacccaatagaatagtattctcagagttgacgaatattagtaacgagtctcagttaactgacgtattggatgatgcactaacgagaaaattagaaggattggtcttaaaagatattaatggagtatacgaaccgggaaagagaagatggttaaaaataaagcgagactatttgaacgagggttccatggcagattctgccgatttagtagtactaggtgcctactatggtaaaggagcaaagggtggtatcatggcagtctttctaatgggttgttacgacgatgaatccggtaaatggaagacggttaccaagtgttcaggacacgatgataatacgttaagggagttgcaagaccaattaaagatgattaaaattaacaaggatcccaaaaaaattccagagtggttagtagttaataaaatctatattcccgattttgtagtagaggatccgaaacaatctcagatatgggaaatttcaggagcagagtttacatcttccaagtcccataccgcaaatggaatatccattagatttcctagatttactaggataagagaggataaaacgtggaaagaatctactcatctaaacgatttagtaaacttgactaaatcttaatagttacatacaaactgaaaattaaaataacactatttagttggtggtcgccatggatggtgttattgtatactgtctaaacgcgctagtaaaacatggcgaggaaataaatcatataaaaaatgatttcatgattaaaccatgttgtgaaagagtttgtgaaaaagtcaagaacgttcacattggcggacaatctaaaaacaatacagtgattgcagatttgccatatatggataatgcggtatccgatgtatgcaattcactgtataaaaagaatgtatcaagaatatccagatttgctaatttgataaagatagatgacgatgacaagactcctactggtgtatataattattttaaacctaaagatgccattcctgttatcatatctataggaaaggataaagatgtctgtgaactattaatctcatcagacatatcgtgtgcatgcgtggagttaaattcatatcacgtagccattcttcccatggatgtttccttttttaccaaaggaaatgcatcattgattattctcctgtttgatttctctatcgatgcggcacctctcttaagaagtgtaaccgataataatgttattatatctagacaccagcgtctacatgacgagcttccgagttccaattggttcaagttttacataagtataaagtccgactattgttctatattatatatggttgttgatggatctgtgatgcatgcgatagctgataatagaactcacgcaattattagcaaaaatatattagacaatactacgattaacgatgagtgtagatgctgttattttgaaccacagattaggattcttgatagagatgagatgctcaatggatcatcgtgtgatatgaacagacattgtattatgatgaatttacctgatgtaggcgaatttggatctagtatgttggggaaatatgaacctgacatgattaagattgctctttcggtggctggtaatttaataagaaatcgagactacattcccgggagacgaggatatagctactacgtttacggtatagcctctagataatttttttaagcacgaaataaaaaacataattttaaaccaatctatttcatactattttgtgtgatcaccatggacataaagatagatattagtatttctggtgataaatttacggtgactactaggagggaaaatgaagaaagaaaaaaatatctacctctccaaaaagaaaaaactactgatgttatcaaacctgattatcttgagtacgatgacttgttagatagagatgagatgtttactattctagaggaatattttatgtacagaggtctattaggcctcagaataaaatatggacgactctttaacgaaattaaaaaattcgacaatgatgcggaagaacaattcggtactatagaagaactcaagcagaaacttagattaaattctgaagagggagcagataactttatagattatataaaggtacaaaaacaggatatcgtcaaacttactgtatacgattgcatatctatgataggattgtgtgcatgcgtggtagatgtttggagaaatgagaaactgttttctagatggaaatattgtttacgagcgattaaactgtttattgatgatcacatgcttgataagataaaatctatactgcagaatagactagtatatgtggaaatgtcatagaaagttaaaagttaatgagagcaaaaatatataaggttgtattccatatttgttatttttttctgtaatagttagaaaaatacattcgatggtctatctatcagattattatgtgttataaggtactttttctcataataaactagagtatgagtaagatagtgtttttcaaaacatataaatctaaaattgatggatgagatatacagctattaatttcgaaaatatattttaatctgataactttaaacatggatttttaatggtggtttaacgttttaaaaaaagattttgttattgtagtatatgataatattaaaagatggatataaagaatttgctgactgcatgtactattttttacattactacattggctacggcagatatacctacttcgtcactgccacacgctccggtaaacggggcatgtgacgagggagaatatcttgataagaggcataatcaatgttgtaatcagtgtccacctggagaatttgccaaggttagatgtaatggtaacgataacacaaaatgtgaacgctgcccacctcatacatataccgcaatccccaattactctaatggatgtcatcaatgtagaaaatgcccaacaggatcatttgataaggtaaagtgtaccggaacacagaacagtaaatgttcgtgtcttcctggttggtattgcgctactgattcttcacagactgaagattgtcgagattgtataccaaaaaggagatgtccatgcggatactttggtggaatagatgaacaaggaaatcctatttgtaaatcgtgttgtgttggtgaatattgcgactacctacgtaattatagacttgatccatttcctccatgcaaactatctaaatgtaattaattatgattttgatgataatgttaccatacattatatcgctacttggttagtgtattattcagtatgaagacctattaataattacttatcttttgacgatcttgttataattataatataaaaatacttatggcatagtaactcataattgctgacgcgataaattcgtaataatctgttttgttcaaatttttataaggaatctacaggcataaaaataaaaatataatttataatatactcttacagcgcgccatcatgaataacagcagtgaattgattgctgttattaatggatttagaaatagtggacgattttgtgatattaatatagttattaatgatgaaaggataaacgctcacagactcatcctatctggagcctccgaatatttttccattctgttttccaataattttatcgattctaatgaatacgaagttaatctaagtcatttagattatcaaagtgttaacgatttgatcgattacatttatgggatacctttgagcctaactaacgataacgtgaaatatattctttcaaccgctgattttttacaaattggatctgctattacggagtgtgaaaattacatacttaaaaatctttgttctagaaactgtatcgatttctacatatacgctgataaatataataacaagaaaatagaatcagcgtcgtttaacacaatattacaaaatattttgagactcatcaacgatgaaaactttaaatacttaacagaggaatcaatgataaaaattttaagcgatgatatgttaaatataaaaaatgaggatttcgccccactaattctcattaaatggttagagagtactcaacaaccatgcaccgtcgagttacttaaatgcctcagaatatcattgctttccccacaagttataaaatcactttatagtcatcgactggttagttcaatctacgaatgtataacattcttaaacaatatagcattcttggatgaatcatttcctagataccatagcatcgagttgatatctatcggtataagtaattcgcatgataagatttccataaactgctacaatcataaaaaaaatacatgggaaatgatatcttcacgtagatataggtgtagtttcgcagtggccgtcctggataatattatctatatgatgggtggatatgatcagtccccgtatagaagttcaaaggttatagcgtacaatacatgtacaaattcttggatatatgatataccagagctaaaatatcctcgttctaattgtgggggactggctgatgacgaatacatttattgtataggcggcatacgcgatcaggattcatcgttgacatctagtattgatagatggaagccatcaaaaccatattggcagaagtatgctaaaatgcgcgaaccaaaatgtgatatgggggttgcgatgttaaacggattaatatatgttataggtggaatcgttaaaggtgacacgtgtaccgacgcactagagagtttatcagaagatggatggatgaagcatcaacgtcttccaataaaaatgtccaatatgtcgacgattgttcatgatggcaagatttatatatctggaggttacaacaatagtagtgtagttaatgtaatatcgaatctagtccttagctataattcgatatatgatgaatggaccaaattatcatcattaaacattcctagaattaatcccgctctatggtcagcgcataataaattatatgtaggaggaggaatatctgatgatgttcgaactaatacatctgagacatacgacaaagaaaaagattgttggacattggataatggtcacgtgttaccacgcaattatataatgtataaatgcgaaccgattaaacataaatatccattggaaaaaacacagtacacgaatgattttctaaagtatttggaaagttttataggtagttgatagaacaaaatacataattttgtaaaaataaatcactttttatactaatatgacacgattaccaatacttttgttactaatatcattagtatacgctacaccttttcctcagacatctaaaaaaataggtgatgatgcaactctatcatgtaatcgaaataatacaaatgactacgttgttatgagtgcttggtataaggagcccaattccattattcttttagctgctaaaagcgacgtcttgtattttgataattataccaaggataaaatatcttacgactctccatacgatgatctagttacaactatcacaattaaatcattgactgctagagatgccggtacttatgtatgtgcattctttatgacatcaactacaaatgacactgataaagtagattatgaagaatactccacagagttgattgtaaatacagatagtgaatcgactatagacataatactatctggatctacacattcaccggaaactagttctgagaaacctgattatatagataattctaattgctcgtcggtattcgaaatctaagctcttttttttttttttttttttggcatataaataagtcgaccaccatggtgggtgaggatagcgtgctgatcaccgagaacatgcacatgaaactgtacatggagggcaccgtgaacgaccaccacttcaagtgcacatccgagggcgaaggcaagccctacgagggcacccagaccatgaagatcaaggtggtcgagggcggccctctccccttcgccttcgacatcctggctaccagcttcatgtacggcagcaaaacctttatcaaccacacccagggcatccccgacttctttaagcagtccttccctgagggcttcacatgggagaggatcaccacatacgaagacgggggcgtgctgaccgctacccaggacaccagcctccagaacggctgcctcatctacaacgtcaagatcaacggggtgaacttcccatccaacggccctgtgatgcagaagaaaacactcggctgggaggccagcaccgagatgctgtaccccgctgacagcggcctgagaggccatagccagatggccctgaagctcgtgggcgggggctacctgcactgctccctcaagaccacatacagatccaagaaacccgctaagaacctcaagatgcccggcttctacttcgtggacaggagactggaaagaatcaaggaggccgacaaagagacctacgtcgagcagcacgagatggctgtggccaggtactgcgacctgcctagcaaactggggcacagctgattaattaatttttatcgatctaattcaacaatgtctggagagcttcgcaggatcccgactccggaaccaattactgataaagaagatcatacagttacagacactgtctcatacactacagtaagtacatcatctggaattgtcactactaaatcaaccaccgatgatgcggatctttatgatacgtacaatgataatgatacagtaccaccaactactgtaggcggtagtacaacctctattagcaattataaaaccaaggactttgtagaaatatttggtattaccgcattaattatattgtcggccgtggcaattttctgtattacatattatatatataataaacgttcacgtaaatacaaaacagagaacaaagtctagatttttgacttacataaatgtctgggatagtaaaatctatcatattgagcggaccatctggtttaggaaagacagccatagccaaaagactatgggaatatatttggatttgtggtgtcccataccactagatttcctcgtcctatggaacgagaaggtgttgattaccattacgttaacagagaggccatctggaagggaatagccgccggaaactttctagaacatactgagtttttaggaaatatttacggaacttctaaaacagctgtgaatacagcggctattaataatcgtatttgtgtgatggatctaaacatcgacggtgttagaagtcttaaaaatacgtacctaatgccttactcggtgtatataagacctacctctcttaaaatggttgagaccaagcttcgtcgtagaaacactgaagctaacgatgagattcatcgtcgtgtgatgttggcaaaaactgacatggatgaggcaggtgaagccggtctattcgacactattatcattgaagatgatgtgaatttagcatatagtaagttaattcagatactacaggaccgtattagaatgtattttaacactaattagagacttaagacttaaaacttgataattaataatataactcgtttttatatgtgtctatttcaacgtctaatgtattagttaaatattaaaacttaccacgtaaaacttaaaatttaaaatgatatttcattgacagatagatcacacattatgaactttcaaggacttgtgttaactgacaattgcaaaaatcaatgggtcgttggaccattaataggaaaaggtggattcggtagtatttatactactaatgacaataattatgtagtaaaaatagagcccaaagctaacggatcattatttaccgaacaggcattttatactagagtacttaaaccatccgttatcgaagaatggaaaaaatctcacaatataaagcacgtaggtcttatcacgtgcaaggcatttggtctatacaaatccattaatgtggaatatcgattcttggtaattaatagattaggtgcagatctagatgcggtgatcagagccaataataatagactaccaaaaaggtcggtgatgttgatcggaatcgaaatcttaaataccatacaatttatgcacgagcaaggatattctcacggagatattaaagcgagtaatatagtcttagatcaaatagataagaataaattatatctagtggattacggattggtttctaaattcatgtctaatggcgaacatgttccatttataagaaatccaaataaaatggataacggtactctagaatttacacctatagattcgcataaaggatacgttgtatctagacgtggagatctagaaacacttggatattgtatgattagatggttgggaggtatcttaccatggactaagatatctgaaacaaagaattgtgcattagtaagtgccacaaaacagaaatatgttaacaatactgcgactttgttaatgaccagtttgcaatatgcacctagagaattgctgcaatatattaccatggtaaactctttgacatattttgaggaacccaattacgacaagtttcggcacatattaatgcagggtgtatattattaagtgtggtgtttggtcgataaaaattaaaaaataacttaatttattattgatctcgtgtgtacaaccgaaatcatggcgatgttttacgcacacgctctcggtgggtacgacgagaatcttcatgcctttcctggaatatcatcgactgttgccaatgatgtcaggaaatattctgttgtgtcagtttataataacaagtatgacattgtaaaagacaaatatatgtggtgttacagtcaggtgaacaagagatatattggagcactgctgcctatgtttgagtgcaatgaatatctacaaattggaaatccgatccatgatcaagaaggaaatcaaatctctatcatcacatatcgccacaaaaactactatgctctaagcggaatcgggtacgagagtctagacttgtgtttggaaggagtagggattcatcatcacgtacttgaaacaggaaacgctgtatatggaaaagttcaacatgattattctactatcaaagagaaggccaaagaaatgagtgcacttagtccaggacctatcatcgattaccacgtctggataggagattgtatctgtcaagttactgctgtggacgtacatggaaaggaaattatgaaaatgagattcaaaaagggtgcggtgcttccgatcccaaatctggtaaaagttaaacttggggagaatgatacagaaaatctttcttctactatatcggcggcaccatcgaggtaaccacctctctggaagacagcgtgaatcatgtactcatgaaacgtttggaaactatacgccatatgtggtctgttgtatatgatcattttgatattgtgaatggtaaagaatgctgttatgtgcatacgcattcatctaatcaaaatcctataccgagtactgtaaaaacaaatttgtacatgaagactatgggatcatgcattcaaatggattccatggaagctctagagtatcttagcgaactgaaggaatcaggtggatggagtcccagaccagaaatgcaggaatttgaatatccagatggagtggaagacactgaatcaattgagagattggcagaggagttcttcaatagatcagaacttcaggctggtgaatcagtcaaatttggtaattctattaattgttaaacatacatctgtttcagctaagcaactaagaacacgtatacggcagcagcttccttctatactctcatcttttaccaacacaaagggtggatatttgttcattggagttgataataatacacacaaagtatttggattcacggtgggttacgactacctcagactgatagagaatgatatagaaaagcatatcaaaagacttcgtgttgtgcatttctgtgagaagaaagaggacatcaagtacgcgtgtcgattcatcaaggtatataaacctggggatgagactacctcgacatacgtgtgcgctatcaaagtggaaagatgctgttgtgctgtgtttgcagattggccagaatcatggtatatggatactaatggtatcaagaagtattctccagatgaatgggtgtcacatataaaattttaattaatgtaactatagagaacaaataataaggttgtaatatcatatagacaataactaacaattaattagtaactgttatctcttttttaactaaccaactaactatatacctattaatacatcgtaattatagttcttaacatctattaatcattaattcgcttctttaattttttataaactaacattgttaattgaaaagggataacatgttacagaatataaattatatatggatttttttaaaaaggaaatacttgactggagtatatatttatctcttcattatatagcacgcgtgttttccaatttttccacatcccatataatacaggattataatctcgttcgaacatacgagaaagtggataaaacaatagttgattttttatctaggttgccaaatttattccatattttagaatatggggaaaatattctacatatttattctatggatgatgctaatacgaatattataattttttttctagatagagtattaaatattaataagaacgggtcatttatacacaatctcgggttatcatcatccattaatataaaagaatatgtatatcaattagttaataatgatcatccagataataggataagactaatgcttgaaaatggacgtagaacaagacattttttgtcctatatatcagatacagttaatatctatatatgtattttaataaatcatggattttatatagatgccgaagacagttacggttgtacattattacatagatgtatatatcactataagaaatcagaatcagaatcatacaatgaattaattaagatattgttaaataatggatcagatgtagataaaaaagatacgtacggaaacacaccttttatcctattatgtaaacacgatatcaacaacgtggaattgtttgagatatgtttagagaatgctaatatagactctgtagactttaatagatatacacctcttcattatgtctcatgtcgtaataaatatgattttgtaaagttattaatttctaaaggagcaaatgttaatgcgcgtaataaattcggaactactccattttattgtggaattatacacggtatctcgcttataaaactatatttggaatcagacacagagttagaaatagataatgaacatatagttcgtcatttaataatttttgatgctgttgaatctttagattatctattatccagaggagttattgatattaactatcgtactatatacaacgaaacatctatttacgacgctgtcagttataatgcgtataatacgttggtctatctattaaacaaaaatggtgattttgagacgattactactagtggatgtacatgtatttcggaagcagtcgcaaacaacaacaaaataataatggaagtactattgtctaaacgaccatctttgaaaattatgatacagtctatgatagcaattactaaacataaacagcataatgcagatttattgaaaatgtgtataaaatatactgcgtgtatgaccgattatgatactcttatagatgtacagtcgctacagcaatataaatggtatattttaagatgtttcgatgaaatagatatcatgaagagatgttatataaaaaataaaactgtattccaattagttttttgtatcaaagacattaatactttaatgagatacggtaaacatccttctttcgtgaaatgcactagtctcgacgtatacggaagtcgtgtacgtaatatcatagcatctattagatatcgtcagagattaattagtctattatccaagaagctggatcctggagataaatggtcgtgttttcctaacgaaataaaatataaaatattggaaaactttaacgataacgaactatccacatatctaaaaatcttataaacattattaaaatataaaatctaagtaggataaaatcacactacatcattgtttccttttagtgctcgacagtgtatactatttttaacgctcataaataaaaatgaaaacgatttccgttgttacgttgttatgcgtactacctgctgttgtttattcaacatgtactgtacccactatgaataacgctaaattaacgtctaccgaaacatcgtttaatgataaccagaaagttacgtttacatgtgatcagggatatcattctttggatccaaatgctgtctgtgaaacagataaatggaaatacgaaaatccatgcaaaaaaatgtgcacagtttctgattatgtctctgaactatataataaaccgctatacgaagtgaattccaccatgacactaagttgcaacggcgaaacaaaatattttcgttgcgaagaaaaaaatggaaatacttcttggaatgatactgttacgtgtcctaatgcggaatgtcaacctcttcaattagaacacggatcgtgtcaaccagttaaagaaaaatactcatttggggaatatatgactatcaactgtgatgttggatatgaggttattggtgcttcgtacataagttgtacagctaattcttggaatgttattccatcatgtcaacaaaaatgtgatatgccgtctctatctaacggattaatttccggatctacattttctatcggtggcgttatacatcttagttgtaaaagtggttttacactaacggggtctccatcatccacatgtatcgacggtaaatggaatcccatactcccaatatgtgtacgaactaacgaaaaatttgatccagtggatgatggtcccgacgatgagacagatttgagcaaactctcgaaagacgttgtacaatatgaacaagaaatagaatcgttagaagcaacttatcatataatcatagtggcgttgacaattatgggcgtcatatttttaatctccgttatagtattagtttgttcctgtgacaaaaataatgaccaatataagttccataaattgctaccgtaaatataaatccgttaaaataattaataatttaataacaaacaagtatcaaaagattaaagacttatagctagaatcaattgagatgtcttcttcagtggatgttgatatctacgatgccgttagagcatttttactcaggcactattataacaagagatttattgtgtatggaagaagtaacgccatattacataatatatacaggctatttacaagatgcgccgttataccgttcgatgatatagtacgtactatgccaaatgaatcacgtgttaaacaatgggtgatggatacacttaatggtataatgatgaatgaacgcgatgtttctgtaagcgttggcaccggaatactattcatggaaatgtttttcgattacaataaaaatagtatcaacaatcaactaatgtatgatataattaatagcgtatctataattctagctaatgagagatatagaagcgcttttaacgacgatggtatatacatccgtagaaatatgattaacaagttgtacggatacgcatctctaactactattggcacgatcgctggaggtgtttgttattatctgttgatgcatctagttagtttgtataaataattatttcaatatactagttaaaattttaagattttaaatgtataaaaaactaataacgtttttatttgtaataggtgcattagcatcctattcgaataatgagtacactccgtttaataaactgagtgtaaaactctatatagatggagtagataatatagaaaattcatatactgatgataataatgaattggtgttaaattttaaagagtacacaatttctattattacagagtcatgcgacgtcggatttgattccatagatatagatgttataaacgactataaaattattgatatgtataccattgactcgtctactattcaacgcagaggtcacacgtgtagaatatctaccaaattatcatgccattatgataagtacccttatattcacaaatatgatggtgatgagcgacaatattctattactgcagagggaaaatgctataaaggaataaaatatgaaataagtatgatcaacgatgatactctattgagaaaacatactcttaaaattggatctacttatatatttgatcgtcatggacatagtaatacatattattcaaaatatgatttttaaaaatttaaaatatattatcacttcagtgacagtagtcaaataacaaacaacaccatgagatatattataattctcgcagttttgttcattaatagtatacatgctaaaataactagttataagtttgaatccgtcaattttgattccaaaattgaatggactggggatggtctatacaatatatcccttaaaaattatggcatcaagacgtggcaaacaatgtatacaaatgtaccagaaggaacatacgacatatccgcatttccaaagaatgatttcgtatctttctgggttaaatttgaacaaggcgattataaagtggaagagtattgtacgggactatgcgtcgaagtaaaaattggaccaccgactgtaacattgactgaatacgacgaccatatcaatttgtacatcgagcatccgtatgctactagaggtagcaaaaagattcctatttacaaacgcggtgacatgtgtgatatctacttgttgtatacggctaacttcacattcggagattctaaagaaccagtaccatatgatatcgatgactacgattgcacgtctacaggttgcagcatagactttgtcacaacagaaaaagtgtgcgtgacagcacagggagccacagaagggtttctcgaaaaaattactccatggagttcgaaagtatgtctgacacctaaaaagagtgtatatacatgcgcaattagatccaaagaagatgttcccaatttcaaggacaaaatggccagagttatcaagagaaaatttaatacacagtctcaatcttatttaactaaatttctcggtagcacatcaaatgatgttaccacttttcttagcatgcttaacttgactaaatattcataactaatttttattaatgatacaaaaacgaaataaaactgcatattatacactggttaacgcccttataggctctaaccattttcaagatgaggtccctgattatagtccttctgttcccctctatcatctactccatgtctattagacgatgtgagaagactgaagaggaaacatggggattgaaaatagggttgtgtataattgccaaagatttctatcccgaaagaactgattgcagtgttcatctcccaactgcaagtgaaggattgataactgaaggcaatggattcagggatatacgaaacaccgataaattataaaaaaagcaatgtgtccgctgtttccgttaataatactattttcgtaactggcggattattcataaataactctaatagcacgatcgtggttaacaatatggaaaaacttgacatttataaagacaaacaatggtcgattatagaaatgcctatggctagggtatatcacggcattgactcgacatttggaatgttatattttgccggaggtctatccgttaccgaacaatatggtaatttagagaaaaacaacgagatatcttgttacaatcctagaacgaataagtggtttgatatttcatatactatttataagatatccatatcatcattgtgtaaactaaataacgtcttctatgtatttagtaaggacattggatatgtggaaaagtatgatggtgcatggaagttagtacatgatcgtctccccgctataaaggcattatcaacttctccttattgattgaaaatgaaaatataaatagtttttatgtatagcagtattaccctatagttttattgcttactactaacatggatacagatgttacaaatgtagaagatatcataaatgaaatagatagagagaaagaagaaatactaaaaaatgtagaaattgaaaataataaaaacattaacaagaatcatcccaatgaatatattagagaagcactcgttattaataccagtagtaatagtgattccattgataaagaagttatagaatgtatcagtcacgatgtaggaatatagatcatatctactaatttttataatcgatacaaaacataaaaaacaactcgttattacatagcaggcatggaatccttcaagtattgttttgataacgatggcaagaaatggattatcggaaatactttatattctggtaattcaatactctataaggtcagaaaaaatttcactagttcgttctacaattacgtaatgaagatagatcacaaatcacacaagccattgttgtctgaaatacgattctatatatctgtattggatcctttgactatcgacaactggacacgggaacgtggtataaagtatttggctattccagatctgtatggaattggagaaaccgatgattatatgttcttcgttataaagaattcgggaagagtattcgccccaaaggatactgaatcagtcttcgaagcatgcgtcactatgataaacacgttagagtttatacactctcgaggatttacccatggaaaaatagaaccgaggaatatactgattagaaataaacgtctttcactaattgactattctagaactaacaaactatacaagagtggaaactcacatatagattacaacgaggacatgataacttcaggaaatatcaattatatgtgtgtagacaatcatcttggagcaacagtttcaagacgaggagatttagaaatgttgggatattgcatgatagaatggttcggtggcaaacttccatggaaaaacgaaagtagtataaaagtaataaaacaaaaaaaagaatataaaaaatttatagctactttctttgaggactgttttcctgaaggaaatgaacctctggaattagttagatatatagaattagtatacacgttagattattctcaaactcctaattatgacagactacgtaaactgtttatacaagattgaaattatattcttttttttatagagtgtggtagtgttacggatatctaatattaatattagactatctctatcgcgctacacgaccaatatcgattactatggatatcttctatgaaaggagagaatgtatttatttctccagcgtcaatctcgtcagtattgacaatactgtattatggagctaatggatccactgctgaacagctatcaaaatatgtagaaacggaggagaacacggataaggttagcgctcagaatatctcattcaaatccatgaataaagtatatgggcgatattctgccgtgtttaaagattcctttttgagaaaaattggcgataagtttcaaactgttgacttcactgattgtcgcactatagatgcaatcaacaagtgtgtagatatctttactgaggggaaaatcaatccactattggatgaaccattgtctcctagcaattagtgccgtatactttaaagcaaaatggttgacgccattcgaaaaggaatttaccagtgattatcccttttacgtatctccgacggaaatggtagacgtaagtatgatgtctatgtacggcaaggcatttaatcacgcatctgtaaaagaatcattcggcaacttttcaatcatagaactgccatatgttggagatactagtatgatggtcattcttccagacaagattgatggattagaatccatagaacaaaatctaacagatacaaattttaagaaatggtgtgactttatggatgctatgtttatagatgttcacattcccaagtttaaggtaacaggctcgtataatctggtggatactctagtaaagtcaggactgacagaggtgttcggttcaactggagattatagcaatatgtgtaatttagatgtgagtgtcgacgctatgatccacaaaacgtatatagatgtcaatgaagagtatacagaagcagctgcagcaacttctgtactagtggcagactgtgcatcaacaattacaaatgagttctgtgcagatcatccgttcatctatgtgattaggcatgttgatggaaaaattcttttcgttggtagatattgctctccgacaactaattgttaaccattttttttaaaaaaaatagaaaaaacatgtggtattagtgcaggtcgttgttcttccaattgcaattggtaagatgacggccaactttagtacccacgtcttttcaccacagcactgtggatgtgacagactgaccagtattgatgacgtcaaacaatgtttgactgaatatatttattggtcgtcctatgcataccgcaacaggcaatgcgctggacaattgtattccacactcctctcttttagagatgatgcggaattagtgttcatcgacattcgcgagctggtaaaaaatatgccgtgggatgatgtcaaagattgtacagaaatcatccgttgttatataccggatgagcaaaaaaccatcagagagatttcggccatcatcggactttgtgcatatgctgctacttactggggaggtgaagaccatcccactagtaacagtctgaacgcattgtttgtgatgcttgagatgctaaattacgtggattataacatcatattccggcgtatgaattgatgagttgtacatcttgacattttctttcttctcttctccctttcttctcttctcccttcctccctcttctccctttcccagaaacaaacttttttacccactataaaataaaatgagtatactacctattatatttcttcctatatttttttattcttcattcgttcagacttttaacgcgtctgaatgtatcgacaaagggcaatattttgcatcattcatggagttagaaaacgagccagtaatcttaccatgtcctcaaataaatacgctatcatccggatataatatattagatattttatgggaaaaacgaggagcggataatgatagaattataccgatagataatggtagcaatatgctaattctgaacccgacacaatcagactctggtatttatatatgcattaccacgaacgaaacctactgtgacatgatgtcgttaaatttgacaatcgtgtctgtctcagaatcaaatatagatcttatctcgtatccacaaatagtaaatgagagatctactggcgaaatggtatgtcccaatattaatgcatttattgctagtaacgtaaacgcagatattatatggagcggacatcgacgccttagaaataagagacttaaacaacggacacctggaattattaccatagaagatgttagaaaaaatgatgctggttattatacatgtgttttagaatatatatacggtggcaaaacatataacgtaaccagaattgtaaaattagaggtacgggatagaataataccttctactatgcaattaccagatggcattgtaacttcaataggtagtaatttgactattgcatgcagagtatcgttgagacctcccacaacggacaccgacgtcttttggataagtaatggtatgtattacgaagaagatgatggggacggaaacggtagaataagtgtagcaaataaaatctatatgaccgataagagacgtgttattacatcccggttaaacattaatcctgtcaaggaagaagatgctacaacgtttacgtgtatggcgtttactattcctagcatcagcaaaacagttactgttagtataacgtgaatgtatgttgttacatttccatgtcaattgagtttataagaatttttatacattatcttccaacaaacaattgacgaacgtattgctatgattaactcccacgatactatgcatattattaatcattaacttgcagactatacctagtgctattttgacatactcgtgttcttgtgtaattgcggtatctatattattaaagtacgtaaatctagctatagttttattatttaattttagataatataccgtctccttatttttaaaaattgccacatcctttattaaatcatgaatgggaatttctatgtcatcgttagtatattgtgaacaacaagagcagatatctataggaaagggtggaatgcgatacattgatctatgtagttttaaaacacacgcgaactttgaagaatttatataaatcattccatcgatacatccttctatgttgacatgtatatatccaggaattcttttattaatgtcaggaaatgtataaactaaaacattgcccgaaagcggtgcctctatctgcgttatatccgttcttaacttacaaaatgtaaccaatacctttgcatgacttgttttgttcggcaacgttagtttaaacttgacgaatggattaattacaatagcatgatccgcgcatctattaagtttttttactttaacgcccttgtatgtttttacagagactttatctaaatttctagtgcttgtatgtgttataaatataacgggatatagaaccgaatcacctaccttagatacccaattacattttatcagatccagataataaacaaattttgtcgccctaactaattctatattgttatatattttacaattggttatgatatcatgtaataacttggagtctaacgcgcatcgtcgtacgtttatacaattgtgatttagtgtagtatatctacacatgtatttttccgcactatagtattctggactagtgataaaactatcgttatatctgtcttcaatgaactcatcgagatattgctctctgtcatattcatacacctgcataaactttctagacatcttacaatccgtgttattttaggatcatatttacatatttacgggtatatcaaagatgttagattagttaatgggaatcgtctataataatgaatattaaacaattatatgaggacttttaccacaaagcatcataaaaatgagtcgtcgtctgatttatgttttaaatatcaaccgcaaatcaactcataaaatacaagagaatgaaatatatacatattttagtcattgcaatatagaccatacttctacagaacttgattttgtagttaaaaactatgatctaaacagacgacaacctgtaactgggtatactgcactacactgctatttgtataataattactttacaaacgatgtactgaagatattattaaatcatgacgtaaatgtaacgatgaaaaccagtagcggacgtatgcctgtttatatattgcttactagatgttgtaatatttcacatgatgtagtgatagatatgatagacaaagataaaaaccacttattacatagagactattccaacctattactagagtatataaaatctcgttacatgttattgaaggaagaggatatcgatgagaacatagtatccactttattagataagggaatcgatcctaactttaaacaagacggatatacagcgttacattattattatttgtgtctcgcacacgtttataaactaggtgagtgtagaaaaccgataacgataaaaaaggccaagcgaattatttctttgtttatacaacatggagctaatctaaacgcgttagataattgtggtaatacaccattccatttgtatcttagtattgaaatgtgtaataatattcatatgactaaaatgctgttgacttttaatccgaatttcaaaatatgtaataatcatggattaacgcctatactatgttatataacttccgactacatacaacacgatattcttgttatgttaatacatcactatgaaacaaatgttggagaaatgccgatagatgagcgtcgtatgatcgtattcgagtttatcaaaacatattctacacgtccggcagattcgataacttatttgatgaataggtttaaaaatataaatatttatacccgctatgaaggaaagacattattacacgtagcatgtgaatataataatacacaagtaatagattatcttatacgtatcaacggagatataaatgcgttaaccgacaataacaaacacgctacacaactcattatagataacaaagaaaattccccatataccattaattgtttactgtatatacttagatatattgtagataagaatgtgataagatcgttggtggatcaacttccatctctacctatcttcgatataaaatcatttgagaaattcatatcctactgtatacttttagatgacacattttacgataggcacgttaagaatcgcgattctaaaacgtatcgatacgcattttcaaaatacatgtcgtttgataaatacgatggtataataactaaatgtcacgacgaaacaatgttactcaaactgtccactgttctagacactacactatatgcagttttaagatgtcataattcgagaaagttaagaagatacctcaacgagttaaaaaaatataataacgataagtcctttaaaatatattctaatattatgaatgagagataccttaatgtatattataaagatatgtacgtgtcaaaggtatatgataaactatttcctgttttcacagataaaaattgtctactaacattactaccttcagaaattatatacgaaatattatacatgctgacaattaacgatctttataatatatcgtatccacctaccaaagtatagttgtatttttctcatgcgatgtgtgtaaaaaaactgatattatataaatattttagtgccgtataataaagatgacgatgaaaatgatggtacatatatatttcgtatcattattgttattgctattccacagttacgccatagacatcgaaaatgaaatcacagaattcttcaataaaatgagagatactctaccagctaaagactctaaatggttgaatccagcatgtatgttcggaggcacaatgaatgatatagccgctctaggagagccattcagcgcaaagtgtcctcctattgaagacagtcttttatcgcacagatataaagactatgtggttaaatgggagaggctagaaaagaatagacggcgacaggtttctaataaacgtgttaaacatggtgatttatggatagccaactatacatctaaattcagtaaccgtaggtatttgtgcaccgtaactacaaagaatggtgactgtgttcagggtatagttagatctcatattaaaaaacctccttcatgcattccaaaaacatatgaactaggtactcatgataagtatggcatagacttatactgtggaattctttacgcaaaacattataataatataacttggtataaagataataaggaaattaatatcgacgacattaagtattcacaaacgggaaaggaattaattattcataatccagagttagaagatagcggaagatacgactgttacgttcattacgacgacgttagaatcaagaatgatatcgtagtatcaagatgtaaaatacttacggttataccgtcacaagaccacaggtttaaactaatactagatccgaaaatcaacgtaacgataggagaacctgccaatataacatgcactgctgtgtcaacgtcattattgatcgacgatgtactgattgaatgggaaaatccatccggatggcttataggattcgattttgatgtatactctgttttaactagtagaggcggtatcaccgaggcgaccttgtactttgaaaatgttactgaagaatatataggtaatacatataaatgtcgtggacacaactattattttgaaaaaacccttacaactacagtagtattggagtaaatatacaatgcatttttatatacattactgaattattattactgaattattattactgaattattattaattatatcgtatttgtgctatagaatggatgaagatacgcgactatctaggtatttgtatctcaccgatagagaacatataaatgtagactctattaaacagttgtgtaaaatatcagatcctaatgcatgttatagatgtggatgtacggctttacatgagtacttttataattatagatcagtcaacggaaaatacaagtatagatacaacggttactatcaatattattcatctagcgattatgaaaattataatgaatattattatgatagaactggtatgaacagtgagagtgataatatatcaatcaaaacagaatatgaattctatgatgaaacacaagatcaaagtacacaactagtaggttacgacattaaactcaaaaccaatgaggatgattttatggctatgatagatcagtgggtgtccatgattatatagatgaatcaattaataaagtagtatatggaagagagtctcacgtaagatggcgggatatatggcaagaacataatgatggcgtatacagtataggaaaggagtgcatagataatatatacgaagacaaccataccgtagacgaattctacaagatagacagcgtatcagatgtagatgacgcggaacacatatctccgataactaaaaaaccatagaatcagttgatgataatacctacatttctaatcttccgtataccatcaaatacaaaatattcgagcaacaataagtattttttatacctttaaaactgataaataaattttttctagtgatattttggcaagatgagaatcctatttctcatcgctttcatgtatgggtgtgttcactcatatgttaacgcggttgaaaccaaatgtccaaatctagacattgtaacatcttctggagaatttcattgttcaggatgtgtggaacatatgcctgagtttagctatatgtattggttggcaaaggatatgaaatcggacgaggataccaagtttatagaacatctgggtgatggcatcaaagaagatgaaaccgttcgtaccacagatagtggaatcgtcactctacgtaaagtccttcatgtgactgatactaataaatttgataattataggttcacttgtgtcctcgctacgctagatggcatttataaaaagaatgtttgctgaagtagttgtgtgctactatttttatttatgatataatctaatggaattaatttgaattgatatttatccaatactaaagattatattagaatcaaattaatcttttatacgagaaaaaataacgacatacgtcgtcaacaaattaaactttttatttattagttaactagcttatagaacttgctcattgttatgtttctaaaacgggtacggcatataggacaattatccgacgcaccggtttctcttcgtgttctatgccatatattgatgcatgttatgcaaaatatatgagtacacgaatccaataaaccaaagtatctatcgttttgagtaaacaacttcatagcaaattccacattctttttctttacttactctatacacgtcctcgtatttatttagtattttgatgatatccaactcagaaatggttgttgtattattgggtgtatttggagtataggtattattagctatgtaccaatttaccaaccctcttaatattgattgataatcacatcggttatccaattaataactaaattgtagtgtatatatagaccatatatgtttctatttttttgacagttacgtatagtttcagtaagttttgattgttgtattcctgtatctctagataagttagtcatatagtcccttccggcgatacgttttttccaagcccgaaattgattagccaaatgtgtatttatttttgtgatattgatataatatttcggataatgcatactgttagtcttatatcatttggttcatctatgtattgtaatattgttacatgatctatagatgatgtattgattttggcaggatcgaattccatatccgcgactaaacagtgaaaaaaatgtaaatactttttaaattttaaattagtaaaacttttttttattttttatgattccaaaaatactgaatacaaagtcctaaattataaatatggagatcatactaccacaacttattattatgtatacaaggccggtgtaatagatagatatatataattctattacaccggcagacaattaccgaccggtatttgtcgttaccaacataccgtataatatgtaatatacaattccataacccattgacagttgttatacatcaaaattgcaattcttttgattacgatgttataagaatgtagttaattgatgtatgatgttaatgtgtcctctttcctcttataacatcgtaatcaaaaacttttttataatatatacctaataatgtgtcttaatagttctcgtgattcgtcaaacaatcattcttataaaatataataaagcaacgtaaaaacacataaaaataagcgtaactaataagacaatggatatttacgacgataaaggtctacagactattaaactgtttaataatgaatttgattgtataaggaatgacatcagagaattatttaaacatgtaactgattccgatagtatacaacttccgatggaagacaattctgatattatagaaaatatcagaaaaatactatatagacgattaaaaaatgtagaatgtgttgacatcgataacacaataacttttatgaaatacgatccaaatgatgataataagcgtacgtgttctaattgggtacccttaactaataactatatggaatattgtctagtaatatatttggaaacaccgatatgtggaggcaaaataaaattataccaccctacaggaaatataaagtcggataaggatattatgtttgcaaagactctagactttaaatcaacgaaagtgttaactggacgtaaaacaattgccgttctagacatatccgtttcatataatagatcaatgactactattcactacaacgacgacgttgatatagatatacatactgataaaaatggaaaagagttatgttattgttatataacaatagatgatcattacttggttgatgtggaaactataggagttatagtcaatagatctggaaaatgtctgttagtaaataaccatctaggtataggtatcgttaaagataaacgtataagcgatagttttggagatgtatgtatggatacaatatttgacttttctgaagcacgagagttattttcattaactaatgatgataacaggaatatagcatgggacactgataaactagacgatgatacagatatatggactcccgtcacagaagatgattacaaatttctttctagactagtattgtatgcaaaatctcaatcggatactgtatttgactattatgttcttactggtgatacggaaccacccactgtattcattttcaaggtaactagattttactttaatatgccgaaataaaaaatttttgtataatatctagaggtagaggtattgtttagataaatacaaataacatagatacatcgcatacttagcatttttataaatatacataagacatacactttatacatttttgtaaaaatactcataaaaaaatttataaaaattatggcacaaccatatcttgtataggtagtttagttcgtcgagtgaacctataaacagataatagacaacacataataatgcctactaatacaagcataataccgggagatgggatatatgacgttgtagtgtttgggttttctgaacgttgatagtctactaatactacatgctgacatctaatgcctgtataaccatgagagcatctacaatacataccgtcaatatctctagcgtggatacagtcaccgtgtaaacaatatccatctccctctggaccgcataatctgatagctggaatatctgttgtagcgtttgtaatttctggcaatgtcgtttcgatagcgttaccactatcggcgaatgatctgattatcatagcagcgaacaacaacatcagataatttatcaacatttttgatggattctgtgtttatgctgtttctcagtgtgtgtttatgacaagattgggaattttatattattaattcagtaatataaactaataatatattgttaattgtgtaaataatataaaaataacaatacaatattgaatgtgttgctgttaaaaatgtatgtgttaatataatagaataaaataaatgagtatgatcattttagataacgattgattttatcattaccgcttcattcttatattctttgcttacggaacctatatttagaaacatctactaacaattttttatgcttgcattattaatggtatgtaatatgattgattgtgtacgcaataccaatttgttaagtatgaatacggggtacaaacataaattgaaatttaacattatttatttatgatatatatcgttatcgttaggtctataccatggatatctttaaagaactaatcttaaaacaccctgatgaaaatgttttgatttctccagtttccattttatctactttatctattctaaatcatggagcagctggttctacagctgaacaactatcaaaatatatagagaatatgaatgagaatacacccgatgacaataatgatgacatggaggtagatattccgtattgtgcgacactagctaccgcaaataaaatatacggtagcgatagtatcgagttccacgcctccttcctacaaaaaataaaagacgattttcaaactgtaaactttaataatgctaaccaaacaaaggaactaatcaacgaatgggttaagacaatgacaaatggtaaaattaattccttattgactagtccgctatccattaatactcgtatgacagttgttagcgccgtccattttaaagcaatgtggaaatatccattttctaaacatcttacatatacagacaagttttatatttctaagaatatagttaccagcgttgatatgatggtgggtaccgagaataacttgcaatatgtacatattaatgaattattcggaggattctctattatcgatattccatacgagggaaactctagtatggtaattatactaccggacgacatagaaggtatatataacatagaaaaaaatataacagatgaaaaatttaaaaaatggtgtggtatgttatctactaaaagtatagacttgtatatgccaaagtttaaagtggaaatgacagaaccgtataatctggtaccgattttagaaaatttaggacttactaatatattcggatattatgcagattttagcaagatgtgtaatgaaactatcactgtagaaaaatttctacatacgacgtttatagatgttaatgaggagtatacagaagcatcggccgttacaggagtatttacgattaacttttcgatggtatatcgtacgaaggtctacataaaccatccattcatgtacatgattaaagacaccacaggacgtatactttttatagggaaatactgctatccgcaataaatataaacaaatagacttttataaagagtcttcaacgataagtatatcgacatactacttatgctgcgaaagattctgaacgagaacgactatctcaccctcttggatcatatccgcactgctaaatactaaatctccactacactttttatcatcttatgaggaatgattgccttcgtgaaataggaataattagcaccagaatagctatggattattgtggtagagagtgcactattctatgtcgtctactggatgaagatgtgacgtacaaaaaaataaaactagaaattgaaacgtgtcacaacttatcaaaacatatagatagacgaggaaacaatgcgctacattgttacgtctccaataaatgcgatacagacattaagattgttctctcgcggagtcgagagactttgtagaaacaacgaaggattaactccgctaggagtatacagtaagcatagatacgtaaaatctcagattgtgcatctactgatatccagctattcaaattcctctaacgaactcaagtcgaatataaatgatttcgatctgtattcggataatatcgacttacgtctgctaaaatacctaattgtggataaacggatacgtccgtccaagaatacgaattatgcaatcaatggtctcggattggtggatatatacgtaacgacgcctaatccgagaccagaagtattgctatggcttcttaaatcagaatgttacagcaccggttacgtatttcgtacctgtatgtacgacagtgatatgtgtaagaactctcttcattactatatatcgtctcatagagaatctcaatctctatccaaggatgtaattaaatgtttgatcgataacaatgtttccatccatggcagagacgaaggaggatctttacccatccaatactactggtctttctcaaccatagatatagagattgttaaattattattaataaaggatgtggacacgtgtagagtatacgacgtcagccctatattagaggcgtattatctaaacaagcgatttagagtaaccccatataatgtagacatggaaatcgttaatcttcttattgagagacgtcatactcttgtcgacgtaatgcgtagtattacttcgtacgattccagagaatataaccactacatcatcgataacattctaaagagatttagacaacaggatgaatccatcgtacaagccatactgataaactacttacattacggcgatatggtcgttcgatgcatgttagataacggacaacaactatcctctacacgactactttgttaataataatctcgtcgatgtaaacgtcgtaaggtttatcgtggaaaatatggacacgcggctgtaaatcacgtatcgaacaatggccgtctatgtatgtacggtctgatattatcgagatttaataattgcgggtatcactgttatgaaaccatactgatagatgtatttgatatactaagcaagtacatggatgatatagatatgatcgataactctactatattacgcggtcgatgtcaataatatacaatttgcaaagcggttattggaatatggagcgagtatcacgctcgataatcaatacggccatccagaaaagcagttacagaagagaaaacaaaacgaaatcgttgttctacaagatgtctctccctacgacgattactacgtaaaaaagatactagcctactgcctattaagggacgagtcattcgcggaactacatagtaaattctgtttaaacgaggactataaaagtgtatttatgaaaaatatatcattcgataagatagattccatcatcgtgacataagtcgcctcaaagagattcgaatctccgacaccgacctgtatacggtatcacagctatcttaaagccatacattcagacagtcacatttcatttcccatgtacgacgatctcatagaacagtgccatctatcgatggagcgtaaaagtaaactcgtcgacaaagcactcaataaattagagtctaccatcggtcaatctagactatcgtatttgcctccggaaattatgcgcaatatcatctaaacagtatgttgtacggaaagaaccattacaaatattatccatgatagaaagaaaatatctatatgattggagaagtaggaaacaggaacaagacaacgattactacattattaaatcatgaagtccgtattatactcgtatatattgtttctctcatgtataataataaacggaagagatatagcaccgcatgcaccatccgatggaaagtgtaaagacaacgaatacaaacgccataatttgtgtccgggaacatacgcttccagattatgcgatagcaagactaacacacgatgtacgccgtgtggttcgggtaccttcacatctcgcaataatcatttacccgcttgtctaagttgtaacggaagacgcgatcgtgtaacacgactcacaatagaatctgtgaatgctctcccggatattattgtcttctcaaaggatcatccggatgcaaggcatgtgtttcccaaacaaaatgtggaataggatacggagtatccggagacgtcatctgttctccgtgtggtctcggaacatattctcacaccgtctcttccgcagataaatgcgaacccgtacccagaaatacgtttaactatatcgatgtggaaattaacctgtatccagttaacgacacgtcgtgtactcggacgaccactaccggtctcagcgaatccatctcaacgtcggaactaactattactatgaatcataaagactgtaatcccgtatttcgtgatggatacttctccgttcttaataaggtagcgacttcaggtttctttacaggagaaaggtgtgcactctgaatttcgagattaaatgcaataacaaagattcttcctccaaacagttaacgaaagcaaagaatgatactatcatgccgcattcggagacagtaactctagtgggcgacatctatatactatatagtaataccaatactcaagactacgaaactgatacaatctcttatcatgtgggtaatgttctcgatgtcgatagccatatgcccggtagttgcgatatacataaactgatcactaattccaaacccacccactttttatagtaagtttttcacccataaataataaatacaataattaatttctcgtaaaagtagaaaatatattctaatttattgcacggtaaggaagtagaatcataaagaacagtactcaatcaatagcaattatgaaacaatatatcgtcctggcatgcatgtgcctggcggcagctgctatgcctgccagtcttcagcaatcatcctcatcctcctcctcgtgtacggaagaagaaaacaaacatcatatgggaatcgatgttattatcaaagtcacaaagcaagaccaaacaccgaccaatgataagatttgccaatccgtaacggaaattacagagtccgagtcagatccagatcccgaggtggaatcagaagatgattccacatcagtcgaggatgtagatcctcctaccacttattactccatcatcggtggaggtctgagaatgaactttggattcaccaaatgtcctcagattaaatccatctcagaatccgctgatggaaacacagtgaatgctagattgtccagcgtgtccccaggacaaggtaaggactctcccgcgatcactcatgaagaagctcttgctatgatcaaagactgtgaagtgtctatcgacatcagatgtagcgaagaagagaaagacagcgacatcaagacccatccagtactcgggtctaacatctctcataagaaagtgagttacgaagatatcatcggttcaacgatcgtcgatacaaaatgcgtcaagaatctagagtttagcgttcgtatcggagacatgtgcaaggaatcatctgaacttgaggtcaaggatggattcaagtatgtcgacggatcggcatctgaaggtgcaaccgatgatacttcactcatcgattcaacaaaactcaaagcgtgtgtctgaatcgataactctattcatctgaaattggatgagtagggttaatcgaacgattcaggcacaccacgaattaaaaaagtgtaccggacactatattccggtttgcaaaacaaaaatgttcttaactacattcacaaaaagttacctctcgcgacttcttctttttctgtctcaatagtgtgatacgattatgacactattcctattcctattcctatttcctttcagagtatcacaaaaatattaaacctctttctgatggtctcataaaaaaagttttacaaaaatatttttattctctttctctctttgatggtctcataaaaaaagttttacaaaaatatttttattctctttctctctttgatggtctcataaaaaaagttttacaaaaatatttttattctctttctctctttgatggtctcataaaaaaagttttacaaaaatatttttattctctttctctctttgatggtctcataaaaaaagttttacaaaaatatttttattctctttctctctttgatggtctcataaaaaaagttttacaaaaatatttttattctctttctctctttgatggtctcataaaaaaagttttacaaaaatatttttattctctttctctctttgatggtctcataaaaaaagttttacaaaaatatttttattctctttctctctttgatggtctcataaaaaaagttttacaaaaatatttttattctctttctctctttgatggtctcataaaaaaagttttacaaaaatatttttattctctttctctctttgatggtctcataaaaaaagttttacaaaaatatttttattctctttctctctttgatggtctcataaaaaaagttttacaaaaatatttttattctctttctctctttgatggtctcataaaaaagttttacaaaaatatttttattctctttctctctttgatggtctcataaaaaagttttacaaaaatatttttattctctttctctctttgatggtctcataaaaaaagttttacaaaaatatttttattctctttctctctttgatggtctcataa

SEQ ID NO: 193 - DNA, 199504 bp, Artificial Sequence
  GLV-1h253
ttatgagaccatcaaagagagaaagagaataaaaatatttttgtaaaactttttttatgagaccatcaaagagagaaagagaataaaaatatttttgtaaaacttttttatgagaccatcaaagagagaaagagaataaaaatatttttgtaaaacttttttatgagaccatcaaagagagaaagagaataaaaatatttttgtaaaactttttttatgagaccatcaaagagagaaagagaataaaaatatttttgtaaaactttttttatgagaccatcaaagagagaaagagaataaaaatatttttgtaaaactttttttatgagaccatcaaagagagaaagagaataaaaatatttttgtaaaactttttttatgagaccatcaaagagagaaagagaataaaaatatttttgtaaaactttttttatgagaccatcaaagagagaaagagaataaaaatatttttgtaaaactttttttatgagaccatcaaagagagaaagagaataaaaatatttttgtaaaactttttttatgagaccatcaaagagagaaagagaataaaaatatttttgtaaaactttttttatgagaccatcaaagagagaaagagaataaaaatatttttgtaaaactttttttatgagaccatcaaagagagaaagagaataaaaatatttttgtaaaactttttttatgagaccatcaaagagagaaagagaataaaaatatttttgtaaaactttttttatgagaccatcaaagagagaaagagaataaaaatatttttgtaaaactttttttatgagaccatcagaaagaggtttaatatttttgtgatactctgaaaggaaataggaataggaataggaatagtgtcataatcgtatcacactattgagacagaaaaagaagaagtcgcgagaggtaactttttgtgaatgtagttaagaacatttttgttttgcaaaccggaatatagtgtccggtacacttttttaattcgtggtgtgcctgaatcgttcgattaaccctactcatccaatttcagatgaatagagttatcgattcagacacacgctttgagttttgttgaatcgatgagtgaagtatcatcggttgcaccttcagatgccgatccgtcgacatacttgaatccatccttgacctcaagttcagatgattccttgcacatgtctccgatacgaacgctaaactctagattcttgacgcattttgtatcgacgatcgttgaaccgatgatatcttcgtaactcactttcttatgagagatgttagacccgagtactggatgggtcttgatgtcgctgtctttctcttcttcgctacatctgatgtcgatagacacttcacagtctttgatcatagcaagagcttcttcatgagtgatcgcgggagagtccttaccttgtcctggggacacgctggacaatctagcattcactgtgtttccatcagcggattctgagatggatttaatctgaggacatttggtgaatccaaagttcattctcagacctccaccgatgatggagtaataagtggtaggaggatctacatcctcgactgatgtggaatcatcttctgattccacctcgggatctggatctgactcggactctgtaatttccgttacggattggcaaatcttatcattggtcggtgtttggtcttgctttgtgactttgataataacatcgattcccatatgatgtttgttttcttcttccgtacacgaggaggaggatgaggatgattgctgaagactggcaggcatagcagctgccgccaggcacatgcatgccaggacgatatattgtttcataattgctattgattgagtactgttctttatgattctacttccttaccgtgcaataaattagaatatattttctacttttacgagaaattaattattgtatttattatttatgggtgaaaaacttactataaaaagtgggtgggtttggaattagtgatcagtttatgtatatcgcaactaccgggcatatggctatcgacatcgagaacattacccacatgataagagattgtatcagtttcgtagtcttgagtattggtattactatatagtatatagatgtcgcccactagagttactgtctccgaatgcggcatgatagtatcattctttgctttcgttaactgtttggaggaagaatctttgttattgcatttaatctcgaaattcagagtgcacacctttctcctgtaaagaaacctgaagtcgctaccttattaagaacggagaagtatccatcacgaaatacgggattacagtctttatgattcatagtaatagttagttccgacgttgagatggattcgctgagaccggtagtggtcgtccgagtacacgacgtgtcgttaactggatacaggttaatttccacatcgatatagttaaacgtatttctgggtacgggttcgcatttatctgcggaagagacggtgtgagaatatgttccgagaccacacggagaacagatgacgtctccggatactccgtatcctattccacattttgtttgggaaacacatgccttgcatccggatgatcctttgagaagacaataatatccgggagagcattcacagattctattgtgagtcgtgttacacgatcgcgtcttccgttacaacttagacaagcgggtaaatgattattgcgagatgtgaaggtacccgaaccacacggcgtacatcgtgtgttagtcttgctatcgcataatctggaagcgtatgttcccggacacaaattatggcgtttgtattcgttgtctttacactttccatcggatggtgcatgcggtgctatatctcttccgtttattattatacatgagagaaacaatatatacgagtataatacggacttcatgatttaataatgtagtaatcgttgtcttgttcctgtttcctacttctccaatcatatagatattttctttctatcatggataatatttgtaatggttctttccgtacaacatactgtttagatgatattgcgcataatttccggaggcaaatacgatagtctagattgaccgatggtagactctaatttattgagtgctttgtcgacgagtttacttttacgctccatcgatagatggcactgttctatgagatcgtcgtacatgggaaatgaaatgtgactgtctgaatgtatggctttaagatagctgtgataccgtatacaggtcggtgtcggagattcgaatctctttgaggcgacttatgtcacgatgatggaatctatcttatcgaatgatatatttttcataaatacacttttatagtcctcgtttaaacagaatttactatgtagttccgcgaatgactcgtcccttaataggcagtaggctagtatcttttttacgtagtaatcgtcgtagggagagacatcttgtagaacaacgatttcgttttgttttctcttctgtaactgcttttctggatggccgtattgattatcgagcgtgatactcgctccatattccaataaccgctttgcaaattgtatattattgacatcgaccgcgtaatatagtagagttatcgatcatatctatatcatccatgtacttgcttagtatatcaaatacatctatcagtatggtttcataacagtgatacccgcaattattaaatctcgataatatcagaccgtacatacatagacggccattgttcgatacgtgatttacagccgcgtgtccatattttccacgataaaccttacgacgtttacatcgacgagattattattaacaaagtagtcgtgtagaggatagttgttgtccgttatctaacatgcatcgaacgaccatatcgccgtaatgtaagtagtttatcagtatggcttgtacgatggattcatcctgttgtctaaatctctttagaatgttatcgatgatgtagtggttatattctctggaatcgtacgaagtaatactacgcattacgtcgacaagagtatgacgtctctcaataagaagattaacgatttccatgtctacattatatggggttactctaaatcgcttgtttagataatacgcctctaatatagggctgacgtcgtatactctacacgtgtccacatcctttattaataataatttaacaatctctatatctatggttgagaaagaccagtagtattggatgggtaaagatcctccttcgtctctgccatggatggaaacattgttatcgatcaaacatttaattacatccttggatagagattgagattctctatgagacgatatatagtaatgaagagagttcttacacatatcactgtcgtacatacaggtacgaaatacgtaaccggtgctgtaacattctgatttaagaagccatagcaatacttctggtctcggattaggcgtcgttacgtatatatccaccaatccgagaccattgattgcataattcgtattcttggacggacgtatccgtttatccacaattaggtattttagcagacgtaagtcgatattatccgaatacagatcgaaatcatttatattcgacttgagttcgttagaggaatttgaatagctggatatcagtagatgcacaatctgagattttacgtatctatgcttactgtatactcctagcggagttaatccttcgttgtttctacaaagtctctcgactccgcgagagaacaatcttaatgtctgtatcgcatttattggagacgtaacaatgtagcgcattgtttcctcgtctatctatatgttttgataagttgtgacacgtttcaatttctagttttatttttttgtacgtcacatcttcatccagtagacgacatagaatagtgcactctctaccacaataatccatagctattctggtgctaattattcctatttcacgaaggcaatcattcctcataagatgataaaaagtgtagtggagatttagtatttagcagtgcggatatgatccaagagggtgagatagtcgttctcgttcagaatctttcgcagcataagtagtatgtcgatatacttatcgttgaagactctttataaaagtctatttgtttatatttattgcggatagcagtatttccctataaaaagtatacgtcctgtggtgtctttaatcatgtacatgaatggatggtttatgtagaccttcgtacgatataccatcgaaaagttaatcgtaaatactcctgtaacggccgatgcttctgtatactcctcattaacatctataaacgtcgtatgtagaaatttttctacagtgatagtttcattacacatcttgctaaaatctgcataatatccgaatatattagtaagtcctaaattttctaaaatcggtaccagattatacggttctgtcatttccactttaaactttggcatatacaagtctatacttttagtagataacataccacaccattttttaaatttttcatctgttatatttttttctatgttatatataccttctatgtcgtccggtagtataattaccatactagagtttccctcgtatggaatatcgataatagagaatcctccgaataattcattaatatgtacatattgcaagttattctcggtacccaccatcatatcaacgctggtaactatattcttagaaatataaaacttgtctgtatatgtaagatgtttagaaaatggatatttccacattgctttaaaatggacggcgctaacaactgtcatacgagtattaatggatagcggactagtcaataaggaattaattttaccatttgtcattgtcttaacccattcgttgattagttcctttgtttggttagcattattaaagtttacagtttgaaaatcgtcttttattttttgtaggaaggaggcgtggaactcgatactatcgctaccgtatattttatttgcggtagctagtgtcgcacaatacggaatatctacctccatgtcatcattattgtcatcgggtgtattctcattcatattctctatatattttgatagttgttcagctgtagaaccagctgctccatgatttagaatagataaagtagataaaatggaaactggagaaatcaaaacattttcatcagggtgttttaagattagttctttaaagatatccatggtatagacctaacgataacgatatatatcataaataaataatgttaaatttcaatttatgtttgtaccccgtattcatacttaacaaattggtattgcgtacacaatcaatcatattacataccattaataatgcaagcataaaaaattgttagtagatgtttctaaatataggttccgtaagcaaagaatataagaatgaagcggtaatgataaaatcaatcgttatctaaaatgatcatactcatttattttattctattatattaacacatacatttttaacagcaacacattcaatattgtattgttatttttatattatttacacaattaacaatatattattagtttatattactgaattaataatataaaattcccaatcttgtcataaacacacactgagaaacagcataaacacagaatccatcaaaaatgttgataaattatctgatgttgttgttcgctgctatgataatcagatcattcgccgatagtggtaacgctatcgaaacgacattgccagaaattacaaacgctacaacagatattccagctatcagattatgcggtccagagggagatggatattgtttacacggtgactgtatccacgctagagatattgacggtatgtattgtagatgctctcatggttatacaggcattagatgtcagcatgtagtattagtagactatcaacgttcagaaaacccaaacactacaacgtcatatatcccatctcccggtattatgcttgtattagtaggcattattatgtgttgtctattatctgtttataggttcactcgacgaactaaactacctatacaagatatggttgtgccataatttttataaatttttttatgagtatttttacaaaaatgtataaagtgtatgtcttatgtatatttataaaaatgctaagtatgcgatgtatctatgttatttgtatttatctaaacaatacctctacctctagatattatacaaaaattttttatttcggcatattaaagtaaaatctagttaccttgaaaatgaatacagtgggtggttccgtatcaccagtaagaacataatagtcaaatacagtatccgattgagattttgcatacaatactagtctagaaagaaatttgtaatcatcttctgtgacgggagtccatatatctgtatcatcgtctagtttatcagtgtcccatgctatattcctgttatcatcattagttaatgaaaataactctcgtgcttcagaaaagtcaaatattgtatccatacatacatctccaaaactatcgcttatacgtttatctttaacgatacctatacctagatggttatttactaacagacattttccagatctattgactataactcctatagtttccacatcaaccaagtaatgatcatctattgttatataacaataacataactcttttccatttttatcagtatgtatatctatatcaacgtcgtcgttgtagtgaatagtagtcattgatctattatatgaaacggatatgtctagaacggcaattgttttacgtccagttaacactttcgttgatttaaagtctagagtctttgcaaacataatatccttatccgactttatatttcctgtagggtggtataattttattttgcctccacatatcggtgtttccaaatatattactagacaatattccatatagttattagttaagggtacccaattagaacacgtacgcttattatcatcatttggatcgtatttcataaaagttattgtgttatcgatgtcaacacattctacattttttaatcgtctatatagtatttttctgatattttctataatatcagaattgtcttccatcggaagttgtatactatcggaatcagttacatgtttaaataattctctgatgtcattccttatacaatcaaattcattattaaacagtttaatagtctgtagacctttatcgtcgtaaatatccattgtcttattagttacgcttatttttatgtgtttttacgttgctttattatattttataagaatgattgtttgacgaatcacgagaactattaagacacattattaggtatatattataaaaaagtttttgattacgatgttataagaggaaagaggacacattaacatcatacatcaattaactacattcttataacatcgtaatcaaaagaattgcaattttgatgtataacaactgtcaatgggttatggaattgtatattacatattatacggtatgttggtaacgacaaataccggtcggtaattgtctgccggtgtaatagaattatatatatctatctattacaccggccttgtatacataataataagttgtggtagtatgatctccatatttataatttaggactttgtattcagtatttttggaatcataaaaaataaaaaaaagttttactaatttaaaatttaaaaagtatttacatttttttcactgtttagtcgcggatatggaattcgatcctgccaaaatcaatacatcatctatagatcatgtaacaatattacaatacatagatgaaccaaatgatataagactaacagtatgcattatccgaaatattatatcaatatcacaaaaataaatacacatttggctaatcaatttcgggcttggaaaaaacgtatcgccggaagggactatatgactaacttatctagagatacaggaatacaacaatcaaaacttactgaaactatacgtaactgtcaaaaaaatagaaacatatatggtctatatatacactacaatttagttattaattggataaccgatgtgattatcaatcaatattaagagggttggtaaattggtacatagctaataatacctatactccaaatacacccaataatacaacaaccatttctgagttggatatcatcaaaatactaaataaatacgaggacgtgtatagagtaagtaaagaaaaagaatgtggaatttgctatgaagttgtttactcaaaacgatagatactttggtttattggattcgtgtactcatatattttgcataacatgcatcaatatatggcatagaacacgaagagaaaccggtgcgtcggataattgtcctatatgccgtacccgttttagaaacataacaatgagcaagttctataagctagttaactaataaataaaaagtttaatttgttgacgacgtatgtcgttattttttctcgtataaaagattaatttgattctaatataatctttagtattggataaatatcaattcaaattaattccattagattatatcataaataaaaatagtagcacacaactacttcagcaaacattctttttataaatgccatctagcgtagcgaggacacaagtgaacctataattatcaaatttattagtatcagtcacatgaaggactttacgtagagtgacgattccactatctgtggtacgaacggtttcatcttctttgatgccatcacccagatgttctataaacttggtatcctcgtccgatttcatatcctttgccaaccaatacatatagctaaactcaggcatatgttccacacatcctgaacaatgaaattctccagaagatgttacaatgtctagatttggacatttggtttcaaccgcgttaacatatgagtgaacacacccatacatgaaagcgatgagaaataggattctcatcttgccaaaatatcactagaaaaaatttatttatcagttttaaaggtataaaaaatacttattgttgctcgaatattttgtatttgatggtatacggaagattagaaatgtaggtattatcatcaactgattctatggttttatgtattctatcatgtttcactattgcgttggaaataatatcatatgcttccacatatattttattttgttttaactcataatactcacgtaattctggattattggcatatctatgaataattttagctccatgatcagtaaatattaatgagaacatagtattaccacctaccattatttttttcatctcattcaattcttaattgcaaagatctatataatcattatagcgttgacttatggactctggaatcttagacgatgtacagtcatctataatcatggcatatttaatacattgttttatagcatagtcgttatctacgatgttagatatttctctcaatgaatcaatcacacaatctaatgtaggtttatgacataatagcattttcagcagttcaatgtttttagattcgttgatggcaatggctatacatgtatatccgttatttgatctaatgttgacatctgaaccggattctagcagtaaagatactagagattgtttattatatctaacagccttgtgaagaagtgtttctcctcgtttgtcaatcatgttaatgtctttaagataaggtaggcaaatgtttatagtactaagaattgggcaagcataagacatgtcacaaagacccttttttgtatgtataagtgtaaaaattataacatccatagttggatttacataggtgtccaatcgggatctctccatcatcgagataattgatggcatctcccttccttttttagtagatatttcatcgtgtaagaatcaatattaatatttctaaagtatccgtgtatagcctctttatttaccacagctccatattccactagagggatatcgccgaatgtcatatactcaattagtatatgttggaggacatccgagttcattgttttcaatatcaaagagatggtttccttatcatttctccatagtggtacaatactacacattattccgtgcggctttccattttccaaaaacaatttgaccaaatctaaatctacatctttattgtatctataatcactatttagataatcagccataattcctcgagtgcaacatgttagatcgtctatatatgaataagcagtgttatctattcctttcattaacaatttaacgatgtctatatctatatgagatgacttaatataatattgaagagctgtacaatagtttttatctataaaagacggcttgattccgtgattaattagacatttaacaacttccggacgcacatatgctctcgtatccgactctgaatacagatgagagatgatatacagatgcaatacggtaccgcaatttcgtagttgataatcatcatacgcgtatcagtactcgtcctcataaagaacactgcagccattttctatgaacaaatcaataattttagaaacaggatcattgtcattacataattttctataactgaacgatggttttcacatttaacactcaagtcaaatccatgttctaccaacacctttatcaagtcaacgtctacatttttggatttcatatagctgaatatattaaagttatttatgttgctaaatccagtggcttctagtagagccatcgctatatccttattaactttaacatgtctactatttgtgtattcttctaatggggtaagctgtctccaatttttgcgtaatggattagtgccactgtctagtagtagtttgacgacctcgacattattacaatgctcattaaaaaggtatgcgtgtaaagcattattcttgaattggttcctggtatcattaggatctctgtctttcaacatctgtttaagttcatcaagagccacctcctcattttccaaatagtcaaacattttgactgaatgagctactgtgaactctatacacccacacaactaatgtcattaaatatcatgtcaaaaacttgtacaattattaataaaaataatttagtgtttaaattttaccagttccagattttacacctccgttaatacctccattaaccccactggacgatcctcctccccacattccaccgccaccagatgtataagttttagatcctttattactaccatcatgtccatggataaagacactccacatgccgccactaccccctttagaagacatattaataagacttaaggacaagtttaacaataaaattaatcacgagtaccctactaccaacctacactattatatgattatagtttctatttttacagtaccttgactaaagtttctagtcacaagagcaatactaccaacctacactattatatgattatagtttctatttttataggaacgcgtacgagaaaatcaaatgtctaatttctaacggtagtgttgataaacgattgttatccgcggatacctcctctatcatgtcgtctattttcttactttgttctattaacttattagcattatatattatttgattataaaacttatattgcttattagcccaatctgtaaatatcggattattaacatatcgtttctttgtaggtttatttaacatgtacatcactgtaagcatgtccttaccatttattttaatttgacgcatatccgcaatttctttttcgcagtcggttataaattctatatatgatggatacatgctacatgtgtacttataatcgactaatatgaagtacttgatacatattttcagtaacgatttattattaccacctatgaataagtacctgtgatcgtctaggtaatcaactgttttcttaatacattcgatggttggtaatttactcagaataatttccaatatcttaatatataattctgctatttctgggatatatttatctgccagtataacacaaatagtaatacatgtaaacccatattttgttattatattaatgtctgcgccattatctattaaccattctactaggctgacactatgcgactcaatacaatgataaagtatactacatccatgtttatctattttgtttatatcatcaatatacggcttacaaagttttagtatcgataacacatccaactcacgcatagagaaggtagggaataatggcataatatttattaggttatcatcattgtcattatctacaactaagtttccattttttaaaatatactcgacaactttaggatctctattgccaaatttttgaaaatatttatttatatgcttaaatctatataatgtagctccttcatcaatcatacatttaataacattgatgtatactgtatgataagatacatattctaacaatagatcttgtatagaatctgtatatcttttaagaattgtggatattaggatattattacataaactattacacaattctaaaatataaaacgtatcacggtcgaataatagttgatcaactatataattatcgattttgtgatttttcttcctaaactgtttacgtaaatagttagatagaatattcattagttcatgaccactatagttactatcgaataacgcgtcaaatatttcccgtttaatatcgcatttgtcaagataataatagagtgtggtatgttcacgataagtataataacgcatctctttttcgtgtgaaattaaatagtttattacgtccaaagatgtagcataaccatcttgtgacctagtaataatataataatagagaactgttttacccattctatcatcataatcagtggtgtagtcgtaatcgtaatcgtctaattcatcatcccaattataatattcaccagcacgtctaatctgttctattttgatcttgtatccatactgtatgttgctacatgtaggtattcctttatccaataatagtttaaacacatctacattgggatttgatgttgtagcgtatttttctacaatattaataccatttttgatactatttatttctatacctttcgaaattagtaatttcaataagtctatattgatgttatcagaacatagatattcgaatatatcaaaatcattgatatttttatagtcgactgacgacaataacaaaatcacaacatcgtttttgatattattatttttcttggtaacgtatgcctttaatggagtttcaccatcatactcatataatggatttgcaccactttctatcaatgattgtgcactgctggcatcgatgttaaatgttttacaactatcatagagtatcttatcgttaaccatgattggttgttgatgctatcgcattttttggtttctttcatttcagttatgtatggatttagcacgtttgggaagcatgagctcatatgatttcagtactgtagtgtcagtactattagtttcaataagatcaatctctagatctatagaatcaaaacacgataggtcagaagataatgaatatctgtaggcttcttgttgtactgtaacttctggttttgttagatggttgcatcgtgctttaacgtcaatggtacaaattttatcctcgctttgtgtatcatattcgtccctactataaaattgtatattcagattatcatgcgatgtgtatacgctaacggtatcaataaacggagcacaccatttagtcataaccgtaatccaaaaatttttaaagtatatcttaacgaaagaagttgtgtcattgtctacggtgtatggtactagatcctcataagtgtatatatctagagtaatgtttaatttattaaatggttgataatatggatcctcgtgacaatttccgaagatggaaataagacataaacacgcaataaatctaattgcggacatggttactccttaaaaaaatacgaataatcaccttggctatttagtaagtgtcatttaacactatactcatattaatccatggactcataatctctatacgggattaacggatgttctatatacggggatgagtagttctcttctttaactttatactttttactaatcatatttagactgatgtatgggtaatagtgtttgaagagctcgttctcatcatcagaataaatcaatatctctgtttttttgttatacagatgtattacagcctcatatattacgtaatagaacgtgtcatctaccttattaactttcaccgcatagttgtttgcaaatacggttaatcctttgacctcgtcgatttccgaccaatctgggcgtataatgaatctaaactttaattgcttgtaatcattcgaaataatttttagtttgcatccgtagttatcccctttatgtaactgtaaatttctcaacgcgatatctccattaataatgatgtcgaattcgtgctgtatacccatactgaatggatgaacgaataccgacggcgttaatagtaatttactttttcatctttacatattgggtactagttttactatcataagtttataaattccacaagctactatggaataagccaaccatcttagtataccacacatgtcttaaagtttattaattaattacatgttgttttatatatatcgctacgaatttaaagagaaattagtttaggaagaaaaattatctatctacatcatcacgtctctgtattctacgatagagtgctactttaagatgcgacagatccgtgtcatcaaatatatactccattaaaatgattattccggcagcgaacttgatattggatatatcacaacctttgttaatatctacgacaatagacagcagtcccatggttccataaacagtgagtttatctttctttgaagagatattttgtagagatcttataaaactgtcgaatgacatcgcatttatatctttagctaaatcgtatatgttaccatcgtaatatctaaccgcgtctatcttaaacgtttccatcgctttaaagacgtttccgatagatggtctcatttcatcagtcatactgagccaacaaatataatcgtgtataacatctttgatagaatcagactctaaagaaaacgaatcggctttattatacgcattcatgataaacttaatgaaaaatgtttttcgttgtttaagttggatgaatagtatgtcttaataattgttattatttcattaattaatatttagtaacgagtacactctataaaaacgagaatgacataactaatcataactagttatcaaagtgtctaggacgcgtaattttcatatggtatagatcctgtaagcattgtctgtattctggagctattttctctatcgcattagtgagttcagaatatgttataaatttaaatcgaataacgaacataactttagtaaagtcgtctatattaactcttttattttctagccatcgtaataccatgtttaagatagtatattctctagttactacgatctcatcgttgtctagaatatcacatactgaatctacatccaattttagaaattggtctgtgttacatatctcttctatattattgttgatgtattgtcgtagaaaactattacgtagaccattttctttataaaacgaatatatagtactccaattatctttaccgatatatttgcacacataatccattctctcaatcactacatctttaagattttcgttgttaagatatttggctaaactatataattctattagatcatcaacagaatcagtatatatttttctagatccaaagacgaactctttggcgtcctctataatattcccagaaaagatattttcgtgttttagtttatcgagatctgatctgttcatatacgccatgattgtacggtacgttatgataaccgcataaaataaaaatccattttcatttttaaccaatactattcataattgagattgatgtaatactttgttactttgaacgtaaagacagtacacggatccgtatctccaacaagcacgtagtaatcaaatttggtgttgttaaacttcgcaatattcatcaatttagatagaaacttatactcatcatctgttttaggaatccatgtattattaccactttccaacttatcattatcccaggctatgtttcgtccatcatcgttgcgcagagtgaataattcttttgtattcggtagttcaaatatatgatccatgcatagatcggcaaagctattgtagatgtgatttttcctaaatctaatataaaactcgtttactagcaaacactttcctgatttatcgaccaagacacatatggtttctaaatctatcaagtggtggggatccatagttatgacgcagtaacatatattattacattcttgactgtcgctaatatctaaatatttattgttatcgtattggattctgcatatagatggcttgtatgtcaaagatatagaacacataaccaatttatagtcgcgctttacattctcgaatctaaagttaagagatttagaaaacattatatcctcggatgatgttatcactgtttctggagtaggatatattaaagtctttacagatttcgtccgattcaaataaatcactaaataatatcccacattatcatctgttagagtagtatcattaaatctattatattttatgaaagatatatcactgctcacctctatatttcgtacatttttaaactgtttgtataatatctctctgatacaatcagatatatctattgtgtcggtagacgataccgttacatttgaattaatggtgttccattttacaacttttaacaagttgaccaattcatttctaatagtatcaaactctccatgattaaatattttaatagtatccattttatatcactacggacacaaagtagctgacataaaccattgtataatttttatgttttatgtttattagcgtacacattttggaagttccggcttccatgtatttcctggagagcaagtagatgatgaggaaccagatagtttatatccgtacttgcacttaaagtctacattgtcgttgtatgagtatgatcttttaaacccgctagacaagtatccgtttgatattgtaggatgtggacatttaacaatctgacacgtgggtggatcggaccattctcctcctgaacacaggacactagagttaccaatcaacgaatatccactattgcaactataagttacaacgctcccatcggtataaaaatcctcgtatccgttatgtcttccgttggatatagatggaggggattggcatttaacagattcacaaataggtgcctcgggattccataccatagatccagtagatcctaattcacaatacgatttagattcaccgatcaactgatatccgctattacaagagtacgttatactagagccaaagtctactccaccaatatcaagttggccattatcgatatctcgaggcgatgggcatctccgtttaatacattgattaaagagtgtccatccagtacctgtacatttagcatatataggtcccattttttgctttctgtatccaggtagacatagatattctatagtgtctcctatgttgtaattagcattagcatcagtctccacactattcttaaatttcatattaatgggtcgtgacggaatagtacagcatgatagaacgcatcctattcccaacaatgtcaggaacgtcacgctctccaccttcatatttatttatccgtaaaaatgttatcctggacatcgtacaaataataaaaagcccatatatgttcgctattgtagaaattgtttttcacagttgctcaaaaacgatggcagtgacttatgagttacgttacactttggagtctcatctttagtaaacatatcataatattcgatattacgagttgacatatcgaacaaattccaagtatttgattttggataatattcgtattttgcatctgctataattaagatataatcaccgcaagaacacacgaacatctttcctacatggttaaagtacatgtacaattctatccatttgtcttccttaactatatatttgtatagataattacgagtctcgtgagtaattccagtaattacatagatgtcgccgtcgtactctacagcataaactatactatgatgtctaggcatgggagacttttttatccaacgatttttagtgaaacattccacatcgtttaatactacatatttctcatacgtggtataaactccacccattacatatatatcatcgtttacgaataccgacgcgcctgaatatctaggagtaattaagtttggaagtcttatccatttcgaagtgccgtgtttcaaatattctgccacacccgttgaaatagaaaattctaatcctcctattacatataactttccatcgttaacacaagtactaacttctgattttaacgacgacatattagtaaccgttttccattttttcgttttaagatctacccgcgatacggaataaacatgtctattgttaatcatgccgccaataatgtatagacaattatgtaaaacatttgcattatagaattgtctatctgtattaccgactatcgtccaatattctgttctaggagagtaatgggttattgtggatatataatcagagtttttaatgactactatattatgttttataccatttcgtgtcactggctttgtagatttggatatagttaatcccaacaatgatatagcattgcgcatagtattagtcataaacttgggatgtaaaatgttgatgatatctacatcgtttggatttttatgtatccactttaataatatcatagctgtaacatcctcatgatttacgttaacgtcttcgtgggataagatagttgtcagttcatcctttgataattttccaaattctggatcggatgtcaccgcagtaatattgttgattatttctgacatcgacgcattatatagttttttaattccatatcttttagaaaagttaaacatccttatacaatttgtgaaattaatattatgaatcatagtttttacacatagatctactacaggcggaacatcaattattatggcagcaactagtatcatttctacattgtttatggtgatgtttatcttcttccagcgcatatagtctaatagcgattcaaacgcgtgatagtttataccattcaatataatcgcttcatcctttagatggtgatcctgaatgcgtttaaaaaaattatacggagacgccgtaataatttccttattcacttgtataatttccccattgatagaaaatattacgctttccattcttaaagtactataagtaattatagtataatgtaaacgtttatatattcaatatttttataaaaatcattttgacattaattcctttttaaatttccgtctatcatctatagaaacgtattctatgaatttataaaatgcttttacgtgtcctatcgtaggcgatagaaccgctaaaaagcctatcgaatttctacaaaagaatctgttatatggtatagggagagtataaaacattaaatgtccgtacttattaaagtattcagtagccaatcctaactctttcgaatacttattaatggctcttgttctgtacgaatctatttttttgaacaacggacctagtggtatatcttgttctatgtatctaaaataatgtctgactagatccgttagtttaatatccgcagtcatcttgtctagaatggcaaatctaactgcgggtttaggctttagtttagtttctatatctacatctatgtctttatctaacaccaaaaatataatagctaatattttattacaatcatccggatattcttctacgatctcactaactaatgtttctttggttatactagtatagtcactatcggacaaataaagaaaatcagatgatcgatgaataatacatttaaattcatcatctgtaagatttttgagatgtctcattagaatattattagggttagtactcattatcattcggcagctattacttattttattatttttcaccatatagatcaatcattagatcatcaaaatatgtttcaatcatcctaaagagtatggtgaatgactcttcccatctaatttctgaacgttcaccaatgtctctagccactttggcactaatagcgatcattcgcttagcgtcttctatattattaactggttgatttaatctatctagcaatggaccgtcggacagcgtcattctcatgttcttaatcaatgtacatacatcgccgtcatctaccaattcatccaacaacataagctttttaaaatcatcattataataggtttgatcgttgtcatttctccaaagaatatatctaataagtagagtcctcatgcttagttaacaactattttttatgttaaatcaattagtacaccgctatgtttaatacttattcatattttagtttttaggattgagaatcaatacaaaaattaatgcatcattaattttagaaatacttagtttccacgtagtcaatgaaacatttgaactcatcgtacaggacgttctcgtacaggacgtaactataaaccggtttatatttgttcaagatagatacaaatccgataactttttttacgaattctacgggatccactttaaaagtgtcataccgggttctttttatttttttaaacagatcaatggtgtgatgttgattaggtcttttacgaatttgatatagaatagcgtttacatattctccataatggtcaatcgccatttgttcgtatgtcataaattctttaattatatgacactgtgtattatttagttcatccttgttcattgttaggaatctatccaaaatggcaattatactagaactataggtgcgttgtatacacatattgatgtgtctgtttatacaatccatgatatttggatccatgctactaccttcgggtaaaattgtagcatcatataccatttctagtactttaggttcattattatccattgcagaggacgtcatgatcgaatcataaaaaaatatattatttttatgttattttgttaaaaataatcatcgaatacttcgtaagatactccttcatgaacataatcagttacaaaacgtttatatgaagtaaagtatctacgatttttacaaaagtccggatgcataagtacaaagtacgcgataaacggaataataatagatttatctagtctatctttttctatagctttcatagttagatacatggtctcagaagtaggattatgtaacatcagcttcgataaaatgactgggttatttagtcttacacattcgctcatacatgtatgaccgttaactacagagtctacactaaaatgattgaacaatagatagtctaccattgtttcgtattcagatagtacagcgtagtacatggcatcttcacaaattatatcattgtctaatagatatttgacgcatcttatggatcccacttcaacagccatcttaaaatcatattgctttcctttatcattaataatttctagaacatcatctctatcataaaagatacaaatattaactgtttgatccgtaataacattgctagtcaatagcaatttgttaataagatgcgctgggctcaatgtcttaataagaagtgtaagaggactatctccgaatttgttttgtttattaacatccgttgatggaagtaaaagatctataatgtctacattcttgactgttttagagcatacaatatggagaggtgtatttccatcatgatctggttttgagggactaattcctagtttcatcatccatgagattgtagaagcttttggattgtctgacataagatgtctatgaatatgatttttgccaaatttatccactatcctggcttcgaatccgatggacattatttttttaaacactctttctgaaggatctgtacacgccaacaacggaccacatccttcttcatcaaccgagttgttaatcttggctccatactgtaccaataaatttattctctctatgacttcatcatctgttcccgagagataatatagaggtgttttatgctgtttatcacacgcgtttggatctgcgccgtgcgtcagcagcatcgcgactattctattattattaattttagaagctatatgcaatggataatttccatcatcatccgtctcatttggagagtatcctctatgaagaagttcttcgacaaatcgttcatctagtcctttaattccacaatacgcatgtagaatgtgataattatttccagaaggttcgatagcttgtagcatattcctaaatacatctaaatttttactattatatttggcataaagagatagataatactcggccgacataatgttgtccattgtagtataaaaattaatatttctatttctatttctgtatatttgcaacaatttactctctataacaaatatcataacttagtttttttatgtcaagaaggcactggtttagttcatctataaatgtcacgccataactaccacgcatgccatactcagaattatgataaagatatttatccttggggtgtaggtaatggggattaatctttgttggatcagtctctaagttaacacatgtcacacatgatccatttatagttatatcacacgatgatgatttatgaattgattccggaagatcgctatcgtattttgtggttccacaattcatttccatacatgttattgtcacactaatattatgatgaactttatctagccgctgagtggtaaacaacagaacagatagtttattatctttaccaacaccctcagccgctgccacaaatctctgatccgtatccatgatggtcatgtttatttctagtccgtatccagtcaacactatgttagcatttctgtcgatatagctttcactcatatgacactcaccaataatagtagaattaatgtcgtaatttacaccaatagtgagttcggcggcaaagtaccaataccggtaatcttgtcgaggaggacatatagtattcttgtattctaccgaatacccgagagatgcgatacaaaagagcaagactaatttgtaaaccatcttactcaaaatatgtaacaatagtacgatgcaatgagtaagacaataggaaatctatcttatatacacataattattctatcaattttaccaattagttagtgtaatgttaacaaaaatgtgggagaatctaattagtttttctttacacaattgacgtacatgagtctgagttccttgtttttgctaattatttcatccaatttattattcttgacgatatcgagatcttttgtataggagtcaaacttgtattcaacatgcttttctataatcattttagctatttcggcatcatccaatagtacattttccagattagcagaatagatattaatgtcgtatttgaacagagcctgtaacatctcaatgtctttattatctatagccaatttaatgtccggaatgaagagaagggaattattggtgtttgtcgacgtcatatagtcgagcaagagaatcatcatatccacgtgtccattttttatagtgatgtgaatacaactaaggagaatagccagatcaaaagtagatggtatctctgaaagaaagtaggaaacaatacttacatcattaagcatgacggcatgataaaatgaagttttccatccagttttcccatagaacatcagtctccaatttttcttaacaaacagttttaccgtttgcatgttaccactatcaaccgcataatacaatgcggtgtttcccttgtcatcaaattgtgaatcatccagtccactgaatagcaaaatctttactattttggtatcttccaatgtggctgcctgatgtaatggaaattcattctctagaagatttttcaatgctccagcgttcaacaacgtacatactagacgcacgttattatcagctattgcataatacaaggcactatgtccatggacatccgccttaaatgtatctttactagagagaaagcttttcagctgcttagacttccaagtattaattcgtgacagatccatgtctgaaacgagacgctaattagtgtatattttttcattttttataattttgtcatattgcaccagaattaataatatctttaatagatctgattagtagatacatggctatcgcaaaacaacatatacacatttaataaaaataatatttattaagaaaattcagatttcacgtacccatcaatataaataaaataatgattccttacaccgtacccatattaaggagattccaccttacccataaacaatataaatccagtaatatcatgtctgatgatgaacacaaatggtgtattaaattccagtttttcaggagatgatctcgccgtagctaccataatagtagatgcctctgctacagttccttgttcgtcgacatctatctttgcattctgaaacattttataaatatataatgggtccctagtcatatgtttaaacgacgcattatctggattaaacatactaggagccatcatttcggctatcgacttaatatccctcttattttcgatagaaaatttagggagtttaagattgtacactttattccctaattgagacgaccaatagtctaattttgcagccgtgatagaatctgtgaaatgggtcatattatcacctattgccaggtacatactaatattagcatccttatacggaaggcgtaccatgtcatattctttgtcatcgattgtgattgtatttccttgcaatttagtaactacgttcatcatgggaaccgttttcgtaccgtacttattagtaaaactagcattgcgtgttttagtgatatcaaacggatattgccatatacctttaaaatatatagtattaatgattgcccatagagtattattgtcgagcatattagaatctactacattagacataccggatctacgttctactatagaattaattttattaaccgcatctcgtctaaagtttaatctatataggccgaatctatgatattgttgataatacgacggtttaatgcacacagtattatctacgaaactttgataagttagatcagtgtacgtatatttagatgttttcagcttagctaatcctgatattaattctgtaaatgctggacccagatctctttttctcaaatccatagtcttcaataattctattctagtattacctgatgcaggcaatagcgacataaacatagaaaacgaataaccaaacggtgagaagacaatattatcatcttgaatatttttatacgctactataccggcattggtaaatccttgtagacgataggcggacgctgaacacgctaacgatagtatcaataacgcaatcatgattttatggtattaataattaaccttatttttatgttcggtataaaaaaattattgatgtctacacatccttttgtaattgacatctatatatccttttgtataatcaactctaatcactttaacttttacagttttccctaccagtttatccctatattcaacatatctatccatatgcatcttaacactctctgccaagatagcttcagagtgaggatagtcaaaaagataaatatatagagcataatcattctcgtatactctgccctttattacatcacccgcattgggcaacgaataacaaaatgcaagcatcttgttaacgggctcgtaaattgggataaaaattatgtttttattgtcttatatctattttattcaagagaatattcaggaatttctttttccggttgtatctcgtcgcagtatatatcatttgtacattgtttcatattttttaatagtttacaccttttagtaggactagtatcgtacaattcatagctgtattttgaattccaatcacgcataaaaatatcttccaattgttgacgaagacctaatccatcatccggtgtaatattaatagatgctccacatgtatccgtaaagtaatttcctgtccaatttgaggtacctatataggccgttttatcggttaccatatatttggcatggtttaccctagaatacggaatgggaggatcagcatctggtacaataaatagctttacttctatatttatgtttttagattttagcatagcgatagatcttaaaaagtttctcatgataaacgaagatcgttgccagcaactaatcaatagcttaacggatacttgtctgtctatagcggatcttcttaattcatcttctatataaggccaaaacaaaattttacccgccttcgaataaataatagggataaagttcataacagatacataaacgaatttactcgcatttctaatacatgacaataaagcggttaaatcattggttctttccatagtacatagttgttgcggtgcagaagcaataaatacagagtgtggaacgccgcttacgttaatactaagaggatgatctgtattataatacgacggataaaagtttttccaattatatggtagattgttaactccaagataccagtatacctcaaaaatttgagtgagatccgctgccaagttcctattattgaagatcgcaatacccaattccttgacctgagttagtgatctccaatccatgttagcgcttcctaaataaatatgtgtattatcagatatccaaaattttgtatgaagaactcctcctaggatatttgtaatatctatgtatcgtacttcaactccggccatttgtagtctttcaacatcctttaatggtttgttagatttattaacggctactctaactcgtactcctcttttgggtaattgtacaatctcgtttaatattatcgtgccgaaattcgtacccacttcatccgataaactccaataaaaagatgatatatctagtgtttttgtggtattggatagaatttccctccacatgttaaatgtagacaaatatactttatcaaattgcatacctataggaatagtttctgtaatcactgcgattgtattatccggattcattttatttgttaaaagaataatcctatatcacttcactctattaaaaatccaagtttctatttctttcatgactgattttttaacttcatccgtttccttatgaagatgatgtttggcaccttcataaatttttatttctctattacaatttgcatgttgcatgaaataatatgcacctaaaacatcgctaatcttattgtttgttccctggagtatgagagtcggggggtgttaatcttggaaattatttttctaaccttgttggtagccttcaagacctgactagcaaatccagccttaattttttcatgattgactaatgggtcgtattggtatttataaactttatccatatctctagatactgattctggacatagctttccgactggcgcatttggtgtgatggttcccataagtttggcagctagcagattcagtcttgaaacagcatctgcattaactagaggagacattagaatcattgctgtaaacaagtttggattatcgtaagaggctagctcccatggaatgacccaataagtagatttaatagttaccacgtgctgtaccaaagtcatcaatcatcattttttcaccattacttcttccatgtccaatatgatcatgtgagaatactaaaattcctaacgatgatatgttttcagctagttcgtcataacgtccagaatgtttaccagctccatgacttatgaatactaatgccttaggatatgtaataggtttccaatatttacaatatatgtaatcattgtccagattgaacatacagtttgcactcatgattcacgttatataactatcaatattaacagttcgtttgatgatcatattatttttatgttttattgataattgtaaaaacatacaattaaatcaatatagaggaaggagacggctactgtcttttgtaagatagtcatggcgactaaattagattatgaggatgctgttttttactttgtggatgatgataaaatatgtagtcgcgactccatcatcgatctaatagatgaatatattacgtggagaaatcatgttatagtgtttaacaaagatattaccagttgtggaagactgtacaaggaattgatgaagttcgatgatgtcgctatacggtactatggtattgataaaattaatgagattgtcgaagctatgagcgaaggagaccactacatcaattttacaaaagtccatgatcaggaaagtttattcgctaccataggaatatgtgctaaaatcactgaacattggggatacaaaaagatttcagaatctagattccaatcattgggaaacattacagatttgatgaccgacgataatataaacatcttgatactttttctagaaaaaaaattgaattgatgatataggggtcttcataacgcataattattacgttagcattctatatccgtgttaaaaaaaattatcctatcatgtatttgagagttttatatgtagcaaacatgatagctgtgatgccaataagctttagatattcacgcgtgctagtgttagggatggtattatctggtggtgaaatgtccgttatataatctacaaaacaatcatcgcatatagtatgcgatagtagagtaaacatttttatagtttttactggattcatacatcgtctacccaattcggttataaatgaaattgtcgccaatcttacacccaaccccttgttatccattagcatagtattaacttcgttatttatgtcataaactgtaaatgattttgtagatgccatatcatacatgatattcatgtccctattataatcattactaactttatcacaatatatgttgataatatctatatatgatctagtctttgtgggcaactgtctatacaagtcgtctaaacgttgtttactcatatagtatcgaacagccatcattacatggtcccgttccgttgatagataatcgagtatgttagtggacttgtcaaatctatataccatattttctggaagtggatatacatagtcgtgatcaacattattgctagcctcatcttctatatcctgtactataccattatctatatcatctacataatctatgatattattacacataaacatcgacaacatactattgtttattatctaagtcctgttgatccaaacccttgatctcctctatttgtactatctagagattgtacttcttccagttctggataatatatacgttgatagattagctgagctattctatctccagtatttacattaaacgtacattttccattattaataagaatgactcctatgtttcccctataatcttcgtctattacaccacctcctatatcaatgccttttagtgacagaccagacctaggagctattctaccatagcagaacttaggcatggacatactaatatctgtcttaattaactgtctttctcctggagggatagtataatcgtaagcgctatacaaatcatatccggcagcacccggcgattgcctagtaggagatttagctctgttagtttccttaacaaatctaactggtgagttaatattcatgttgaacataaaactaatattttatttcaaaattatttaccatcccatatattccatgaataagtgtgatgattgtacacttctatagtatctatatacgatccacgataaaatcctcctatcaatagcagtttattatccactatgatcaattctggattatccctcggataaataggatcatctatcagagtccatgtattgctggattcacaataaaattccgcatttctaccaaccaagaataaccttctaccgaacactaacgcgcatgatttataatgaggataataagtggatggtccaaactgccactgatcatgattgggtagcaaatattctgtagttgtatcagtttcagaatgtcctcccattacgtatataacattgtttatggatgccactgctggattacatctaggtttcagaagactcggcatattaacccaagcagcatccccgtggaaccaacgctcaacagatgtgggatttggtagacctcctactacgtataatttattgttagcgggtatcccgctagcatacagtctggggctattcatcggaggaattggaatccaattgtttgatatataatttacagctatagcattgttatgtatttcattgttcatccatccaccgatgagatatactacttctccaacatgagtacttgtacacatatggaatatatctataatttgatccatgttcataggatactctatgaatggatacttgtatgatttgcgtggttgtttatcacaatgaaatattttggtacagtctagtatccattttacattatttatacctctgggagaaagataatttgacctgattacatttttgataaggagtagcagatttcctaatttatttcttcgcctcatataccacttaatgacaaaatcaactacataatcctcatctggaacatttagttcatcgctttctagaataagtttcatagatagataatcaaaattgtctatgatgtcatcttccagttccaaaaagtgtttggcaataaagtttttagtatgacataagagattggatagtccgtattctatacccatcatgtaacactcgacacaatattcctttctaaaatctcgtaagataaagtttatacaagtgtagatgataaattctacagaggttaatatagaagcacgtaataaattgacgacgttatgactatctatatatacctttccagtatatgagtaaataactatagaagttaaactgtgaatgtcaaggtctagacaaacccttgtaactggatctttatttttcgtgtatttttgacgtaaatgtgtgcgaaagtaaggagataactttttcaatatcgtagaattgactattatattgcctcctatggcatcaataattgttttgaatttcttagtcatagacaatgctaatatattcttacagtacacagtattgacaaatatcggcatttatgtttctttaaaagtcaacatctagagaaaaatgattatctttttgagacataactcccattttttggtattcacccacacgtttttcgaaaaaattagtttttccttccaatgatatattttccatgaaatcaaacggattggtaacattataaatttttttaaatcccaattcagaaatcaatctatccgcgacgaattctatatatgttttcatcatttcacaattcattcctataagtttaactggaagagccgcagtaagaaattcttgttcaatggatactgcatctgttataatagatctaacggtttcttcactcggtggatgcaataaatgtttaaacatcaaacatgcgaaatcgcagtgcagaccctcgtctctactaattagttcgttggaaaacgtgagtccgggcattaggccacgctttttaagccaaaatatggaagcgaatgatccagaaaagaaaattccttctactgcagcaaaggcaataagtctctctccataaccggcgctgtcatgtatccacttttgagcccaatcggccttcttttttacacaaggcatcgtttctatggcattaaagagatagtttttttcattactatctttaacataagtatcgatcaaaagactatacatttccgaatgaatgttttcaatggccatctgaaatccgtagaaacatctagcctcggtaatctgtacttctgtacaaaatcgttccgccaaattttcattcactattccgtcactggctgcaaaaaacgccaatacatgttttataaaatatttttcgtctggtgttagtttattccaatcattgatatctttagatatatctacttcttccactgtccaaaatgatgcctctgcctttttatacatgttccagatgtcatgatattggattgggaaaataacaaatctatttggatttggtgcaaggatgggttccataactaaattaacaataacaataaattttttttcagttatctatatgcctgtacttggattttttgtacatcgatatcgccgcaatcactacaataattacaagtattattgatagcattgttattagtactatcataattaaattatctacattcatgggtgctgaataatcgttattatcatcattatcattttgtaattgtgacatcatactagataaatcgtttgcgagattgttgtgggaagcgggcatggaggatgcattatcattattatttaacgccttccatttggattcacaaatgttacgcacattcaacattttatggaaactataattttgtgaaaacaaataacaagaaaactcgtcatcgttcaaatttttaacgatagtaaaccgattaaacgtcgagctaatttctaacgctagcgactctgttggatatgggtttccagatatatatcttttcagttcccctacgtatctataatcatctgtaggaaatggaagatatttccatttatctactgttcctaatatcatatgtggtggtgtagtagaaccattaagcgcgaaagatgttatttcgcatcgtattttaacttcgcaataatttctggttagataacgcactctaccagtcaagtcaatgatattagcctttacagatatattcatagtagtcgtaacgatgactccatcttttagatgcgatactcctttgtatgtaccagaatcttcgtacctcaaactcgatatatttaaacaagttaatgagatattaacgcgttttatgaatgatgatatataaccagaagttttatcctcggtggctagcgctataaccttatcattataataccaactagtgtgattaatatgtgacacgtcagtgtgggtacaaatatgtacattatcgtctacgtcgtattcgatacatccgcatacagccaacaaatataaaatgacaaatactctaacgccgttcgtacccatcttgatgcggtttaataaatgttttgatttcaatttattgtaaaaaaagattcggttttatactgttcgatattctcattgcttatattttcatctatcatctccacacagtcaaatccgtggttagcatgcacctcatcaaccggtaaaagactatcggactcttctatcattataactctagaatatttaatttggtcattattaatcaagtcaattatcttatttttaacaaacgtgagtattttactcattttttataaaaacttttagaaatatacagactctatcgtgtgtctatatcttctttttatatccaatgtatttatgtctgatttttcttcatttatcatatataatggtccaaattctacacgtgcttcggattcatccagatcattaaggttcttataattgtaacatccttctcttccctcttctacatcttccttcttattcttattcttagcgtcacagaatctaccacagcaggatcccatgacgagcgtcatattaaactaatccattttcaattataatatatgattagtaatgaccattaaaataaaaaatattcttcataaccggcaagaaagtgaaaagttcacattgaaactatgtcagtagtatacatcatgaaatgatgatatatatatactctattttggtggaggattatatgatataattcgtggataatcatttttaagacacatttctttattcgtaaatcttttcacgttaaatgagtgtccatattttgcaatttcttcatatgatggcggtgtacgtggacgaggctgctcctgttcttgttgtggtcgccgactgtcgtgtctgcgtttagatccctccattatcgcgattgcgtagatggagtactattttataccttgtaattaaatttttttattaattaaacgtataaaaacgttccgtatctgtatttaagagccagatttcgtctaatagaacaaatagctacagtaaaaataactagaataattgctacacccactagaaaccacggatcgtaatacggcaatcggttttcgataataggtggaacgtatattttatttaaggacttaacaattgtctgtaaaccacaatttgcttccgcggatcctgtattaactatctgtaaaagcatatgttgaccgggcggagccgaacattctccgatatctaatttctgtatatctataatattattaacctccgcatacgcattacagttcttttctagcttggataccgcactaggtacatcgtctagatctattcctatttcctcagcgatagctcttctatccttttccggaagcaatgaaatcacttcaataaatgattcaaccatgagtgtgaaactaagtcgagaattactcatgcatttgttagttattcggagcgcgcaatttttaaactgtcctataacctctcctatatgaatagcacaagtgacattagtagggatagaatgttgagctaatttttgtaaataactatctataaaaagattatacaaagttttaaactctttagtttccgccatttatccagtctgagaaaatgtctctcataataaatttttccaagaaactaattgggtgaagaatggaaacctttaatctatatttatcacagtctgttttggtacacatgatgaattcttccaatgccgtactaaattcgatatctttttcgatttctggatatgtttttaataaagtatgaacaaagaaatggaaatcgtaataccagttatgtttaactttgaaattgttttttattttcttgttaatgattccagccacttgggaaaagtcaaagtcgtttaatgccgatttaatacgttcattaaaaacaaactttttatcctttagatgaattattattggttcattggaatcaaaaagtaagatattatcgggtttaagatctgcgtgtaaaaagttgtcgcaacagggtagttcgtagattttaatgtataacagagccatctgtaaaaagataaactttatgtattgtaccaaagatttaaatcctaatttgatagctaactcggtatctactttatctgccgaatacagtgctaggggaaaaattataatgtttcctctttcatattcgtagttagttctcttttcatgttcgaaaaagtgaaacatgcggttaaaatagtttataacattaatattactgttaataactgccggataaaagtgggatagtaatttcacgaatttgatactgtcctttctctcgttaaacgcctttaaaaaaactttagaagaatatctcaatgagagttcctgaccatccatagtttgtatcaataatagcaacatatgaagaacacgtttatacagagtatgtaaaaatgttaatttatagtttaatcccatggcccacgcacacacgattaattttttttcatctccctttagattgttgtatagaaatttgggtactgtgaactccgccgtagtttccatgggactatataattttgtggcctcgaatacaaattttactacatagttatctatcttaaagactataccatatcctcctgtagatatgtgataaaaatcgtcgtttataggataaaatcgtttatccttttgttggaaaaaggatgaattaatgtaatcattctcttctatctttagtagtgtttccttattaaaattcttaaaataatttaacaatctaactgacggagcccaattttggtgtaaatctaattgggacattatattgttaaaatacaaacagtctcctaatataacagtatctgataatctatggggagacatccattgatattcaggggatgaatcattggcaacacccatttattgtacaaaaagccccaatttacaaacgaaagtccaggtttgatagagacaaacaattaactattttgtctctgtttttaacacctccacagtttttaatttctttagtaatgaaattattcacaatatcagtatcttctttatctaccagagattttactaacttgataaccttggctgtctcattcaatagggtagtaatatttgtatgtgtgatattgatatctttttgaattgtttcttttagaagtgattctttgatggtgccagcatacgaattacaataatgcagaaactcggttaacatgcaggaattatagtaagccaattccaattgttgcctgtgttgtattagagtgtcaatatgagcaatggtgtccttgcgtttctctgatagaatgcgagcagcgattttggcgttatcatttgacgatatttctggaatgacgaatcctgtttctactaactttttggtaggacaaagtgaaacaatcaagaagatagcttctcctcctatttgtggaagaaattgaactcctctagatgatctactgacgatagtatctccttgacagatattggaccgaattacagaagtacctggaatgtaaagccctgaaaccccctcattttttaagcagattgttgccgtaaatcctgcactatgcccaagatagagagctcctttggtgaatccatctctatgtttcagtttaaccaagaaacagtcagctggtctaaaatttccatctctatctaatacagcatctaacttgatgtcaggaactatgaccggtttaatgttatatgtaacattgagtaaatccttaagttcataatcatcactgtcatcagttatgtacgatccaaacaatgtttctaccggcatagtggatacgaagatgctatccatcagaatgtttccctgattagtattttctatatagctattcttctttaaacgattttccaaatcagtaactatgttcatttttttaggagtaggacgcctagccagtatggaagaggattttctagatcctctcttcaacatctttgatctcgatggaatgcaaaaccccatagtgaaacaaccaacgataaaaataatattgtttttcactttttataattttaccatctgactcatggattcattaatatctttataagagctactaacgtataattctttataactgaactgagatatatacaccggatctatggtttccataattgagtaaatgaatgctcggcaataactaatggcaaatgtatagaacaacgaaattatactagagttgttaaagttaatattttctatgagctgttccaataaattatttgttgtgactgcgttcaagtcataaatcatcttgatactatccagtaaaccgtttttaagttctggaatattatcatcccattgtaaagcccctaattcgactatcgaatatcctgctctgatagcagtttcaatatcgacggacgtcaatactgtaataaaggtggtagtattgtcatcatcgtgataaactacgggaatatggtcgttagtaggtacggtaactttacacaacgcgatatataactttccttttgtaccatttttaacgtagttgggacgtcctgcagggtattgttttgaagaaatgatatcgagaacagatttgatacgatatttgttggattcctgattattcactataatataatctagacagatagatgattcgataaatagagaaggtatatcgttggtaggataatacatccccattccagtattctcggatactctattgatgacactagttaagaacatgtcttctattctagaaaacgaaaacatcctacatggactcattaaaacttctaacgctcctgattgtgtctcgaatgcctcgtacaaggatttcaaggatgccatagattctttgaccaacgatttagaattgcgtttagcatctgatttttttattaaatcgaatggtcggctctctggtttgctaccccaatgataacaatagtcttgtaaagataaaccgcaagaaaatttatacgcatccatccaaataaccctagcaccatcggatgatattaatgtattattatagattttccatccacaattattgggccagtatactgttagcaacggtatatcgaatagattactcatgtaacctactagaatgatagttcgtgtactagtcataatatctttaatccaatctaaaaaatttaaaattagattttttacactgttaaagttaacaaaagtattacccgggtacgtggatatcatatatggcattggtccattatcagtaatagctccataaactgatacggcgatggtttttatatgtgtttgatctaacgaggaagaaattcgcgcccacaattcatctctagatatgtatttaatatcaaacggtaacacatcaatttcgggacgcgtatatgtttctaaatttttaatccaaatataatgatgacctatatgccctattatcatactgtcaactatagtacacctagggaacttacgatacatctgtttcctataatcgttaaattttacaaatctataacatgctaaaccttttgacgacagccattcattaatttctgatatggaatctgtattctcgataccgtatcgttctaaagccagtgctatatctccctgttcgtgggaacgctttcgtataatatcgatcaacggataatctgaagtttttggagaataatatgactcatgatctatttcgtccataaacaatctagacataggaattggaggcgatgatcttaattttgtgcaatgagtcgtcaatcctataacttctaatcttgtaatattcatcatcgacataatactatctatgttatcatcgtatattagtataccatgaccttcttcatttcgtgccaaaatgatatacagtcttaaatagttacgcaatatctcaatagtttcataattgttagctgttttcatcaaggtttgtatcctgtttaacatgatggcgttctataacgtctctattttctatttttaattttttaaatttttaacgatttactgtggctagatacccaatctctctcaaatatttttttagcctcgcttacaagctgtttatctatactattaaaactgacgaatccgtgattttggtaatgggttccgtcgaaatttgccgaagtgatatgaacatattcgtcgtcgactatcaacaattttgtattattctgaatagtgaaaaccttcacagatagatcattttgaacacacaacgcatctagacttttggcggttgccatagaatatacgtcgttcttatcccaattaccaactagaagtctgatcttaactcctctattaatggctgcttctataatggagttgtaaatgtcgggccaatagtagctattaccgtcgacacgtgtagtgggaactatggccaaatgttcaatatctatactagtcttagctgacctgagtttatcaataactacatcggtatctagatctctagaatatcccaataggtgttccggagaatcagtaaagaacactccacctataggattcttaatatgatacgcagtgctaactggcaaacaacaagccgcagagcataaattcaaccatgaattttttgcgctattaaaggctttaaaagtatcaaatcttctacgaagatctgtggccagcgggggataatcagaatatacacctaacgttttaatcgtatgtatagatcctccagtaaatgacgcgtttcctacataacatctttcatcatctgacacccaaaaacaaccgagtagtagtcccacattattttttttatctatattaacggttataaaatttatatccgggcagtgactttgtagctctcccagatttcttttccctcgttcatctagcaaaactattattttaatccctttttcagatgcctcttttagtttatcaaaaataagcgctcccctagtcgtactcagaggattacaacaaaaagatgctatgtatatatatttcttagctagagtgataatttcgttaaaacattcaaatgttgttaaatgatcggatctaaaatccatattttctggtagtgtttctaccagcctacattttgctcccgcaggtaccgatgcaaatggccacatttagttaacataaaaacttatacatcctgttctatcaacgattctagaatatcatcggctatatcgctaaaattttcatcaaagtcgacatcacaacctaactcagtcaatatattaagaagttccatgatgtcatcttcgtctatttctatatccgtatccattgtagattgttgaccgattatcgagtttaaatcattactaatactcaatccttcagaatacaatctgtgtttcattgtaaatttataggcggtgtatttaagttggtagattttcaattatgtattaatatagcaacagtagttcttgctcctccttgattctagcatcctcttcattattttcttctacgtacataaacatgtccaatacgttagacaacacaccgacgatggcggccgcaggatcctgcgaagcttacagacacgaatatgactaaaccgatgaccatttaaaaacccctctctagctttcacttaaactgtatcgatcattcttttagcacatgtataatataaaaacattattctatttcgaatttaggcttccaaaaatttttcatccgtaaaccgataataatatatatagacttgttaatagtcggaataaatagattaatgcttaaactatcatcatctccacgattagagatacaatatttacattctttttgctgtttcgaaactttatcaatacacgttaatacaaacccaggaaggagatattgaaactgaggctgttgaaaatgaaacggtgaatacaataattcagataatgtaaaatcatgattccgtattctgatgatattagaactgctaatggatgtcgatggtatgtatctaggagtatctattttaacaaagcatcgatttgctaatatacaattatccttttgattaattgttattttattcatattcttaaaaggtttcatatttatcaattcttctacattaaaaatttccatttttaatttatgtagccccgcaatactcctcattacgtttcattttttgtctataatatccattttgttcatctcggtacatagattatccaattgagaagcgcatttagtagttttgtacattttaagtttattgacgaatcgtcgaaaactagttatagttaacattttattatttgataccctgatattaatacccctgccgttactattatttataactgatgtaatccacgtaacattggaattaactatcgatagtaatgcatcgacgcttccaaaattgtctattataaactcaccgataatttttttattgcatgttttcatattcattaggattatcaaatctttaatcttattacgattgtatgcgttgatattacaagacgtcattctaaaagacggaggatctccatcaaatgccagacaatcacgtacaaagtacatggaaataggttttgttctattgcgcatcatagatttatatagaacacccgtagaaatactaatttgttttactctataaaatactaatgcatctatttcatcgttttgtataacgtctttccaagtgtcaaattccaaatttttttcattgatagtaccaaattcttctatctctttaactacttgcatagataggtaattacagtgatgcctacatgccgttttttgaaactgaatagatgcgtctagaagcgatgctacgctagtcacaatcaccactttcatatttagaatatatatatgtaaaaatatagtagaatttcattttgtttttttctatgctataaatgaattctcattttgcatctgctcatactccgttttatattaataccaaagaaggaagatatctggttctaaaagccgttaaagtatgcgatgttagaactgtagaatgcgaaggaagtaaagcttcctgcgtactcaaagtagataaaccctcatcgcccgcgtgtgagagaagaccttcgtccccgtccagatgcgagagaatgaataaccctggaaaacaagttccgtttatgaggacggacatgctacaaaatatgttcgcggctaatcgcgataatgtagcttctagacttttgtcctaaaatactattatatccttttcgatattaataaatccgtgtcgtccaggttttttatctctttcagtatgtgaatagataggtattttatctctattcatcatcgaatttaagagatccgataaacattgtttgtattctccagatgtcagcatctgatacaacaatatatgtgcacataaacctctggcacttatttcatgtaccttccccttatcactaaggagaatagtatttgagaaatatgtatacatgatattatcatgaattagatatacagaatttgtaacactctcgaaatcacacgatgtgtcggcgttaagatctaatatatcactcgataacacattttcatctagatacactagacattttttaaagctaaaatagtctttagtagtaacagtaactatgcgattattttcatcgatgatacatttcatcggcatattattacgcttaccatcaaagactataccatgtgtatatctaacgtattctagcatggttgccatacgcgcattaaacttttcaggatctttggatagatcttccaatctatctatttgagaaaacatttttatcatgttcaatagttgaaacgtcggatccactatatagatattatctataaagattttaggaactacgttcatggtatcctggcgaatattaaaactatcaatgatatgattatcgttttcatcttttatcaccatatagtttctaagatatgggattttacttaatataatattatttcccgtgataaattttattagaaaggccaaatctataagaaaagtcctagaattagtctgaagaatatctatatcgccgtatagtatatttggattaattagatatagagaatatgatccgtaacatatacaacttttattatggcgtctaagatattcttccatcaacttattaacatttttgactagggaagatacattatgacgtcccattacttttgccttgtctattactgcgacgttcatagaatttagcatatctcttgccaattcttccattgatgttacattataagaaattttagatgaaattacatttggagctttaatagtaagaactcctaatatgtccgtgtatgtggtcactaatacagattgtagttctataatcgtaaataatttacctatattatatgtttgagtctgtttagaaaagtagctaagtatacgatcttttatttctgatgcagatgtattaacatcggaaaaaaatctttttttattcttttttactaaagatacaaatatgtctttgttaaaaacagttattttctgaatatttctagcttgtaattttaacatatgatattcgttcacactaggtactctgcctaaataggtttctataatctttaatgtaatattaggaaaagtattctgatcaggattcctattcattttgaggatttaaaactctgattattgtctaatatggtctctacgcaaactttttcacagagcgatagagtttttgataactcgtttttcttaagaaatataaaactactgtctccagagctcgctctatcttttattttatctaattcgatacaaactcctgatactggttcagaaagtaattcattaattttcagtcctttatagaagatatttaatatagataatacaaaatcttcagtttttgatatcgatctgattgatcctagaactagatatattaataacgtgctcattaggcagtttatggcagcttgataattagatatagtatattccagttcatatttattagataccgcattgcccagattttgatattctatgaattcctctgaaaataaatccaaaataactagacattctattttttgtggattagtgtactctcttccctctatcatgttcactactggtgtccacgatgataaatatctagagggaatataatatagtccataggatgccaatctagcaatgtcgaataactgtaattttattcttcgctcttcattatgaattgattcttgaggtataaacctaacacaaattatattattagacttttcgtatgtaatgtctttcatgttataagtttttaatcctggaatagaatctattttaatgaggcttttaaacgcagagttctccaacgagtcaaagcataatactctgttgtttttcttatatacgatgttacgattttcttctttgaatggaataggtttttgaattagtttataattacaacataatagataaggaagtgtgcaaatagtacgcggaaaaaacataatagctcccctgttttcatccatggttttaagtaaatgatcactggcttctttagtcaatggatattcgaacattaaccgtttcatcatcattggacagaatccatatttcttaatgtaaagagtgatcaaatcattgtgtttattgtaccatcttgttgtaaatgtgtattcggttatcggatctgctcctttttctattaaagtatcgatgtcaatctcgtctaagaattcaactatatcgacatatttcatttgtatacacataaccattactaacgtagaatgtataggaagagatgtaacgggaacagggtttgttgattcgcaaactattctaatacataattcttctgttaatacgtcttgcacgtaatctattatagatgccaagatatctatataattattttgtaagatgatgttaactatgtgatctatataagtagtgtaataattcatgtattttgatatatgttccaactctgtctttgtgatgtctagtttcgtaatatctatagcatcctcaaaaaatatattcgcatatattcccaagtcttcagttctatcttctaaaaaatcttcaacgtatggaatataataatctattttacctcttctgatatcattaatgatatagtttttgacactatcttctgtcaattgattcttattcactatatctaagaaacggatagcgtccctaggacgaactactgccattaatatctctattatagcttctggacataattcatctattataccagaattaatgggaactattccgtatctatctaacatagttttaagaaagtcagaatctaagacttgatgttcatatattggttcatacatgaaatgatctctattgatgatagtgactatttcattctctgaaaattggtaactcattctatatatgctttccttgttgatgaaggatagaatatactcaatagaatttgtaccaacaaactgttctcttatgaatcgtatatcatcatctgaaataatcatgtaaggcatacatttaacaattagagacttgtctcctgttatcaatatactattcttgtgataatttatgtgtgaggcaaatttgtccacgttctttaattttgttatagtagatatcaaatccaatggagctacagttcttggcttaaacagatatagtttttctggaacaaattctacaacattattataaaggactttgggtagataagtgggatgaaatcctattttaattaatgcgatagccttgtcctcgtgcagatatccaaacgcttttgtgatagtatggcattcattgtctagaaacgctctacgaatatctgtgacagatatcatctttagagaatatactagtcgcgttaatagtactacaatttgtattttttaatctatctcaataaaaaaattaatatgtatgattcaatgtataactaaactactaactgttattgataactagaatcagaatctaatgatgacgtaaccaagaagtttatctactgccaatttagctgcattatttttagcatctcgtttagattttccatcggccttatcgaatactcttccgtcgatgtctacacaggcataaaatgtaggagagttactaggcccaactgattcaatacgaaaagaccaatctctcctagtaatttggcagtactcattaataacggtgacagggttagcatctttccaatcaataatttttttagccggaataacatcatcaaaagacttatgatcctctctcattgatttttcgcgggatacatcatctattatgacgtcagccatagcatcagcatccggcttatccgcctccgttgtcataaaccaacgaggaggaatatcgtcggagctgtacaccatagcactacgttgaagatcgtacagagctttattaacttctcgcttctccatattaagttgtctagttagttgtgcagcagtagctccttcgattccaatgtttttaatagccgcacacacaatctctgcgtcagaacgctcgtcaatatagatcttagacatttttagagagaactaacgcaaccagcaataaaactgaacctactttatcatttttttattcatcatcctctggtggttcgtcgttcctatcaaatgtagctctgattaacccgtcatctataggtgatgctggttctggagattctggaggagatggattattatctggaagaatctctgttatttccttgttttcatgtatcgattgcgttgtaacattaagattgcgaaatgctctaaatttgggaggcttaaagtgttgtttgcaatctctacacgcgtgtctaactagtggaggttcgtcagctgctctagtttgaatcatcatcggcgtagtattcctacttttacagttaggacacggtgtattgtatttctcgtcgagaacgttaaaataatcgttgtaactcacatcctttattttatctatattgtattctactcctttcttaatgcattttataccgaataagagatagcgaaggaattctttttcggtgccgctagtacccttaatcatatcacatagtgttttatattccaaatttgtggcaatagacggtttatttctatacgatagtttgtttctggaatcctttgagtattctataccaatattattctttgattcgaatttagtttcttcgatattagattttgtattacctatattcttgatgtagtactttgatgatttttccatggcccattctattaagtcttccaagttggcatcatccacatattgtgatagtaattctcggatatcagtagcggctaccgccattgatgtttgttcattggatgagtaactactaatgtatacattttccatttataacacttatgtattaactttgttcatttatattttttcattattatgttgatattaacaaaagtgaatatatatatgttaataattgtattgtggttatacggctacaattttataatgagtgaaagtcagtgtccgatgatcaatgacgatagctttactctgaaaagaaagtatcaaatcgatagtgcggagtcaacaataaaaatggataagaagaggataaagtttcagaatagagccaaaatggtaaaagaaataaatcagacaataagagcagcacaaactcattacgagacattgaaactaggatacataaaatttaagagaatgattatgactactactctagaagatatagcaccatctattccaaataatcagaaaacttataaactattctcggacatttcagccatcggcaaagcatcacagaatccgagtaagatggtatatgctctgctgctttacatgtttcccaatttgtttggagatgatcatagattcattcgttatagaatgcatccaatgagtaaaatcaaacacaagatcttctctcctttcaaacttaatcttattagaatattagtggaagaaagattctataataatgaatgcagatctaataaatggagaataattggaacacaagttgataaaatgttgatagctgaatctgataaatatacaatagatgcaaggtataacctaaaacccatgtatagaatcaagggagaatctgaagaagataccctctttatcaaacagatggtagaacaatgtgtgacatcccaggaattggtggaaaaagtgttgaagatactgtttagagatttgttcaagagtggagaatacaaagcgtacagatacgatgatgatgtagaaaatggatttattggattggatacactaaaattaaacattgttcatgatatagttgaaccatgtatgcctgttcgtaggccagtggctaagatactgtgtaaagaaatggtaaataaatactttgagaatccgctacatattattggtaaaaatcttcaagagtgcattgactttgttagtgaataggcatttcatctttctccaatactaattcaaattgttaaattaataatggatagtataaatagttattagttataagatagtaaaaataattattagaataagagtgtagtatcatagataactctcttctataaaaatggattttattcgtagaaagtatcttatatacacagtagaaaataatatagattttttaaaggatgatacattaagtaaagtaaacaattttaccctcaatcatgtactagctctcaagtatctagttagcaattttcctcaacacgttattactaaggatgtattagctaataccaatttttttgttttcatacatatggtacgatgttgtaaagtgtacgaagcggttttacgacacgcatttgatgcacccacgttgtacgttaaagcattgactaagaattatttatcgtttagtaacgcaatacaatcgtacaaggaaaccgtgcataaactaacacaagatgaaaaatttttagaggttgccgaatacatggacgaattaggagaacttataggcgtaaattatgacttagttcttaatccattatttcacggaggggaacccatcaaagatatggaaatcatttttttaaaactgtttaagaaaacagacttcaaagttgttaaaaaattaagtgttataagattacttatttgggcatacctaagcaagaaagatacaggcatagagtttgcggataatgatagacaaaatatatacactctatttcaacaaactggtagaatcgtccatagcaatctaacagaaacgtttagagattatatctttcccggagataagactagctattgggtgtggttaaacgaaagtatagctaatgatgcggatatcgttcttaatagacacgccattaccatgtatgataaaattcttagttatatatactctgagataaaacaaggacgcgttaataaaaacatgcttaagttagtttatatctttgagcctgaaaaagatatcagagaacttctgctagaaatcatatatgatattcctggagatatcctatctattattgatgcaaaaaacgacgattggaaaaaatattttattagtttttataaagctaattttattaacggtaatacatttattagtgatagaacgtttaacgaggacttattcagagttgttgttcaaatagatcccgaatatttcgataatgaacgaattatgtctttattctctacgagtgctgcggacattaaacgatttgatgagttagatattaataacagttatatatctaatataatttatgaggtgaacgatatcacattagatacaatggatgatatgaagaagtgtcaaatctttaacgaggatacgtcgtattatgttaaggaatacaatacatacctgtttttgcacgagtcggatcccatggtcatagagaacggaatactaaagaaactgtcatctataaaatccaagagtagacggctgaacttgtttagcaaaaacattttaaaatattatttagacggacaattggctcgtctaggtcttgtgttagatgattataaaggagacttgttagttaaaatgataaaccatcttaagtctgtggaggatgtatccgcattcgttcgattttctacagataaaaaccctagtattcttccatcgctaatcaaaactattttagctagttataatatttccatcatcgtcttatttcaaaggtttttgagagataatctatatcatgtagaagaattcttggataaaagcatccatctaaccaagacggataagaaatatatacttcaattgataagacacggtagatcatagaacagaccaaatatattattaataatttgtatatacatagatataattatcacacatttttgataaatgggaactgctgcaacaattcagactcccaccaaattaatgaataaagaaaatgcagaaatgattttggaaaaaattgttgatcatatagttatgtatattagtgacgaatcaagtgattcagaaaataatcctgaatatattgattttcgtaacagatacgaagactatagatctctcattataaaaagtgatcacgagtttgtaaagctatgtaaaaatcatgcggagaaaagttctccagaaacgcaacaaatgattatcaaacacatatacgaacaatatcttattccagtatctgaagtactattaaaacctataatgtccatgggtgacataattacatataacggatgtaaagacaatgaatggatgctagaacaactctctaccctaaactttaacaatctccgcacatggaactcatgtagcataggcaatgtaacgcgtctgttttatacattttttagttatctgatgaaagataaactaaatatataagtataatcccattctaatactttaacctgatgtattagcatcttattagaatattaacctaactaaaagacataacataaaaactcattacatagttgataaaaagcggtaggatataaatattatggctgccaccgttccgcgttttgacgacgtgtacaaaaatgcacaaagaagaattctagatcaagaaacattttttagtagaggtctaagtagaccgttaatgaaaaacacatatctatttgataattacgcgtatggatggataccagaaactgcaatttggagtagtagatacgcaaacctagatgctagtgactattatcccatttcgttgggattacttaaaaagttcgagtttctcatgtctctatataaaggtcctattcccgtatatgaagaaaaagtaaatactgaattcatagccaatggatcgttctctggtagatacgtatcatatcttcgaaagttttctgcccttccaacaaacgagtttattagttttttgttactgacttccattccaatctataatatcttgttctggtttaaaaacacacagtttgatattactaaacacacattattcagatacgtctatacagataatgccaaacacctggcgttggctaggtatatgcatcaaacaggagactataagcctttgtttagtcgtctcaaagagaattatatatttaccggtcccgttccaataagtatcaaagatatagatcaccctaatcttagtagagcaagaagtccatccgattatgagacattagctaatattagtactatattgtactttaccaagtatgatccggtattaatgtttttattgttttacgtacctgggtattcaattactacaaaaattactccagccgtagaatatctaatggataaactgaatctaacaaagagcgacgtacaactgttgtaaattattttatgcttcgtaaaatgtaggttttgaaccaaacattctttcaaagaatgagatgcataaaactttattatccaatagattgactatttcggacgtcaatcgtttaaagtaaacttcgtaaaatattctttgatcactgccgagtttaaaacttctatcgataattgtctcatatgttttaatatttacaagttttttggtccatggtacattagccggacaaatatatgcaaaataatatcgttctccaagttctatagtttctggattatttttattatattcagtaactaaatacatattagggttatctgcggatttataatttgagtgatgcattctactcaacataaataattctagaggagacgatctactatcaaattcggatcgtaaatctgtttctaaagaacggagaatatctatacatacctgattagaattcatccgtccttcagacaacatctcagacagtctggttttgtacatcttaatcatattcttatgaaacttggaaacatctcttctagtttcactagtacctttattaattctctcaggtacagattttgaattcgacgatgctgagtatttcatcgttgtatatttcttcttcgattgcataatcagattcttatataccgcctcaaactctattttaaaattattaaacaatactctattattaatcagtcgttctaactctttcgctatttctatagacttatctacatcttgactgtctatctctgtaaacacggagtcggtatctccatacacgctacgaaaacgaaatctgtaatctataggcaacgatgttttcacaatcggattaatatctctatcgtccatataaaatggattacttaatggattggcaaaccgtaacataccgttagataactctgctccatttagtaccgattctagatacaagatcattctacgtcctatggatgtgcaactcttagccgaagcgtatgagtatagagcactatttctaaatcccatcagaccatatactgagttggctactatcttgtacgtatattgcatggaatcatagatggccttttcagttgaactggtagcctgttttagcatctttttatatctggctctctctgccaaaaatgttcttaatagtctaggaatggttccttctatcgatctatcgaaaattgctatttcagagatgaggttcggtagtctaggttcacaatgaaccgtaatatatctaggaggtggatatttctgaagcaatagctgattatttatttcttcttccaatctattggtactaacaacgacaccgactaatgtttccggagatagatttccaaagatacacacattaggatacagactgttataatcaaagattaatacattattactaaacattttttgttttggagcaaataccttaccgccttcataaggaaacttttgttttgtttctgatctaactaagatagttttagtttccaacaatagctttaacagtggacccttgatgactgtactcgctctatattcgaataccatggattgaggaagcacatatgttgacgcacccgcgtctgtttttgtttctactccataatactcccacaaatactgacacaaacaagcatcatgaatacagtatctagccatatctaaagctatgtttagattataatccttatacatctgagctaaatcaacgtcatcctttccgaaagataatttatatgtatcattaggtaaagtaggacataatagtacgactttaaatccattttcccaaatatctttacgaattactttacatataatatcctcatcaacagtcacataattacctgtggttaaaacctttgcaaatgcagcggctttgcctttcgcgtctgtagtatcgtcaccgatgaacgtcatttctctaactcctctatttaatactttacccatgcaactgaacgcgttcttggatatagaatccaatttgtacgaatccaatttttcaaatttttgaatgaatgaatatagatcgaaaaatatagttccattattgttattaacgtgaaacgtagtattggccatgccgcctactcccttatgactagactgatttctctcataaatacagagatgtacagcttcctttttgtccggagatctaaagataattttctctcctgttaataactctagacgattagtaatatatctcagatcaaagttatgtccgttaaaggtaacgacgtagtcgaacgttagttccaacaattgtttagctattcgtaacaaaactatttcagaacatagaactagttctcgttcgtaatccatttccattagtgactgtatcctcaaacatcctctatcgacggcttcttgtatttcctgttccgttaacatctcttcattaatgagcgtaaacaataatcgtttaccacttaaatcgatataacagtaacttgtatgcgagattgggttaataaatacagaaggaaacttcttatcgaagtgacactctatatctagaaataagtacgatcttgggatatcgaatctaggtatttttttagcgaaacagttacgtggatcgtcacaatgataacatccattgttaatctttgtcaaatattgctcgtccaacgagtaacatccgtctggagatatcccgttagaaatataaaaccaactaatattgagaaattcatccatggtggcattttgtatgctgcgtttctttggctcttctatcaaccacatatctgcgacggagcattttctatctttaatatctagattataacttattgtctcgtcaatgtctatagttctcatctttcccaacggcctcgcattaaatggaggaggagacaatgactgatatatttcgtccgtcactacgtaataaaagtaatgaggaaatcgtataaatacggtctcgccatttcgacatctggatttcagatataaaaatctgttttcaccgtgactttcaaaccaattaatgcaccgaacatccatttatagaatttagaaatatattttcatttaaatgaatcccaaacattggggaagagccgtatggaccattatttttatagtactttcgcaagcgggtttagacggcaacatagaagcgtgtaaacgaaaactatatactatagttagcactcttccatgtcctgcatgtagacggcacgcgactatcgctatagaggacaataatgtcatgtctagcgatgatctgaattatatttattattttttcatcagattatttaacaatttggcatctgatcccaaatacgcgatcgatgtgacaaaggttaaccctttataaacttaacccattataaaacttatgattagtcacaactgaaataaccgcgtgattattttttggtataattctacacggcatggtttctgtgactatgaattcaacccccgttacattagtgaaatctttaacaaacagcaagggttcgtcaaagacataaaactcattgtttacaatcgaaatagaccccctatcacacttaaaataaaaaatatccttatcctttaccaccaaataaaattctgattggtcaatgtgaatgtattcacttaacagttccacaaatttatttattaactccgaggcacatacatcgtcggtattttttatggcaaactttactcttccagcatccgtttctaaaaaaatattaacgagttccatttatatcatccaatattattgaaatgacgttgatggacagatgatacaaataagaaggtacggtacctttgtccaccatctcctccaattcatgctctattttgtcattaactttaatgtatgaaaacagtacgccacatgcttccatgacagtgtgtaacactttggatacaaaatgtttgacattagtataattgtccaagactgtcaatctataatagatagtagctataatatattctatgatggtattgaagaagatgacaaccttggcatattgatcatttaacacagacatggtatcaacagatagcttgaatgaaagagaatcagtaattggaataagcgtcttctcgatagagtgtccgtataccaacatgtctgatattttgatgtattccattaaattatttagttttttctttttattctcgttaaacagcatttctgtcaacggaccccaacatcgttgaccgattaagttttgattgatttttccgtgtaaggcgtatctagtcagatcgtatagcctatccaataatccatcgtctgtgtgtagatcacatcgtacactttttaattctctatagaagagcgacagacatctggagcaattacagacagcaatttctttattctctacagatgtaagatacttgaagacattcctatgatgatgcagaattttggataacacggtattgatggtatctgttaccataattcctttgatggctgatagtgtcagagcacaagatttccaatctttgacaatttttagcaccattatctttgttttgatatctatatcagacagcatggtgcgtctgacaacacagggattaagacggaaagatgaaatgattctctcaacatcttcaatagataccttgctattttttctggcattatctatatgtgcgagaatatcctctagagaatcagtatcctttttgatgatagtggatctcaatgacatgggacgtttaaaccttcttattctatcaccagattgcatggtgatttgtcttctttcttttatcataatgtaatctctaaattcatcggcaaattgtctatatctaaaatcataatatgagatgtttacctctacaaatatctgttcgtccaatgttagagtatttacatcagttttgtattccaaattaaacatggcaacggatttaattttatattcctctattaagtcctcgtcgataataacagaatgtagataatcatttaatccgtcgtacatggttggaagatgcttgttgacaaaatctttaattgtcttgatgaaggtgggactatatctaacatcttgattaataaaatttataacattgtccataggatactttgtaactagttttatacacatctcttcatcggtaagtttagacagaatatcgtgaacaggtggtatattatattcatcagatatacgaagaacaatgtccaaatctatattgtttaatatattatatagatgtagcgtagctcctacaggaatatctttaactaagtcaatgatttcatcaaccgttagatctattttaaagttaatcatataggcattgatttttaaaaggtatgtagccttgactacattctcattaattaaccattccaagtcattgtgtgtaagaagattatattctatcataagcttgactacatttggtcccgataccattaaagaattcttatgatataaggaaacagattttaggtactcatctactctacaagaattttggagagccttaacgatatcagtgacgtttattatttcaggaggaaagaatctaacattgagaatatcggaattaatagcttccagatacagtgattttggcaatagtccgtgtaatccataatccagtaacacgagctggtgcttgctagacaccttttcaatgtttaatttttttgaaataagctttgataaagccttcctcgcaaattccggatacatgaacatgtcggcgacatgattaagtattgttttttcattatttttatattttctcaacaagttctcaataccccaatagatgatagaatatcacccaatgcgtccatgttgtctatttccaacaggtcgctatatccaccaatagaagtttttccaaaaaagattctaggaacagttctaccaccagtaatttgttcaaaataatcccgcaattcattttcgggtttaaattctttaatatcgacaatttcatacgctcctcttttgaaactaaacttatttagaatatccagtgcatttctacaaaaaggacatgtatacttgacaaaaattgtcactttgttattggccaacctttgttgtacaaattcctcggccattttaatatttaagtgatataaaactatctcgacttatttaactctttagtcgagatatatggacgcagatagctatatgatagccaactacagaaggcaaacgctataaaaaacataattacgacgagcatatttataaatatttttattcagcattacttgatatagtaatattaggcacagtcaaacattcaaccactctcgatacattaactctctcattttctttaacaaattctgcaatatcttcgtaaaaagattcttgaaactttttagaatatctatcgactctagatgaaatagcgttcgtcaacatactatgttttgtatacataaaggcgcccattttaacagtttctagtgacaaaatgctagcgatcctaggatcctttagaatcacatagattgacgattcgtctctcttagtaactctagtaaaataatcatacaatctagtacgcgaaataatattatccttgacttgaggagatctaaacaatctagttttgagaacatcgataagttcatcgggaatgacatacatactatctttaatagaactcttttcatccagttgaatggattcgtccttaaccaactgattaatgagatcttctattttatcattttccagatgatatgtatgtccattaaagttaaattgtgtagcgcttctttttagtctagcagccaatactttaacatcactaatatcgatatacaaaggagatgatttatctatggcattaagaattcgtttttcgacatccgtcaaaaccaattcctttttgcctgtatcatccagttttccatcctttgtaaagaaattattttctactagactattaataagactgataaggattcctccataattgcacaatccaaactttttaacaaaactagactttacgagatctacaggaatgcgtacttcaggttttttagcttgtgattttttcttttgcggacattttctagtaaccaactcatctaccatttcattgattttagcagtgaaataagctttcaatgcacgggcactgatactattgaaaacgagttgatcttcaaattccgccatttaagttcaccaaacaacttttaaatacaaatatatcaatagtagtagaataagaactataaaaaaaataataattaaccaaccccaacaaccggtattattagttgatgtggtagttttctcatcacttagaacagatttaacaatttctataaagtctgtcaaatcatcttccggagaccccataaatacaccaaatatagcggcgtacaacttatccatttatacattgaatattggcttttctttatcgctatcttcatcatattcatcatcaatatcaacaagtcccagattacgagccagatcttcttctacattttcagtcattgatacacgttcactatctccagagagtccgataacgttagccaccacttctctatcaatgattagtttcttgagcgcgaaagtaatttttgtttccgttccggatctatagaagacgataggtgtgataattgccttggccaattgtctttctcttttactgagtgattctagttcaccttctatagatctgagaatggatgattctccagtcgaaacatattctaccatggatccgtttaatttgttgatgaagatggattcatccttaaatgttttctctgtaatagtttccaccgaaagactatgcaaagaatttggaatgcgttccttgtgcttaatgtttccatagacggcttctagaagttgatacaacataggactagccgcggtaacttttatttttagaaagtatccatcgcttctatcttgtttagatttatttttataaagtttagtctctccttccaacataataaaagtggaagtcatttgactagataaactatcagtaagttttatagagatagacgaacaattagcgtattgagaagcatttagtgtaacgtattcgatacattttgcattagatttactaatcgattttgcatactctataacacccgcacaagtctgtagagaatcgctagatgcagtaggtcttggtgaagtttcaactctcttcttgattaccttactcatgattaaacctaaataattgtactttgtaatataatgatatatattttcactttatctcatttgagaataaaaatgtttttgtttaaccactgcatgatgtacagatttcggaatcgcaaaccaccagtggttttattttatccttgtccaatgtgaattgaatgggagcggatgcgggtttcgtacgtagatagtacattcccgtttttagaccgagactccatccgtaaaaatgcatactcgttagtttggaataactcggatctgctatatggatattcatagattgactttgatcgatgaaggctcccctgtctgcagccatttttatgatcgtcttttgtggaatttcccaaatagttttataaactcgcttaatatcttctggaaggtttgtattctgaatggatccaccatctgccataatcctattcttgatctcatcattccataattttctctcggttaaaactctaaggagatgcggattaactacttgaaattctccagacaatactctccgagtgtaaatattactggtatacggttccaccgactcattatttcccaaaatttgagcagttgatgcagtcggcataggtgccaccaataaactatttctaagaccgtatgttctgattttatcttttagaggttcccaattccaaagatccgacggtacaacattccaaagatcatattgtagaataccgttactggcgtacgatcctacatatgtatcgtatggtccttccttctcagctagttcacaactcgcctctaatgcaccgtaataaatggtttcgaagatcttcttatttagatcttgtgcttccaggctatcaaatggataatttaagagaataaacgcgtccgctaatccttgaacaccaataccgataggtctatgtctcttattagagatttcagcttctggaataggataataattaatatctataattttattgagatttctgacaattactttgaccacatccttcagtttgagaaaatcaaatcgcccatctattacaaacatgttcaaggcaacagatgccagattacaaacggctacctcattagcatccgcatattgtattatctcagtgcaaagattactacacttgatagttcctaaattttgttgattactctttttgttacacgcatccttataaagaatgaatggagtaccagtttcaatctgagattctataatcgctttccagacgactcgagcctttattatagatttgtatctcctttctctttcgtatagtgtatacaatcgttcgaactcgtctccccaaacattgtccaatccaggacattcatccggacacatcaacgaccactctccgtcatccttcactcgtttcataaagagatcaggaatccaaagagctataaatagatctctggttctatgttcctcgtttcctgtattctttttaagatcgaggaacgccataatatcagaatgccacggttccaagtatatggccataactccaggccgtttgtttcctccctgatctatgtatctagcggtgttattataaactctcaacattggaataataccgtttgatataccattggtaccggagatatagcttccactggcacgaatattactaattgatagacctattccccctgccattttagagattaatgcgcatcgttttaacgtgtcatagataccctctatgctatcatcgatcatgttaagtagaaaacagctagacatttggtgacgactagttcccgcattaaataaggtaggagaagcgtgcgtaaaccatttttcagaaagtagattgtacgtctcaatagctgagtctatatcccattgatgaattcctactgcgacacgcattaacatgtgctgaggtctttcaacgatcttgttgtttattttcaacaagtaggatttttccaaagttttaaaaccaaaatagttgtatgaaaagtctcgttcgtaaataataaccgagttgagtttatccttatatttgttaactatatccatggtgatacttgaaataatcggagaatgtttcccatttttaggattaacatagttgaataaatcctccatcacttcactaaatagtttttttgtttccttgtgtagatttgatacggctattctggcggctagaatggcataatccggatgttgtgtagtacaagtggctgctatttcggctgccagagtgtccaattctaccgttgttactccattatatattccttgaataaccttcatagctattttaataggatctatatgatccgtgtttaagccataacataattttctaatacgagacgtgattttatcaaacatgacattttccttgtatccatttcgtttaatgacaaacatttttgttggtgtaataaaaaaattatttaacttttcattaatagggatttgacgtatgtagcgtacaaaatgattgttcctggtatatagataaagagtcctatatatttgaaaatcgttacggctcgattaaactttaatgattgcatagtgaatatatcattaggatttaactccttgactatcatggcggcgccagaaattaccatcaaaagcattaatacagttataccgatcgcagttagaacggttatagcatccaccatttatatctaaaaattagatcaaagaatatgtgacaaagtcctagttgtatactgagaattgacgaaacaatgtttcttacatatttttttcttattagtaaccgacttaatagtaggaactggaaaactagacttgattattctataagtatagatacccttccaaataatattctctttgataaaagttccagaaaatgtagaattttttaaaaagttatcttttgctattaccaagattgtgtttagacgcttattattaatatgagtgatgaaatccacaccgcctctagatatcgcctttatttccacattagatggtaaatccaatagtgaaactatctttttaggaatgtatggactcgcgtttagaggagtaaacgtcttaggcgtcggaaaggatgattcatcaaacgaataaacaatttcacaaatggatgttaatgtattagtaggaaattttttgacgctattggaattgaagattctaatggatgatgttctacctatttcatccgataacatgttaatttccgacaccaacggttttaatatttcgatgatatacggtagtctctctttcggacttatatagcttattccacaatacgagtcattatatactccaaaaaacaaaataactagtataaaatctgtatcgaatgggaaaaacgaaattatcgacataggtatagaatccggaacattgaacgtattaatacttaattctttttctgtggtaagtaccgataggttattgacattgtatggttttaaatattctataacttgagacttgatagatattagtgatgaattgaaaattatttttatcaccacgtgtgtttcaggatcatcgtcgacgcccgtcaaccaaccgaacggagtaaaataaatatcattaatatatgctctagatattagtatttttatcaatcctttgattatcatcttctcgtaggcgaatgattccatgatcaagagtgatttaagaacatcctccggagtattaatgggcttagtaaacagtccatcgttgcaataataaaagttatccaagttaaaggatattatgcattcgtttaaagatatcacctcatctgacggagacaattttttggtaggttttagagactttgaagctacttgtttaacaaagttattcatcgtcgtctactattctatttaattttgtagttaatttatcacatatcacattaattgactttttggtccacttttccatacgtttatattcttttaatcctgcgttatccgtttccgttatatccagggatagatcttgcaagttaaatagaatgctcttaaataatgtcattttcttatccgctaaaaatttaaagaatgtataaacctttttcagagatttgaaactcttaggtggtgtcctagtacacaatatcataaacaaactaataaacattccacattcagattccaacagctgattaacttccacattaatacagcctattttcgctccaaatgtacattcgaaaaatctgaataaaacatcgatgtcacaatttgtattatccaatacagaatgtttgtgattcgtgttaaaaccatcggagaaggaatagaaataaaaattattatagtggtggaattcagttggaatattgcctccggagtcataaaaggatactaaacattgttttttatcataaattacacatttccaatgagacaaataacaaaatccaaacattacaaatctagaggtagaacttttaattttgtctttaagtatatacgataagatatgtttattcataaacgcgtcaaatttttcatgaatcgctaaggagtttaagaatctcatgtcaaattgtcctatataatccacttcggatccataagcaaactgagagactaagttcttaatacttcgattgctcatccaggctcctctctcaggctctattttcatcttgacgacctttggattttcaccagtatgtattcctttacgtgataaatcatcgattttcaaatccatttgtgagaagtctatcgccttagatactttttcccgtagtcgaggtttaaaaaaatacgctaacggtatactagtaggtaactcaaagacatcatatatagaatggtaacgcgtctttaactcgtcggttaactctttcttttgatcgagttcgtcgctactattgggtctgctcaggtgccccgactctactagttccaacatcataccgataggaatacaagacactttgccggcggttgtagatttatcatatttttccactacatatccgttacaatttgttaaaaatttagatacatctatattgctacataatccagctagtgaatatatatgacataataaattggtaaatcctagttctggtattttactaattactaaatctgtatatctttccatttatcatggaaaagaatttaccagatatcttcttttttccaaactgcgttaatgtattctcttacaaatattcacaagatgaattcagtaatatgagtaaaacggaacgtgatagtttctcattggccgtgtttccagttataaaacatagatggcataacgcacacgttgtaaaacataaaggaatatacaaagttagtacagaagcacgtggaaaaaaagtatctcctccatcactaggaaaacccgcacacataaacctaaccgcgaagcaatatatatacagtgaacacacaataagctttgaatgttatagttttctaaaatgtataacaaatacagaaatcaattcgttcgatgagtatatattaagaggactattagaagctggtaatagtttacagatattttccaattccgtaggtaaacgaacagatactataggtgtactagggaataagtatccatttagcaaaattccattggcctcattaactcctaaagcacaacgagagatattttcagcgtggatttctcatagacctgtagttttaactggaggaactggagtgggtaagacgtcacaggtacccaagttattgctttggtttaattatttatttggtggattctctactctagataaaatcactgactttcacgaaagaccagtcattctatctcttcctaggatagctttagttagattgcatagcaataccattttaaaatcattgggatttaaggtactagatggatctcctatttctttacggtacggatctataccggaagaattaataaacaaacaaccaaaaaaatatggaattgtattttctacccataagttatctctaacaaaactatttagttatggcactcttattatagacgaagttcatgagcatgatcaaataggagatattattatagcagtagcgagaaagcatcatacgaaaatagattctatgtttttaatgactgccacgttagaggatgacagggaacggctaaaagtatttttacctaatcccgcatttatacatattcctggagatacactgtttaaaattagcgaggtatttattcataataagataaatccatcttccagaatggcatacatagaagaagaaaagagaaatttagttactgctatacagatgtatactcctcctgatggatcatccggtatagtctttgtggcatccgttgcacagtgtcacgaatataaatcatatttagaaaaaagattaccgtatgatatgtatattattcatggtaaggtcttagatatagacgaaatattagaaaaagtgtattcatcacctaatgtatcgataattatttctactccttatttggaatccagcgttactatacgcaatgttacacacatttatgatatgggtagagtttttgtccccgctccttttggaggatcgcaacaatttatttctaaatctatgagagatcaacgaaaaggaagagtaggaagagttaatcctggtacatacgtctatttctatgatctgtcttatatgaagtctatacagcgaatagattcagaatttctacataattatatattgtacgctaataagtttaatctaacactccccgaagatttgtttataatccctacaaatttggatattctatggcgtacaaaggaatatatagactcgttcgatattagtacagaaacatggaataaattattatccaattattatatgaagatgatagagtatgctaaactttatgtactaagtcctattctcgctgaggagttggataactttgagaggacgggagaattaactagtattgtacgagaagccattttatctctaaatttacaaattaagattttaaattttaaacataaagatgatgatacgtatatacacttttgtaaaatattattcggtgtctataacggaacaaacgctactatatattatcatagacctctaacgggatatatgaatatgatttcagatactatatttgttcctgtagataataactaaaaatcaaactctaatgaccacatctttttttagagatgaaaaattttccacatctccttttgtagacacgactaaacattttgcagaaaaaagtttattagtgtttagataatcgtatacttcatcagtgtagatagtaaatgtgaacagataaaaggtattcttgctcaatagattggtaaattccatagaatatattaatcctttcttcttgagatcccacatcatttcaaccagagacgttttatccaatgatttacctcgtactataccacatacaaaactagattttgcagtgacgtcgtacctggtattcctaccaaacaaaattttacttttagttcttttagaaaattctaaggtagaatctctatttgccaatatgtcatctatggaattaccactagcaaaaaatgatagaaatatatattgatacatcgcagctggttttgatctactatactttaaaaacgaatcagattccataattgcctgtatatcatcagctgaaaaactatgttttacacgtattccttcggcatttctttttaatgatatatcttgtttagacaatgataaagttatcatgtccatgagagacgcgtctccgtatcgtataaatatttcattagatgttagacgcttcattaggggtatacttctataaggtttcttaatcagtccatcattggttgcgtcaagaactactatcggatgttgttgggtatctctagtgttacacatggccttactaaagtttgggtaaataactatgatatctctattaattatagatgcatatatttcattcgtcaaggatattagtatcgacttgctatcgtcattaatacgtgtaatgtaatcatataaatcatgcgatagccaaggaaaatttaaatagatgttcatcatataatcgtcgctataattcatattaatacgttgacattgactaatttgtaatatagcctcgccacgaagaaagctctcgtattcagtttcatcgataaaggataccgttaaatataactggttgccgatagtctcatagtctattaagtggtaagtttcgtacaaatacagaatccctaaaatattatctaatgttggattaatctttaccataactgtataaaatggagacggagtcataactattttaccgtttgtacttactggaatagatgaaggaataatctccggacatgctggtaaagacccaaatgtctgtttgaagaaatccaatgttccaggtcctaatctcttaacaaaaattacgatattcgatcccgatatcctttgcattctatttaccagcatatcacgaactatattaagattatctatcatgtctattctcccaccgttatataaatcgcctccgctaagaaacgttagtatatccatacaatggaatacttcatttctaaaatagtattcgttttctaattctttaatgtgaaatcgtatactagaaagggaaaaattatctttgagttttccgttagaaaagaaccacgaaactaatgttctgattgcgtccgattccgttgctgaattaatggatttacaccaaaaactcatataacttctagatgtagaagcattcgctaaaaaattagtagaatcaaaggatataagtagatgttccaacaagtgagcaattcccaagatttcatctatatcattctcgaatccgaaattagaaattcccaagtagatatcctttttcatccgatcgttgatgaaaatacgaactttattcggtaagacaatcatttactaaggagtaaaataggaagtaatgttcgtatgtcgttatcatcgtataaattaaaggtgtgttttttaccattaagtgacattataattttaccaatattggaattataatataggtgtatttgcgcactcgcgacggttgatgcatcggtaaatatagctgtatctaatgttctagtcggtatttcatcatttcgctgtctaataatagcgttttctctatctgtttccattacagctgcctgaagtttattggtcggataatatgtaaaataataagaaatacatacgaataacaaaaataaaataagatataataaagatgccatttagagatctaattttgtttaacttgtccaaattcctacttacagaagatgaggaatcgttggagatagtgtcttccttatgtagaggatttgaaatatcttataatgacttgataacttactttccagataggaaataccataaatatatttataaagtatttgaacatgtagatttatcggaggaattaagtatggaattccatgatacaactctgagagatttagtctatcttagattgtacaagtattccaagtgtatacggccgtgttataaattaggagataatctaaaaggcatagttgttataaaggacaggaatatttatattagggaagcaaatgatgacttgatagaatatctcctcaaggaatacactcctcagatttatacatattctaatgagcgcgtccccataactggttcaaaattaattctttgtggattttctcaagttacatttatggcgtatacaacgtcgcatataacaacaaataaaaaggtagatgttctcgtttccaaaaaatgtatagatgaactagtcgatccaataaattatcaaatacttcaaaatttatttgataaaggaagcggaacaataaacaaaatactcaggaagatattttattcggtaacaggtggccaaactccataggtagctttttctatttcggattttagaatttccaaattcaccagcgatttatcggttttggtgaaatccaaggatttattaatgtccacaaatgccatttgttttgtctgtggattgtatttgaaaatggaaacgatgtagttagatagatgcgctgcgaagtttcctattagggttccgcgcttcacgtcacccagcatacttgaatcaccatcctttaaaaaaaatgataagatatcaacatggagtatatcatactcgaattttaattcttctactgactcactgacattttcacaaatactacaatacggtttaccgaaaataatcagtacgttcttcatttatgggtatcaaaaacttaaaatcgttactgctggaaaataaatcactgacgatattagatgataatttatacaaagtatacaatggaatatttgtggatacaatgagtatttatatagccgtcgccaattgtgtcagaaacttagaagagttaactacggtattcataaaatacgtaaacggatgggtaaaaaagggagggcatgtaaccctttttatcgatagaggaagtataaaaattaaacaagacgttagagacaagagacgtaaatattctaaattaaccaaggacagaaaaatgttagaattagaaaagtgtacatccgaaatacaaaatgttaccggatttatggaagaagaaataaaggcagaaatgcaattaaaaatcgataaactcacatttcaaatatatttatctgattctgataacataaaaatatcattgaatgagatactaacacatttcaacaataatgagaatgttacattattttattgtgatgaacgagacgcagaattcgttatgtgtctcgaggctaaaacacatttctctaccacaggagaatggccgttgataataagtaccgatcaggatactatgctatttgcatctgctgataatcatcctaagatgataaaaaacttaactcaactgtttaaatttgttccctcggcagaggataactatttagcaaaattaacggcgttagtgaatggatgtgatttctttcctggactctatggggcatctataacacccaccaacttaaacaaaatacaattgtttagtgattttacaatcgataatatagtcactagtttggcaattaaaaattattatagaaagactaactctaccgtagacgtgcgtaatattgttacgtttataaacgattacgctaatttagacgatgtctactcgtatattcctccttgtcaatgcactgttcaagaatttatattttccgcattagatgaaaaatggaatgaatttaaatcatcttatttagaaagcgtgccgttaccctgccaattaatgtacgcgttagaaccacgcaaggagattgatgtttcagaagttaaaactttatcatcttatatagatttcgaaaatactaaatcagatatcgatgttataaaatctatatcctcgatcttcggatattctaacgaaaactgtaacacgatagtattcggcatctataaggataatttactactgagtataaataattcattttactttaacgatagtctgttaataaccaatactaaaagtgataatataataaatataggttactagattaaaaatggtgttccaactcgtgtgctctacatgcggtaaagatatttctcacgaacgatataaattgattatacgaaaaaaatcattaaaggatgtactcgtcagtgtaaagaacgaatgttgtaggttaaaattatctacacaaatagaacctcaacgtaacttaacagtgcaacctctattggatataaactaatatggatccggttaattttatcaagacatatgcgcctagaggttctattatttttattaattataccatgtcattaacaagtcatttgaatccatcgatagaaaaacatgtgggtatttattatggtacgttattatcggaacacttggtagttgaatctacctatagaaaaggagttcgaatagtcccattggatagtttttttgaaggatatcttagtgcaaaagtatacatgttagagaatattcaagttatgaaaatagcagctgatacgtcattaactttattgggtattccgtatggatttggtcatgatagaatgtattgttttaaattggtagctgactgttataaaaatgccggtattgatacatcgtctaaacgaatattgggcaaagatatttttctgagccaaaacttcacagacgataatagatggataaagatatatgattctaataatttaacattttggcaaattgattaccttaaagggtgagttaatatgcataactactcctccgttgttttttccctcgttctttttcttaacgttgtttgccatcactctcataatgtaaagatattctaaaatggtaaacttttgcatatcggacgcagaaattggtataaatgttgtaattgtattatttcccgtcaatggactagtcacagctccatcagttttatatcctttagagtatttctcactcgtgtctaacattctagagcattccatgatctgtttatcgttgatattggccggaaagatagattttttattttttattatattactattggcaattgtagatataacttctggtaaatatttttctaccttttcaatctcttctattttcaagccggctatatattctgctatattgttgctagtatcaataccttttctggctaagaagtcatatgtggtattcactatatcagttttaactggtagttccattagcctttccacttctgcagaataatcagaaattggttctttaccagaaaatccagctactataataggctcaccgatgatcattggcaaaatcctatattgtaccagattaatgagagcatatttcatttccaataattctgctagttcttgagacattgatttatttgatgaatctagttggttctctagatactctaccatttctgccgcatacaataacttgttagataaaatcagggttatcaaagtgtttagcgtggctagaatagtgggcttgcatgtattaaagaatgcggtagtatgagtaaaccgttttaacgaattatatagtctccagaaatctgtggcgttacatacatgagccgaatgacatcgaagattgtccaatatttttaatagctgctctttgtccattatttctatatttgactcgcaacaattgtagataccattaatcaccgattcctttttcgatgccggacaatagcacaattgtttagctttggactctatgtattcagaattaatagatatatctctcaatacagattgcactatacattttgaaactatgtcaaaaattgtagaacgacgctgttctgcagccatttaactttaaataatttacaaaaatttaaaatgagcatccgtataaaaatcgataaactgcgccaaattgtggcatatttttcagagttcagtgaagaagtgtctataaatgtagactcgacggatgagttaatgtatatttttgccgccttgggcggatctgtaaacatttgggcaattatacctctaagtgcatcagtgttttaccgaggagccgaaaatattgtgtttaatcttcctgtgtccaaggtaaaatcgtgtttgtgtagttttcacaatgatgccatcatagatatagaacctgatctggaaaataatctagtaaaactttctagttatcatgtagtaagtgtcgattgtaacaaggaactgatgcctattaggacagatactactatttgtctaagtatagatcaaaagaaatcttacgtgtttaattttcacaagtatgaagaaaaatgttgtggtagaaccgtcattcatctagaatggttgttgggctttatcaagtgtattagtcagcatcagcatctggctattatgtttaaagatgacaatattattatgaagactcctggtaatactgatgcgttttccagggaatattctatgactgaatgttctcaagaactacaaaagttttctttcaaaatagctatctcgtctctcaacaaactacgaggattcaaaaagagagtcaatgtttttgaaactagaatcgtaatggataatgacgataacattttaggaatgttgttttcggatagagttcaatcctttaagatcaacatctttatggcgtttttagattaatactttcaatgagataaatatgggtggcggagtaagtgttgagctccctaaacgggatccgcctccgggagtacccactgatgagatgttattaaacgtggataaaatgcatgacgtgatagctcccgctaagcttttagaatatgtgcatataggaccactagcaaaagataaagaggataaagtaaagaaaagatatccagagtttagattagtcaacacaggacccggtggtctttcggcattgttaagacaatcgtataatggaaccgcacccaattgctgtcgcacttttaatcgtactcattattggaagaaggatggaaagatatcagataagtatgaagagggtgcagtattagaatcgtgttggccagacgttcacgacactggaaaatgcgatgttgatttattcgactggtgtcagggggatacgttcgatagaaacatatgccatcagtggatcggttcagcctttaataggagtaatagaactgtagagggtcaacaatcgttaataaatctgtataataagatgcaaacattatgtagtaaagatgctagtgtaccaatatgcgaatcatttttgcattatttacgcgcacacaatacagaagatagcaaagagatgatcgattatattctaagacaacagtctgcggactttaaacagaaatatatgagatgtagttatcccactagagataagttagaagagtcattaaaatatgcggaacctcgagaatgttgggatccagagtgttcgaatgccaatgttaatttcttactaacacgtaattataataatttaggactttgcaatattgtacgatgtaataccagcgtgaacaacttacagatggataaaacttcctcattaagattgtcatgtggattaagcaatagtgatagattttctactgttcccgtcaatagagcaaaagtagttcaacataatattaaacactcgttcgacctaaaattgcatttgatcagtttattatctctcttggtaatatggatactaattgtagctatttaaatgggtgccgcggcaagcatacagacgacggtgaatacactcagcgaacgtatctcgtctaaattagaacaagaagcgaacgctagtgctcaaacaaaatgtgatatagaaatcggaaatttttatatccgacaaaaccatggatgtaacctcactgttaaaaatatgtgctctgcggacgcggatgctcagttggatgctgtgttatcagccgctacagaaacatatagtggattaacaccggaacaaaaagcatacgtgccagctatgtttactgctgcgttaaacattcagacgagtgtaaacactgttgttagagattttgaaaattatgtgaaacagacttgtaattctagcgcggtcgtcgataacaaattaaagatacaaaacgtaatcatagatgaatgttacggagccccaggatctccaacaaatttggaatttattaatacaggatctagcaaaggaaattgtgccattaaagcgttgatgcaattgacgactaaggccactactcaaatagcacctagacaagttgctggtacaggagttcagttttatatgattgttatcggtgttataatattggcagcgttgtttatgtactatgccaagcgtatgttgttcacatccaccaatgataaaatcaaacttattttagccaataaggaaaacgtccattggactacttacatggacacattctttagaacttctccgatggttattgctaccacggatatgcaaaactgaaaatatattgataatattttaatagattaacatggaagttatcgctgatcgtctagacgatatagtgaaacaaaatatagcggatgaaaaatttgtagattttgttatacacggtctagagcatcaatgtcctgctatacttcgaccattaattaggttgtttattgatatactattatttgttatagtaatttatatttttacggtacgtctagtaagtagaaattatcaaatgttgttggtggtgctagtcatcacattaactattttttattactttatactataatagtactagactgacttctaacaaacatctcacctgccataaataaatgcttgatattaaagtcttctatttctaacactattccatctgtggaaaataatactctgacattatcgctaattgacacatcggtgagtgatatgcctataaagtaataatcttctttgggcacatataccagtgtaccaggttctaacaacctatttactggtgctcctgtagcatactttttctttaccttgagaatatccatcgtttgcttggtcaatagcgatatgtgattttttatcaaccactcaaaaaagtaattggagtgttcatatcctctacgggctattgtctcatggccgtgtatgaaatttaagtaacacgactgtggtagatttgttctatagagccgattgccgcaaatagatagaactaccaatatgtctgtacaaatgttaaacattaattgattaacagaaaaaacaatgttcgttctgggaatagaaaccagatcaaaacaaaattcgttagaatatatgccacgtttatacatggaatataaaataactacagtttgaaaaataacagtatcatttaaacatttaacttgcggggttaatctcacaactttactgtttttgaactgttcaaaatatagcatcgatccgtgagaaatacgtttagccgcctttaatagaggaaatcccaccgcctttctggatctcaccaacgacgatagttctgaccagcaactcatttcttcatcatccacctgttttaacatataataggcaggagatagatatccgtcattgcaatattccttctcgtaggcacacaatctaatattgataaaatctccattctcttctctgcatttattatcttgtctcggtggctgattaggctgtggtcttggtttaggccttggtctatcgttgttgaatctattttggtcattaaatctttcatttcttcctggtatatttctatcacctcgtttggttggatttttgtctatattatcgtttgtaacatcggtacgggtattcatttatcacaaaaaaaacttctctaaatgagtctactgctagaaaacctcatcgaagaagataccatattttttgcaggaagtatatctgagtatgatgatttacaaatggttattgccggcgcaaaatccaaatttccaagatctatgctttctatttttaatatagtacctagaacgatgtcaaaatatgagttggagttgattcataacgaaaatatcacaggagcaatgtttaccacaatgtataatataagaaacaatttgggtctaggagatgataaactaactattgaagccattgaaaactatttcttggatcctaacaatgaagttatgcctcttattattaataatacggatatgactgccgtcattcctaaaaaaagtggtaggagaaagaataagaacatggttatcttccgtcaaggatcatcacctatcttgtgcattttcgaaactcgtaaaaagattaatatttataaagaaaatatggaatccgcgtcgactgagtatacacctatcggagacaacaaggctttgatatctaaatatgcgggaattaatgtcctgaatgtgtattctccttccacatccataagattgaatgccatttacggattcaccaataaaaataaactagagaaacttagtactaataaggaactagaatcgtatagttctagccctcttcaagaacccattaggttaaatgattttctgggactattggaatgtgttaaaaagaatattcctctaacagatattccgacaaaggattgattactataaatggagaatgttcctaatgtatactttaatcctgtgtttatagagcccacgtttaaacattctttattaagtgtttataaacacagattaatagttttatttgaagtattcgttgtattcattctaatatatgtattttttagatctgaattaaatatgttcttcatgcctaaacgaaaaatacccgatcctattgatagattacgacgtgctaatctagcgtgtgaagacgataaattaatgatctatggattaccatggatgacaactcaaacatctgcgttatcaataaatagtaaaccgatagtgtataaagattgtgcaaagcttttgcgatcaataaatggatcacaaccagtatctcttaacgatgttcttcgcagatgatgattcattttttaagtatttggctagtcaagatgatgaatcttcattatctgatatattgcaaatcactcaatatctagactttctgttattattattgatccaatcaaaaaataaattagaagctgtgggtcattgttatgaatctctttcagaggaatacagacaattgacaaaattcacagactttcaagattttaaaaaactgtttaacaaggtccctattgttacagatggaagggtcaaacttaataaaggatatttgttcgactttgtgattagtttgatgcgattcaaaaaagaatcctctctagctaccaccgcaatagatcctgttagatacatagatcctcgtcgcaatatcgcattttctaacgtgatggatatattaaagtcgaataaagtgaacaataattaattctttattgtcatcatgaacggcggacatattcagttgataatcggccccatgttttcaggtaaaagtacagaattaattagacgagttagacgttatcaaatagctcaatataaatgcgtgactataaaatattctaacgataatagatacggaacgggactatggacgcatgataagaataattttgaagcattggaagcaactaaactatgtgatgtcttggaatcaattacagatttctccgtgataggtatcgatgaaggacagttctttccagacattgttgaattagatcgataaaaattaattaattacccgggtaccaggcctagatctgtcgagatccggtggtggtgcaaatcaaagaactgctcctcagtggatgttgcctttacttctaggcctgtacggaagtgttacttctgctctaaaagctgctgcagggggggggggggggtgggggggccggttagggccgccatcccctcagagcgtcgggatatcgggtggcggctcgggacggaggacgcgctagtgttcttctgtgtggcagttcagaatgatggatcaagctagatcagcattctctaacttgtttggtggagaaccattgtcatatacccggttcagcctggctcggcaagtagatggcgataacagtcatgtggagatgaaacttgctgtagatgaagaagaaaatgctgacaataacacaaaggccaatgtcacaaaaccaaaaaggtgtagtggaagtatctgctatgggactattgctgtgatcgtctttttcttgattggatttatgattggctacttgggctattgtaaaggggtagaaccaaaaactgagtgtgagagactggcaggaaccgagtctccagtgagggaggagccaggagaggacttccctgcagcacgtcgcttatattgggatgacctgaagagaaagttgtcggagaaactggacagcacagacttcaccagcaccatcaagctgctgaatgaaaattcatatgtccctcgtgaggctggatctcaaaaagatgaaaatcttgcgttgtatgttgaaaatcaatttcgtgaatttaaactcagcaaagtctggcgtgatcaacattttgttaagattcaggtcaaagacagcgctcaaaactcggtgatcatagttgataagaacggtagacttgtttacctggtggagaatcctgggggttatgtggcgtatagtaaggctgcaacagttactggtaaactggtccatgctaattttggtactaaaaaagattttgaggatttatacactcctgtgaatggatctatagtgattgtcagagcagggaaaatcacctttgcagaaaaggttgcaaatgctgaaagcttaaatgcaattggtgtgttgatatacatggaccagactaaatttcccattgttaacgcagaactttcattctttggacatgctcatctggggacaggtgacccttacacacctggattcccttccttcaatcacactcagtttccaccatctcggtcatcaggattgcctaatatacctgtccagacaatctccagagctgctgcagaaaagctgtttgggaatatggaaggagactgtccctctgactggaaaacagactctacatgtaggatggtaacctcagaaagcaagaatgtgaagctcactgtgagcaatgtgctgaaagagataaaaattcttaacatctttggagttattaaaggctttgtagaaccagatcactatgttgtagttggggcccagagagatgcatggggccctggagctgcaaaatccggtgtaggcacagctctcctattgaaacttgcccagatgttctcagatatggtcttaaaagatgggtttcagcccagcagaagcattatctttgccagttggagtgctggagactttggatcggttggtgccactgaatggctagagggatacctttcgtccctgcatttaaaggctttcacttatattaatctggataaagcggttcttggtaccagcaacttcaaggtttctgccagcccactgttgtatacgcttattgagaaaacaatgcaaaatgtgaagcatccggttactgggcaatttctatatcaggacagcaactgggccagcaaagttgagaaactcactttagacaatgctgctttccctttccttgcatattctggaatcccagcagtttctttctgtttttgcgaggacacagattatccttatttgggtaccaccatggacacctataaggaactgattgagaggattcctgagttgaacaaagtggcacgagcagctgcagaggtcgctggtcagttcgtgattaaactaacccatgatgttgaattgaacctggactatgagaggtacaacagccaactgctttcatttgtgagggatctgaaccaatacagagcagacataaaggaaatgggcctgagtttacagtggctgtattctgctcgtggagacttcttccgtgctacttccagactaacaacagatttcgggaatgctgagaaaacagacagatttgtcatgaagaaactcaatgatcgtgtcatgagagtggagtatcacttcctctctccctacgtatctccaaaagagtctcctttccgacatgtcttctggggctccggctctcacacgctgccagctttactggagaacttgaaactgcgtaaacaaaataacggtgcttttaatgaaacgctgttcagaaaccagttggctctagctacttggactattcagggagctgcaaatgccctctctggtgacgtttgggacattgacaatgagttttaaatgtgatacccatagcttccatgagaacagcagggtagtctggtttctagacttgtgctgatcgtgctaaattttcagtagggctacaaaacctgatgttaaaattccatcccatcatcttggtactactagatgtctttaggcagcagcttttaatacagggtagataacctgtacttcaagttaaagtgaataaccacttaaaaaatgtccatgatggaatattcccctatctctagaattttaagtgctttgtaatgggaactgcctctttcctgttgttgttaatgaaaatgtcagaaaccagttatgtgaatgatctctctgaatcctaagggctggtctctgctgaaggttgtaagtggtcgcttactttgagtgatcctccaacttcatttgatgctaaataggagataccaggttgaaagaccttctccaaatgagatctaagcctttccataaggaatgtagctggtttcctcattcctgaaagaaacagttaactttcagaagagatgggcttgttttcttgccaatgaggtctgaaatggaggtccttctgctggataaaatgaggttcaactgttgattgcaggaataaggccttaatatgttaacctcagtgtcatttatgaaaagaggggaccagaagccaaagacttagtatattttcttttcctctgtcccttcccccataagcctccatttagttctttgttatttttgtttcttccaaagcacattgaaagagaaccagtttcaggtgtttagttgcagactcagtttgtcagactttaaagaataatatgctgccaaattttggccaaagtgttaatcttaggggagagctttctgtccttttggcactgagatatttattgtttatttatcagtgacagagttcactataaatggtgtttttttaatagaatataattatcggaagcagtgccttccataattatgacagttatactgtcggttttttttaaataaaagcagcatctgctaataaaacccaacagatactggaagttttgcatttatggtcaacacttaagggttttagaaaacagccgtcagccaaatgtaattgaataaagttgaagctaagatttagagatgaattaaatttaattaggggttgctaagaagcgagcactgaccagataagaatgctggttttcctaaatgcagtgaattgtgaccaagttataaatcaatgtcacttaaaggctgtggtagtactcctgcaaaattttatagctcagtttatccaaggtgtaactctaattcccattttgcaaaatttccagtacctttgtcacaatcctaacacattatcgggagcagtatcttccataatgtataaagaacaaggtagtttttacctaccacagtgtctgtatcggagacagtgatctccatatgttacactaagggtgtaagtaattatcgggaacagtgtttcccataattttcttcatgcaatgacatcttcaaagcttgaagatcgttagtatctaacatgtatcccaactcctataattccctatcttttagttttagttgcagaaacattttgtggtcattaagcattgggtgggtaaattcaaccactgtaaaatgaaattactacaaaatttgaaatttagcttgggtttttgttacctttatggtttctccaggtcctctacttaatgagatagtagcatacatttataatgtttgctattgacaagtcattttaactttatcacattatttgcatgttacctcctataaacttagtgcggacaagttttaatccagaattgaccttttgacttaaagcagagggactttgtatagaaggtttgggggctgtggggaaggagagtcccctgaaggtctgacacgtctgcctacccattcgtggtgatcaattaaatgtaggtatgaataagttcgaagctccgtgagtgaaccatcattataaacgtgatgatcagctgtttgtcatagggcagttggaaacggcctcctagggaaaagttcatagggtctcttcaggttcttagtgtcacttacctagatttacagcctcacttgaatgtgtcactactcacagtctctttaatcttcagttttatctttaatctcctcttttatcttggactgacatttagcgtagctaagtgaaaaggtcatagctgagattcctggttcgggtgttacgcacacgtacttaaatgaaagcatgtggcatgttcatcgtataacacaatatgaatacagggcatgcattttgcagcagtgagtctcttcagaaaacccttttctacagttagggttgagttacttcctatcaagccagtacgtgctaacaggctcaatattcctgaatgaaatatcagactagtgacaagctcctggtcttgagatgtcttctcgttaaggagatgggccttttggaggtaaaggataaaatgaatgagttctgtcatgattcactattctagaacttgcatgacctttactgtgttagctctttgaatgttcttgaaattttagactttctttgtaaacaaatgatatgtccttatcattgtataaaagctgttatgtgcaacagtgtggagattccttgtctgatttaataaaatacttaaacactgaaaaaaaaaaaaaaaaaaaaaaaaaaaaaaaaaaaaaaaaaaaaaaaaaaaaaaaaaaaaaaaaaaaaaaaaaaaaaaaaagtaccttctgaggcggaaagaaccagccggatctcgacttcgagcttatttatattccaaaaaaaaaaaataaaatttcaatttttaagctttcactaattccaaacccacccgctttttatagtaagtttttcacccataaataataaatacaataattaatttctcgtaaaagtagaaaatatattctaatttattgcacggtaaggaagtagatcataactcgagcatgggagatcccgtcgttttacaacgtcgtgactgggaaaaccctggcgttacccaacttaatcgccttgcagcacatccccctttcgccagctggcgtaatagcgaagaggcccgcaccgatcgcccttcccaacagttgcgcagcctgaatggcgaatggcgctttgcctggtttccggcaccagaagcggtgccggaaagctggctggagtgcgatcttcctgaggccgatactgtcgtcgtcccctcaaactggcagatgcacggttacgatgcgcccatctacaccaacgtgacctatcccattacggtcaatccgccgtttgttcccacggagaatccgacgggttgttactcgctcacatttaatgttgatgaaagctggctacaggaaggccagacgcgaattatttttgatggcgttaactcggcgtttcatctgtggtgcaacgggcgctgggtcggttacggccaggacagtcgtttgccgtctgaatttgacctgagcgcatttttacgcgccggagaaaaccgcctcgcggtgatggtgctgcgctggagtgacggcagttatctggaagatcaggatatgtggcggatgagcggcattttccgtgacgtctcgttgctgcataaaccgactacacaaatcagcgatttccatgttgccactcgctttaatgatgatttcagccgcgctgtactggaggctgaagttcagatgtgcggcgagttgcgtgactacctacgggtaacagtttctttatggcagggtgaaacgcaggtcgccagcggcaccgcgcctttcggcggtgaaattatcgatgagcgtggtggttatgccgatcgcgtcacactacgtctgaacgtcgaaaacccgaaactgtggagcgccgaaatcccgaatctctatcgtgcggtggttgaactgcacaccgccgacggcacgctgattgaagcagaagcctgcgatgtcggtttccgcgaggtgcggattgaaaatggtctgctgctgctgaacggcaagccgttgctgattcgaggcgttaaccgtcacgagcatcatcctctgcatggtcaggtcatggatgagcagacgatggtgcaggatatcctgctgatgaagcagaacaactttaacgccgtgcgctgttcgcattatccgaaccatccgctgtggtacacgctgtgcgaccgctacggcctgtatgtggtggatgaagccaatattgaaacccacggcatggtgccaatgaatcgtctgaccgatgatccgcgctggctaccggcgatgagcgaacgcgtaacgcgaatggtgcagcgcgatcgtaatcacccgagtgtgatcatctggtcgctggggaatgaatcaggccacggcgctaatcacgacgcgctgtatcgctggatcaaatctgtcgatccttcccgcccggtgcagtatgaaggcggcggagccgacaccacggccaccgatattatttgcccgatgtacgcgcgcgtggatgaagaccagcccttcccggctgtgccgaaatggtccatcaaaaaatggctttcgctacctggagagacgcgcccgctgatcctttgcgaatacgcccacgcgatgggtaacagtcttggcggtttcgctaaatactggcaggcgtttcgtcagtatccccgtttacagggcggcttcgtctgggactgggtggatcagtcgctgattaaatatgatgaaaacggcaacccgtggtcggcttacggcggtgattttggcgatacgccgaacgatcgccagttctgtatgaacggtctggtctttgccgaccgcacgccgcatccagcgctgacggaagcaaaacaccagcagcagtttttccagttccgtttatccgggcaaaccatcgaagtgaccagcgaatacctgttccgtcatagcgataacgagctcctgcactggatggtggcgctggatggtaagccgctggcaagcggtgaagtgcctctggatgtcgctccacaaggtaaacagttgattgaactgcctgaactaccgcagccggagagcgccgggcaactctggctcacagtacgcgtagtgcaaccgaacgcgaccgcatggtcagaagccgggcacatcagcgcctggcagcagtggcgtctggcggaaaacctcagtgtgacgctccccgccgcgtcccacgccatcccgcatctgaccaccagcgaaatggatttttgcatcgagctgggtaataagcgttggcaatttaaccgccagtcaggctttctttcacagatgtggattggcgataaaaaacaactgctgacgccgctgcgcgatcagttcacccgtgcaccgctggataacgacattggcgtaagtgaagcgacccgcattgaccctaacgcctgggtcgaacgctggaaggcggcgggccattaccaggccgaagcagcgttgttgcagtgcacggcagatacacttgctgatgcggtgctgattacgaccgctcacgcgtggcagcatcaggggaaaaccttatttatcagccggaaaacctaccggattgatggtagtggtcaaatggcgattaccgttgatgttgaagtggcgagcgatacaccgcatccggcgcggattggcctgaactgccagctggcgcaggtagcagagcgggtaaactggctcggattagggccgcaagaaaactatcccgaccgccttactgccgcctgttttgaccgctgggatctgccattgtcagacatgtataccccgtacgtcttcccgagcgaaaacggtctgcgctgcgggacgcgcgaattgaattatggcccacaccagtggcgcggcgacttccagttcaacatcagccgctacagtcaacagcaactgatggaaaccagccatcgccatctgctgcacgcggaagaaggcacatggctgaatatcgacggtttccatatggggattggtggcgacgactcctggagcccgtcagtatcggcggaattccagctgagcgccggtcgctaccattaccagttggtctggtgtcaaaaataataataaccgggcaggggggatccaattctgtgagcgtatggcaaacgaaggaaaaatagttatagtagccgcactcgatgggacatttcaacgtaaaccgtttaataatattttgaatcttattccattatctgaaatggtggtaaaactaactgctgtgtgtatgaaatgctttaaggaggcttccttttctaaacgattgggtgaggaaaccgagatagaaataataggaggtaatgatatgtatcaatcggtgtgtagaaagtgttacatcgactcataatattatattttttatctaaaaaactaaaaataaacattgattaaattttaatataatacttaaaaatggatgttgtgtcgttagataaaccgtttatgtattttgaggaaattgataatgagttagattacgaaccagaaagtgcaaatgaggtcgcaaaaaaactgccgtatcaaggacagttaaaactattactaggagaattattttttcttagtaagttacagcgacacggtatattagatggtgccaccgtagtgtatataggatctgctcccggtacacatatacgttatttgagagatcatttctataatttaggagtgatcatcaaatggatgctaattgacggccgccatcatgatcctattttaaatggattgcgtgatgtgactctagtgactcggttcgttgatgaggaatatctacgatccatcaaaaaacaactgcatccttctaagattattttaatttctgatgtgagatccaaacgaggaggaaatgaacctagtacggcggatttactaagtaattacgctctacaaaatgtcatgattagtattttaaaccccgtggcgtctagtcttaaatggagatgcccgtttccagatcaatggatcaaggacttttatatcccacacggtaataaaatgttacaaccttttgctccttcatattcagctgaaatgagattattaagtatttataccggtgagaacatgagactgactcgagttaccaaattagacgctgtaaattatgaaaaaaagatgtactaccttaataagatcgtccgtaacaaagtagttgttaactttgattatcctaatcaggaatatgactattttcacatgtactttatgctgaggaccgtgtactgcaataaaacatttcctactactaaagcaaaggtactatttctacaacaatctatatttcgtttcttaaatattccaacaacatcaactgaaaaagttagtcatgaaccaatacaacgtaaaatatctagcaaaaattctatgtctaaaaacagaaatagcaagagatccgtacgcggtaataaatagaaacgtactactgagatatactaccgatatagagtataatgatttagttactttaataaccgttagacataaaattgattctatgaaaactgtgtttcaggtatttaacgaatcatccataaattatactccggttgatgatgattatggagaaccaatcattataacatcgtatcttcaaaaaggtcataacaagtttcctgtaaattttctatacatagatgtggtaatatctgacttatttcctagctttgttagactagatactacagaaactaatatagttaatagtgtactacaaacaggcgatggtaaaaagactcttcgtcttcccaaaatgttagagacggaaatagttgtcaagattctctatcgccctaatataccattaaaaattgttagatttttccgcaataacatggtaactggagtagagatagccgatagatctgttatttcagtcgctgattaatcaattagtagagatgagataagaacattataataatcaataatatatcttatatcttatatcttatatcttatatcttgtttagaaaaatgctaatattaaaatagctaacgctagtaatccaatcggaagccatttgatatctataatagggtatctaatttcctgatttaaatagcggacagctatattctcggtagctactcgtttggaatcacaaacattatttacatctaatttactatctgtaatggaaacgtttcccaatgaaatggtacaatccgatacattgcattttgttatatttttttttaaagaggctggtaacaacgcatcgcttcgtttacatggctcgtaccaacaataatagggtaatcttgtatctattcctatccgtactatgcttttatcaggataaatacatttacatcgtatatcgtctttgttagcatcacagaatgcataaatttgttcgtccgtcatgataaaaatttaaagtgtaaatataactattatttttatagttgtaataaaaagggaaatttgattgtatactttcggttctttaaaagaaactgacttgataaaaatggctgtaatctctaaggttacgtatagtctatatgatcaaaaagagattaatgctacagatattatcattagtcatgttaaaaatgacgacgatatcggtaccgttaaagatggtagactaggtgctatggatggggcattatgtaagacttgtgggaaaacggaattggaatgtttcggtcactggggtaaagtaagtatttataaaactcatatagttaagcctgaatttatttcagaaattattcgtttactgaatcatatatgtattcactgcggattattgcgttcacgagaaccgtattccgacgatattaacctaaaagagttatcgggacacgctcttaggagattaaaggataaaatattatccaagaaaaagtcatgttggaacagtgaatgtatgcaaccgtatcaaaaaattactttttcaaagaaaaaggtttgtttcgtcaacaagttggatgatattaacgttcctaattctctcatctatcaaaagttaatttctattcatgaaaagttttggccattattagaaattcatcaatatccagctaacttattttatacagactactttcccatccctccgttgattattagaccggctattagtttttggatagatagtatacccaaagagaccaatgaattaacttacttattaggtatgatcgttaagaattgtaacttgaatgctgatgaacaggttatccagaaggcggtaatagaatacgatgatattaaaattatttctaataacactaccagtatcaatttatcatatattacatccggcaaaaataatatgattagaagttatatcgtcgcccgacgaaaagatcagaccgctagatctgtaattggtcccagtacatctatcaccgttaatgaggtaggaatgcccgcatatattagaaatacacttacagaaaagatatttgttaatgcctttacagtggataaagttaaacaactattagcgtcaaaccaagttaaattttactttaataaacgattaaaccaattaacaagaatacgccaaggaaagtttattaaaaataaaatacatttattgcctggtgattgggtagaagtagctgttcaagaatatacaagtattatttttggaagacagccgtctctacatagatacaacgtcatcgcttcatctatcagagctaccgaaggagatactatcaaaatatctcccggaattgccaactctcaaaatgctgatttcgacggggatgaggaatggatgatattagaacaaaatcctaaagctgtaattgaacaaagtattcttatgtatccgacgacgttactcaaacacgatattcatggagcccccgtttatggatctattcaagatgaaatcgtagcagcgtattcattgtttaggatacaagatctttgtttagatgaagtattgaacatcttggggaaatatggaagagagttcgatcctaaaggtaaatgtaaattcagcggtaaagatatctatacttacttgataggtgaaaagattaattatccgggtctcttaaaggatggtgaaattattgcaaacgacgtagatagtaattttgttgtggctatgaggcatctgtcattggctggactcttatccgatcataagtcgaacgtggaaggtatcaactttattatcaagtcatcttatgtttttaagagatatctatctatttacggttttggggtgacattcaaagatctgagaccaaattcgacgttcactaataaattggaggccatcaacgtagaaaaaatagaacttatcaaagaagcatacgccaaatatctcaacgatgtaagagacgggaaaatagttccattatctaaagctttagaggcggactatgtggaatccatgttatccaacttgacaaatcttaatatccgagagatagaagaacatatgagacaaacgctgatagatgatccagataataacctcctgaaaatggccaaagcgggttataaagtaaatcccacagaactaatgtatattctaggtacgtatggacaacaaaggattgatggtgaaccagcagagactcgagtattgggtagagttttaccttactatcttccagactctaaggatccagaaggaagaggttacattcttaattctttaacaaaaggattaacgggttctcaatattacttttcgatgctggttgccagatctcaatctactgatatcgtctgtgaaacatcacgtaccggaacactggctagaaaaatcattaaaaagatggaggatatggtggtcgacggatacggacaagtagttataggtaatacgctcatcaagtacgccgccaattataccaaaattctaggctcagtatgtaaacctgtagatcttatctatccagatgagtccatgacttggtatttggaaattagtgctctgtggaataaaataaaacagggattcgtttactctcagaaacagaaacttgcaaagaagacattggcgccgtttaatttcctagtattcgtcaaacccaccactgaggataatgctattaaggttaaggatctgtacgatatgattcataacgtcattgatgatgtgagagagaaatacttctttacggtatctaatatagattttatggagtatatattcttgacgcatcttaatccttctagaattagaattacaaaagaaacggctatcactatctttgaaaagttctatgaaaaactcaattatactctaggtggtggaactcctattggaattatttctgcacaggtattgtctgagaagtttacacaacaagccctgtccagttttcacactactgaaaaaagtggtgccgtcaaacaaaaacttggtttcaacgagtttaataacttgactaatttgagtaagaataagaccgaaattatcactctggtatccgatgatatctctaaacttcaatctgttaagattaatttcgaatttgtatgtttgggagaattaaatccaaacatcactcttcgaaaagaaacagataaatatgtagtagatataatagtcaatagattatacatcaagagagcagaaataaccgaattagtcgtcgaatatatgattgaacgatttatctcctttagcgtcattgtaaaggaatggggtatggagacattcattgaggacgaggataatattagatttactgtctacctaaatttcgttgaaccggaagaattgaatcttagtaagtttatgatggttcttccgggggcagccaacaagggaaagattagtaaattcaagattcctatctctgattatacgggatatgacgacttcaatcaaacaaaaaagctcaataagatgactgtagaactcatgaatctaaaagaattgggttctttcgatttggaaaacgtcaacgtgtatcctggagtatggaatacatacgatatcttcggtatcgaggccgctcgtgaatacttgtgcgaagccatgttaaacacctatggagaagggttcgattatctgtatcagccttgtgatcttctcgctagtttactatgtgctagttacgaaccagaatcagtgaataaattcaagttcggcgcagctagtactcttaagagagctacgttcggagacaataaagcattgttaaacgcggctcttcataaaaagtcagaacctattaacgataatagtagctgccacttttttagcaaggtccctaatataggaactggatattacaaatactttatcgacttgggtcttctcatgagaatggaaaggaaactatctgataagatatcttctcaaaagatcaaggaaatggaagaaacagaagacttttaattcttatcaataacatatttttctatgatctgtcttttaaacgatggattttccacaaatgcgcctctcaagtccctcatagaatgatacacgtataaaaaatatagcataggcaatgactccttatttttagacattagatatgccaaaatcatagccccgcttctatttactcccgcagcacaatgaaccaacacgggctcgtttcgttgatcacatttagataaaaaggcggttacgtcgtcaaaatatttactaatatcggtagttgtatcatctaccaacggtatatgaataatattaatattagagttaggtaatgtatatttatccatcgtcaaatttaaaacatatttgaacttaacttcagatgatggtgcatccatagcatttttataatttcccaaatacacattattggttacccttgtcattatagtgggagatttggctttgtgcatatctccagttgaacgtagtagtaagtatttatacaaacttttcttatccatttataacgtacaaatggataaaactactttatcggtaaacgcgtgtaatttagaatacgttagagaaaaggctatagtaggcgtacaagcagccaaaacatcaacacttatattctttgttattatattggcaattagtgcgctattactctggtttcagacgtctgataatccagtctttaatgaattaacgagatatatgcgaattaaaaatacggttaacgattggaaatcattaacggatagcaaaacaaaattagaaagtgatagaggtagacttctagccgctggtaaggatgatatatttgaattcaaatgtgtggatttcggcgcctattttatagctatgcgattggataagaaaacatatctgccgcaagctattaggcgaggtactggagacgcgtggatggttaaaaaggcggcaaaggtcgatccatctgctcaacaattttgtcagtatttgataaaacacaagtctaataatgttattacttgtggtaatgagatgttaaatgaattaggttatagcggttattttatgtcaccgcattggtgttccgattttagtaatatggaatagtgttagataaatgcggtaacgaatgttcctgtaaggaaccataacagcttagatttaacgttaaagatgagcataaacataataaacaaaattacaatcaaacttataacattaatatcaaacaatccaaaaaatgaaatcagtggagtagtaaacgcgtacataactcctggataacgtttagcagctgccgttcctattctagaccaaaaattcggtttcatgttttcgaaacggtattctgcaacaagtcgaggatcgtgttctacatatttggcggcattatccagtatctgcctattgatcttcatttcgttttcgattctggctatttcaaaataaaatcccgatgatagacctccagactttataatttcatctacgatgttcagcgccgtagtaactctaataatataggctgataagctaacatcataccctcctgtatatgtgaatatggcatgatttttgtccattacaagctcggttttaactttattgcctgtaataatttctctcatctgtaggatatctatttttttgtcatgcattgccttcaagacgggacgaagaaacgtaatatcctcaataacgttatcgttttctacaataactacatattctacctttttattttctaactcggtaaaaaaattagaatcccatagggctaaatgtctagcgatatttcttttcgtttcctctgtacacatagtgttacaaaaccctgaaaagaagtgagtatacttgtcatcatttctaatgtttcctccagtccactgtataaacgcataatccttgtaatgatctggatcatccttgactaccacaacatttcttttttctggcataacttcgttgtcctttacatcatcgaacttctgatcattaatatgctcatgaacattaggaaatgtttctgatggaggtctatcaataactggcacaacaataacaggagttttcaccgccgccatttagttattgaaattaatcatatacaactctttaatacgagttatattttcgtctatccattgtttcacattgacatatttcgacaaaaagatataaaatgcgtattccaatgcttctctgtttaatgaattactaaaatatacaaacacgtcactgtctggcaataaatgatatcttagaatattgtaacaatttattttgtattgcacatgttcgtgatctatgagttcttcttcgaatggcataggatctccgaatctgaaaacgtataaataggagttagaataataatatttgagagtattggtaatatataaactctttagcggtataattagtttttttctctcaatttctatttttagatgtgatggaaaaatgactaattttgtagcattagtatcatgaactctaatcaaaatcttaatatcttcgtcacacgttagctctttgaagtttttaagagatgcatcagttggttctacagatggagtaggtgcaacaattttttgttctacacatgtatgtactggagccattgttttaactataatggtgcttgtatcgaaaaactttaatgcagatagcggaagctcttcgccgcgactttctacgtcgtaattgggttctaacgccgatctctgaatggatactagttttctaagttctaatgtgattctctgaaaatgtaaatccaattcctccggcattatagatgtgtatacatcggtaaataaaactatagtatccaacgatcccttctcgcaaattctagtcttaaccaaaaaatcgtatataaccacggagatggcgtatttaagagtggattcttctaccgttttgttcttggatgtcatataggaaactataaagtccgcactactgttaagaatgattactaacgcaactatatagtttaaattaagcattttggaaacataaaataactctgtagacgatacttgactttcgaataagtttgcagacaaacgaagaaagaacagacctctcttaatttcagaagaaaactttttttcgtattcctgacgtctagagtttatatcaataagaaagttaagaattagtcggttaatgttgtatttcattacccaagtttgagatttcataatattatcaaaagacatgataatattaaagataaagcgctgactatgaacgaaatagctatatggttcgctcaagaatatagtcttgttaaacgtggaaacgataactgtatttttaatcacgtcagcggcatctaaattaaatataggtatatttattccacacactctacaatatgccacaccatcttcataataaataaattcgttagcaaaattattaattttagtgaaatagttagcgtcaactttcatagcttccttcaatctaatttgatgctcacacggtgcgaattccactctaacatcccttttccatgcctcaggttcatcgatctctataatatctagttttttgcgtttcacaaacacaggctcgtctctcgcgatgagatctgtatagtaactatgtaaatgataactagatagaaagatgtagctatatagatgacgatcctttaagagaggtataataactttaccccaatcagatagactgttgttatggtcttcggaaaaagaatttttataaatttttccagtattttccaaatatacgtacttaacatctaaaaaatccttaatgataataggaatggataatccgtctattttataaagaaatacatatcgcacattatacttttttttggaaatgggaataccgatgtgtctacataaatatgcaaagtctaaatattttttagagaatcttagttggtccaaattcttttccaagtacggtaatagatttttcatattgaacggtatcttcttaatctctggttctagttccgcattaaatgatgaaactaagtcactatttttataactaacgattacatcacctctaacatcatcatttaccagaatactgatcttcttttgtcgtaaatacatgtctaatgtgttaaaaaaaagatcatacaagttatacgtcatttcatctgtggtattcttgtcattgaaggataaactcgtactaatctcttctttaacagcctgttcaaatttatatcctatatacgaaaaaatagcaaccagtgtttgatcatccgcgtcaatattctgttctatcgtagtgtataacaatcgtatatcttcttctgtgatagtcgatacgttataaaggttgataacgaaaatatttttatttcgtgaaataaagtcatcgtaggattttggacttatattcgcgtctagtagatatgcttttatttttggaatgatctcaattagaatagtctctttagagtccatttaaagttacaaacaactaggaaattggtttatgatgtataatttttttagtttttatagattctttattctatacttaaaaaatgaaaataaatacaaaggttcttgagggttgtgttaaattgaaagcgagaaataatcataaattatttcattatcgcgatatccgttaagtttgtatcgtaatggcgtggtcaattacgaataaagcggatactagtagcttcacaaagatggctgaaatcagagctcatctaaaaaatagcgctgaaaataaagataaaaacgaggatattttcccggaagatgtaataattccatctactaagcccaaaaccaaacgagccactactcctcgtaaaccagcggctactaaaagatcaaccaaaaaggaggaagtggaagaagaagtagttatagaggaatatcatcaaacaactgaaaaaaattctccatctcctggagtcagcgacattgtagaaagcgtggccgctgtagagctcgatgatagcgacggggatgatgaacctatggtacaagttgaagctggtaaagtaaatcatagtgctagaagcgatctctctgacctaaaggtggctaccgacaatatcgttaaagatcttaagaaaattattactagaatctctgcagtatcgacggttctagaggatgttcaagcagctggtatctctagacaatttacttctatgactaaagctattacaacactatctgatctagtcaccgagggaaaatctaaagttgttcgtaaaaaagttaaaacttgtaagaagtaaatgcgtgcacttttttataaagatggtaaactctttaccgataataattttttaaatcctgtatcagacgataatccagcgtatgaggttttgcaacatgttaaaattcctactcatttaacagatgtagtagtatatgaacaaacgtgggaggaggcgttaactagattaatttttgtgggaagtgattcaaaaggacgtagacaatacttttacggaaaaatgcatgtacagaatcgcaacgctaaaagagatcgtatttttgttagagtatataacgttatgaaacgaattaattgttttataaacaaaaatataaagaaatcgtccacagattccaattatcagttggcggtttttatgttaatggaaactatgttttttattagatttggtaaaatgaaatatcttaaggagaatgaaacagtagggttattaacactaaaaaataaacacatagaaataagtcccgatgaaatagttatcaagtttgtaggaaaggacaaagtttcacatgaatttgttgttcataagtctaatagactatataaaccgctattgaaactgacggatgattctagtcccgaagaatttctgttcaacaaactaagtgaacgaaaggtatacgaatgtatcaaacagtttggtattagaatcaaggatctccgaacgtatggagtcaattatacgtttttatataatttttggacaaatgtaaagtccatatctcctcttccgtcaccaaaaaagttaatagcattaactatcaaacaaactgctgaagtggtaggtcatactccatcaatttcaaaaagagcttatatggcaacgactattttagaaatggtaaaggataaaaattttttagatgtagtatctaaaactacgttcgatgaattcctatctatagtcgtagatcacgttaaatcatctacggatggatgatatagatctttacacaaataattacaagaccgataaatggaaatggataagcgtatgaaatctctcgcaatgacagctttcttcggagagctaagcacattagatattatggcattgataatgtctatatttaaacgccatccaaacaataccattttttcagtggataaggatggtcagtttatgattgatttcgaatacgataattataaggcttctcaatatttggatctgaccctcactccgatatctggagatgaatgcaagactcacgcatcgagtatagccgaacaattggcgtgtgcggatattattaaagaggatattagcgaatatatcaaaactactccccgtcttaaacgatttataaaaaaataccgcaatagatcagatactcgtatcagtcgagatacagaaaagcttaaaatagctctagctaaaggcatagattacgaatatataaaagacgcttgttaataagtaaatgaaaaaaaactagtcgtttataataaaacacgatatggatgccaacgtagtatcattttctactattgcgacgtatatagacgctttagcgaagaatgcttcggaattagaacagaggtctaccgcatacgaaataaataatgaattggaactagtatttattaagccgccattgattactttgacaaatgtagtgaatatctctacgattcaggaatcgtttattcgatttaccgttactaataaggaaggtgttaaaattagaactaagattccattatctaaggtacatggtctagatgtaaaaaatgtacagttagtagatgctatagataacatagtttgggaaaagaaatcattagtgacggaaaatcgtcttcacaaagaatgcttgttgagactatcgacagaggaacgtcatatatttttggattacaagaaatatggatcctctatccgactagaattagtcaatcttattcaagcaaaaacaaaaaactttacgatagactttaagctaaaatattttctaggatccggtgcccagtctaaaagttctttgttgcacgctattaatcatccaaagtcaaggcctaatacatctctggaaatagaattcacacctagagacaatgaaacagttccatatgatgaactaataaaggaattgacgactctctcgcgtcatatatttatggcttctccagagaatgtaattctttctccgcctattaacgcgcctataaaaacctttatgttgcctaaacaagatatagtaggtttggatctggaaaatctatatgccgtaactaagactgacggcattcctataactatcagagttacatcaaacgggttgtattgttattttacacatcttggttatattattagatatcctgttaagagaataatagattccgaagtagtagtctttggtgaggcagttaaggataagaactggaccgtatatctcattaagctaatagagcctgtgaatgcaatcaatgatagactagaagaaagtaagtatgttgaatctaaactagtggatatttgtgatcggatagtattcaagtcaaagaaatacgaaggtccgtttactacaactagtgaagtcgtcgatatgttatctacatatttaccaaagcaaccagaaggtgttattctgttctattcaaagggacctaaatctaacattgattttaaaattaaaaaggaaaatactatagaccaaactgcaaatgtagtatttaggtacatgtccagtgaaccaattatctttggagaatcgtctatctttgtagagtataagaaatttagcaacgataaaggctttcctaaagaatatggttctggtaagattgtgttatataacggcgttaattatctaaataatatctattgtttggaatatattaatacacataatgaagtgggtattaagtccgtggttgtacctattaagtttatagcagaattcttagttaatggagaaatacttaaacctagaattgataaaaccatgaaatatattaactcagaagattattatggaaatcaacataatatcatagtcgaacatttaagagatcaaagcatcaaaataggagatatctttaacgaggataaactatcggatgtgggacatcaatacgccaataatgataaatttagattaaatccagaagttagttattttacgaataaacgaactagaggaccgttgggaattttatcaaactacgtcaagactcttcttatttctatgtattgttccaaaacatttttagacgattccaacaaacgaaaggtattggcgattgattttggaaacggtgctgacctggaaaaatacttttatggagagattgcgttattggtagcgacggatccggatgctgatgctatagctagaggaaatgaaagatacaacaaattaaactctggaattaaaaccaagtactacaaatttgactacattcaggaaactattcgatccgatacatttgtctctagtgtcagagaagtattctattttggaaagtttaatatcatcgactggcagtttgctatccattattcttttcatccgagacattatgctaccgtcatgaataacttatccgaactaactgcttctggaggcaaggtattaatcactaccatggacggagacaaattatcaaaattaacagataaaaagacttttataattcataagaatttacctagtagcgaaaactatatgtctgtagaaaaaatagctgatgatagaatagtggtatataatccatcaacaatgtctactccaatgactgaatacattatcaaaaagaacgatatagtcagagtgtttaacgaatacggatttgttcttgtagataacgttgatttcgctacaattatagaacgaagtaaaaagtttattaatggcgcatctacaatggaagatagaccgtctacaaaaaactttttcgaactaaatagaggagccattaaatgtgaaggtttagatgtcgaagacttacttagttactatgttgtttatgtcttttctaagcggtaaataataatatggtatgggttctgatctcccagttctaaatgcattaaataattccaatagagcgatttttgttcctataggaccttccaactgtggatactctgtattgttaatagatatattaatacttttgtcgggtaacagaggttctacgtcttctaaaaataaaagttttataacatctggcctgttcataaataaaaacttggcgattctatatatactcttattatcaaatctagccattgtcttatagatgtgagctactgtaggtgtaccatttgattttctttctaatactatatatttctctcgaagaagttcttgcacatcatctgggaataaaatactactgttgagtaaatcagttattttttttatatcgatattgatggacatttttatagttaaggataataagtatcccaaagtcgataacgacgataacgaagtatttatacttttaggaaatcacaatgactttatcagattaaaattaacaaaattaaaggagcatgtatttttttctgaatatattgtgactccagatacatatggatctttatgcgtcgaattaaatgggtctagttttcagcacggcggtagatatatagaggtggaggaatttatagatgctggaagacaagttagatggtgttctacatccaatcatatatctaaagatatacccgaagatatgcacactgataaatttgtcatttatgatatttatacgtttgattcgttcaagaataaacgattggtattcgtacaggtacctccgtcgttaggagatgatagtcatttgactaatccgttattgtcaccgtattatcgtaattcagtagccagacaaatggtcaatgatatgatttttaatcaagattcatttttaaaatatttattagaacatctgattagaagccactatagagtttctaaacatataacaatagttagatacaaggataccgaagaattaaatctaacgagaatatgttataatagagataagtttaaggcgtttgtattcgcttggtttaacggcgtttcggaaaatgaaaaggtactagatacgtataaaaaggtatctaatttgatataatgaattcagtgactgtatcacacgcgccatatactattacttatcacgatgattgggaaccagtaatgagtcaattggtagagttttataacgaagtagccagttggctgctacgagacgagacgtcgcctattcctgataagttctttatacagttgaaacaaccgcttagaaataaacgagtatgtgtgtgtggtatagatccgtatccgaaagatggaactggtgtaccgttcgaatcaccaaattttacaaaaaaatcaattaaggagatagcttcatctatatctagattaaccggagtaattgattataaaggttataaccttaatataatagacggggttataccctggaattattacttaagttgtaaattaggagaaacaaaaagtcacgcgatttactgggataagatttccaagttactgctgcagcatataactaaacacgttagtgttctttattgtttgggtaaaacagatttctcgaatatacgggccaagttagaatccccggtaactaccatagtcggatatcatccagcggctagagaccgccaattcgagaaagatagatcatttgaaattatcaacgttttactggaattagacaacaaggcacctataaattgggctcaagggtttatttattaatgctttagtgaaattttaacttgtgttctaaatggatgcggctattagaggtaatgatgttatctttgttcttaagactataggtgtcccgtcagcgtgcagacaaaatgaagatccaagatttgtagaagcatttaaatgcgacgagttagaaagatatattgagaataatccagaatgtacactattcgaaagtcttagggatgaggaagcatactctatagtcagaattttcatggatgtagatttagacgcgtgtctagacgaaatagattatttaacggccattcaagattttattatcgaggtgtcaaactgtgtagctagattcgcgtttacagaatgcggcgccattcatgaaaatgtaataaaatccatgagatctaatttttcattgactaagtctacaaatagagataaaacaagttttcatattatctttttagatacgtataccactatggatacattgatagctatgaaacgaacactattagaattaagtagatcatctgaaaatccactaaccagatcgatagacactgccgtatataggagaaaaacaactcttcgggttgtaggtactaggaaaaatccaaattgcgacactattcatgtaatgcaaccaccgcatgataatatagaagattacctattcacttacgtggatatgaacaacaatagttattacttttctctacaacaacgattggaggatttagttcctgataagttatgggaaccagggtttatttcattcgaagacgctataaaaagagtttcaaaaatattcattaattctataataaactttaatgatctcgatgaaaataattttacaacggtaccactggtcatagattacgtaacaccttgtgcattatgtaaaaaacgatcgcataaacatccgcatcaactatcgttggaaaatggtgctattagaatttacaaaactggtaatccacatagttgtaaagttaaaattgttccgttggatggtaataaactgtttaatattgcacaaagaattttagacactaactctgttttattaaccgaacgaggagaccatatagtttggattaataattcatggaaatttaacagcgaagaacccttgataacaaaactaattttgtcaataagacatcaactacctaaggaatattcaagcgaattactctgtccaagaaaacgaaagactgtagaagctaacatacgagacatgttagtagattcagtggagaccgatacctatccggataaacttccgtttaaaaatggtgtattggacctggtagacggaatgttttactctggagatgatgctaaaaaatatacgtgtactgtatcaaccggatttaaatttgacgatacaaagttcgtcgaagacagtccagaaatggaagagttaatgaatatcattaacgatatccaaccattaacggatgaaaataagaaaaatagagagctatatgaaaaaacattatctagttgtttatgcggtgctaccaaaggatgtttaacattcttttttggagaaactgcaactggaaagtcgacaaccaaacgtttgttaaagtctgctatcggtgacctgtttgttgagacgggtcaaacaattttaacagatgtattggataaaggacctaatccatttatcgctaacatgcatttgaaaagatctgtattctgtagcgaactacctgattttgcctgtagtggatcaaagaaaattagatctgacaatattaaaaagttgacagaaccttgtgtcattggaagaccgtgtttctccaataaaattaataatagaaaccatgcgacaatcattatcgatactaattacaaacctgtttttgataggatagataacgcattaatgagaagaattgccgtcgtgcgattcagaacacacttttctcaaccttctggtagagaggctgctgaaaataatgacgcgtacgataaagtcaaactattagacgaggggttagatggtaaaatacaaaataatatatatagatttgcatttctatacttgttggtgaaatggtacaaaaaatatcatgttcctattatgaaactatatcctacacccgaagagattcctgactttgcattctatctcaaaataggtactctgttggtatctagctctgtaaagcatattccattaatgacggacctctccaaaaagggatatatattgtacgataatgtggtcactcttccgttgactactttccaacagaaaatatccaagtattttaattctagactatttggacacgatatagagagcttcatcaatagacataagaaatttgccaatgttagtgatgaatatctgcaatatatattcatagaggatatttcatctccgtaaatatatgctcatatatttatagaagatatcacatatctaaatgaataccggaatcatagatttatttgataatcatgttgatagtataccaactatattacctcatcagttagctactctagattatctagttagaactatcatagatgagaacagaagcgtgttattgttccatattatgggatcaggtaaaacaataatcgctttgttgttcgccttggtagcttccagatttaaaaaggtttacattctagtgccgaacatcaacatcttaaaaattttcaattataatatgggtgtagctatgaacttgtttaatgacgaattcatagctgagaatatctttattcattccacaacaagtttttattctcttaattataacgataacgtcattaattataacggattatctcgctacaataactctatttttatcgttgatgaggcacataatatctttgggaataatactggagaacttatgaccgtgataaaaaataaaaacaagattccttttttactattgtctggatctcccattactaacacacctaatactctgggtcatattatagatttaatgtccgaagagacgatagattttggtgaaattattagtcgtggtaagaaagtaattcagacacttcttaacgaacgcggtgtgaatgtacttaaggatttgcttaaaggaagaatatcatattacgaaatgcctgataaagatctaccaacgataagatatcacggacgtaagtttctagatactagagtagtatattgtcacatgtctaaacttcaagagagagattatatgattactagacgacagctatgttatcatgaaatgtttgataaaaatatgtataacgtgtcaatggcagtattgggacaacttaatctgatgaataatttagatactttatttcaggaacaggataaggaattgtacccaaatctgaaaataaataatggcgtgttatacggagaagaattggtaacgttaaacattagttccaaatttaaatactttattaatcggatacagacactcaacggaaaacattttatatacttttctaattctacatatggcggattggtaattaaatatatcatgctcagtaatggatattctgaatataatggttctcagggaactaatccacatatgataaacggcaaaccaaaaacatttgctatcgttactagtaaaatgaaatcgtctttagaggatctattagatgtgtataattctcctgaaaacgatgatggtagtcaattgatgtttttgttttcatcaaacattatgtccgaatcctatactctaaaagaggtaaggcatatttggtttatgactatcccagatactttttctcaatacaaccaaattcttggacgatctattagaaaattctcttacgccgatatttctgaaccagttaatgtatatcttttagccgccgtatattccgatttcaatgacgaagtgacgtcattaaacgattacacacaggatgaattaattaatgttttaccatttgacatcaaaaagctgttgtatctaaaatttaagacgaaagaaacgaatagaatatactctattcttcaagagatgtctgaaacgtattctcttccaccacatccatcaattgtaaaagttttattgggagaattggtcagacaatttttttataataattctcgtattaagtataacgataccaagttacttaaaatggttacatcagttataaaaaataaagaagacgctaggaattacatagatgatattgtaaacggtcacttctttgtatcgaataaagtatttgataaatctcttttatacaaatacgaaaacgatattattacagtaccgtttagactttcctacgaaccatttgtttggggagttaactttcgtaaagaatataacgtggtatcttctccataaaactgatgagatatataaagaaataaatgtcgagctttgttaccaatggatacctttccgttacattggaaccacacgagctgacgttagacataaaaactaatattaggaatgccgtatataagacgtatctccatagagaaattagtggtaaaatggccaagaaaatagaaattcgtgaagacgtggaattacctctcggcgaaatagttaataattctgtagttataaacgttccgtgtgtaataacctacgcgtattatcacgttggggatatagtcagaggaacattaaacatcgaagatgaatcaaatgtaactattcaatgtggagatttaatctgtaaactaagtagagattcgggtactgtatcatttagcgattcaaagtactgcttttttcgaaatggtaatgcgtatgacaatggcagcgaagtcactgccgttctaatggaggctcaacaaggtatcgaatctagttttgtttttctcgcgaatatcgtcgactcataaaaaagagaatagcggtaagtataaacacgaatactatggcaataattgcgaatgttttattctcttcgatatatttttgataatatgaaaaacatgtctctctcaaatcggacaaccatctcataaaatagttctcgcgcgctggagaggtagttgccgctcgtataatctctccagaataatatacttgcgtgtcgtcgttcaatttatacggatttctatagttctctgttatataatgcggtttgccctcatgattagacgacgacaatagtgttctaaatttagatagttgatcagaatgaatgtttattggcgttggaaaaattatccatacagcgtctgcagagtggttgatagttgttcctagatatgtaaaataatccaacttactaggcagcaaattgtctagataaaatactgaatcaaacggtgcagacgtattggcggatctaatggaatccaattgattaactatcttttgaaaatatacatttttatgatccaatacttgtaagaatatagaaataatgataagtccatcatcgtgtttttttgcctcttcataagaactatattttttcttattccaatgaacaagattaatctctccagagtatttgtacacatctatcaagtgattggatccataatcgtcttcctttccccaatatatatgtagtgatgataacacatattcattggggagaaaccctccacttatatatcctcctttaaaattaatccttactagttttccagtgttctggatagtggttggtttcgactcattataatgtatgtctaacggcttcaatcgcgcgttagaaattgcttttttagtttctatattaataggagatagttgttgcggcatagtaaaaatgaaatgataactgtttaaaaatagctcttagtatgggaattacaatggatgaggaagtgatatttgaaactcctagagaattaatatctattaaacgaataaaagatattccaagatcaaaagacacgcatgtgtttgctgcgtgtataacaagtgacggatatccgttaataggagctagaagaacttcattcgcgttccaggcgatattatctcaacaaaattcagattctatctttagagtatccactaaactattacggtttatgtactacaatgaactaagagaaatctttagacggttgagaaaaggttctatcaacaatatcgatcctcactttgaagagttaatattattgggtggtaaactagataaaaaggaatctattaaagattgtttaagaagagaattaaaagaggaaagtgatgaacgtataacagtaaaagaatttggaaatgtaattctaaaacttacaacacgggataaattatttaataaagtatatataagttattgcatggcgtgttttattaatcaatcgttggaggatttatcgcatactagtatttacaatgtagaaattagaaagattaaatcattaaatgattgtattaacgacgataaatacgaatatctgtcttatatttataatatgctagttaatagtaaatgaacttttacagatctagtataattagtcagattattaagtataatagacgactagctaagtctattatttgcgaggatgactctcaaattattacactcacggcattcgttaaccaatgcctatggtgtcataaacgagtatccgtgtccgctattttattaactactgataacaaaatattagtatgtaacagacgagatagttttctctattctgaaataattagaactagaaacatgtttagaaagaaacgattatttctgaattattccaattatttgaacaaacaggaaagaagtatactatcgtcatttttttctctagatccagctactactgataatgatagaatagacgctatttatccgggtggcatacccaaaaggggtgagaatgttccagagtgtttatccagggaaattaaagaagaagttaatatagacaattcttttgtattcatagacactcggttttttattcatggcatcatagaagataccattattaataaattttttgaggtaatcttctttgtcggaagaatatctctaacgagtgatcaaatcattgatacatttaaaagtaatcatgaaatcaaggatctaatatttttagatccgaattcaggtaatggactccaatacgaaattgcaaaatatgctctagatactgcaaaacttaaatgttacggccatagaggatgttattatgaatcattaaaaaaattaactgaggatgattgattaaaaaatataaattaatttaccatcgtgtatttttataacgggattgtccggcatatcatgtagatagttaccgtctacatcgtatactcgaccatctacgcctttaaatcctctatttattgacattaatctattagaattggaataccaaatattagtaccctcaattagtttattggtaatattttttttagacgatagatcgatggctcttgaaaccaaggttttccaaccggactcattgtcgatcggtgagaagtctttttcattagcatgaatccattctaatgatgtatgtttaaacactctaaacaattggacaaattcttttgatttgctttgaatgatttcaaataggtcttcgtctacagtaggcataccattagataatctagccattataaagtgcacgtttacatatctacgttctggaggagtaagaacgtgactattgagacgaatggctcttcctactatctgacgaagagacgcctcgttccatgtcatatctaaaatgaagatatcattaattgagaaaaaactaataccctcgcctccactagaagagaatacgcatgttttaatgcattctccgttagtgtttgattcttggttaaactcagccaccgccttgattctagtatcttttgttctagatgagaactctatattagagataccaaagactttgaaatatagtaataagatttctattcctgactgattaacaaatggttcaaagactagacatttaccatgggatgctaatattcccaaacatacatctataaatttgacgcttttctcttttaattcagtaaatagagagatatcagccgcactagcatcccctttcaatagttctccctttttaaaggtatctaatgcggatttagaaaactctctatctcttaatgaatttttaaaatcattatatagtgttgctatctcttgcgcgtattcgcccggatcacgattttgtctttcaggaaagctatcgaacgtaaacgtagtagccatacgtctcagaattctaaatgatgatatacctgtttttatttcagcgagtttagccttttgataaatttcttcttgctttttcgacatattaacgtatcgcattaatactgttttcttagcgaatgatgcagacccttctacgtcatcaaaaatagaaaactcgttattaactatatacgaacatagtcctcctagtttggagactaattctttttcatcgactagacgtttattctcaaatagcgattggtgttgtaaggatcctggtcgtagtaagttaaccaacatggtgaattcttgcacactattgacgataggtgtagccgataaacaaatcatcttatggttttttaacgcaatggtcttagataaaaaattatatactgaacgagtaggacggatcttaccatcttctttgattaatgatttagaaatgaagttatgacattcatcaataatgacgcatattctactcttggaattaatagttttgatattagtaaaaaatttatttctaaaattttgatcatcgtaattaataaaaatacaatccttcgttatctctggagcgtatctgagtatagtgttcatccaaggatcttctatcaaagcctttttcaccaataagataatagcccaattcgtataaatatccttaagatgtttgagaatatatacagtagtcattgttttaccgacacccgtttcatggaacaataaaagagaatgcatactgtctaatcctaagaaaactcttgctacaaaatgttgataatccttgaggcgtactacgtccgaccccatcatttcaacgggcatattagtagttctgcgtaaggcataatcgatataggccgcgtgtgatttactcatttatgagtgataagtaataactatgttttaaaaatcacagcagtagtttaactagtcttctctgatgtttgttttcgatactttttgaatcagaagtcatactagaataaagcaacgagtgaacgtaatagagagcttcgtatactctattcgaaaactctaagaacttattaatgaattccgtatccactggattgtttaaaatactaaattgaacactgttcacatccttccaagaagaagacttagtgacggacttaacatgagacataaataaatccaaattttttttacaaacatcactagccaccataatggcgctatctttcaaccagctatcgcttacgcattttagcagtctaacatttttaaagagactacaatatattctcatagtatcgattacacctctaccgaataaagttggaagtttaataatacaatatttttcgtttacaaaatcaaataatggtcgaaacacgtcgaaggttaacatcttataatcgctaatgtatagattgttttcagtgagatgattattagatttaatagcatctcgttcacgtttgaacagtttattgcgtgcgctgaggtcggcaactacggcgtccgctttagtactcctcccataatactttacgctattaatctttaaaatttcatagactttatctagatcgctttctggtaacatgatatcatgtgtaaaaagttttaacatgtcggtcggcattctatttagatcattaactctagaaatctgaagaaagtaattagctccgtattccagactaggtaatgggcttttacctagagacagattaagttctggcaatgtttcataaaatggaagaaggacatgcgttccctcccggatattttttacaatttcatccatttacaactctatagtttgttttcattattattagttattatctcccataatcttggtaatacttaccccttgatcgtaagataccttatacaggtcattacatacaactaccaattgtttttgtacataatagattggatggttgacatccatggtggaataaactactcgaacagatagtttatctttccccctagatacattagccgtaatagttgtcggcctaaagaatatctttggtgtaaagttaaaagttagggttcttgttccattattgctttttgtcagtagttcattataaattctcgagatgggtccgttctctgaatatagaacatcatttccaaatctaacttctagtctagaaataatatcggtcttattcttaaaatctattcccttgatgaagggatcgttaatgaacaaatccttggcctttgattcggctgatctattatctccgttatagacgttacgttgactagtccaaagacttacaggaatagatgtatcgatgatgttgatactatgtgatatgtgagcaaagattgttctcttagtggcatcactatatgttccagtaatggcggaaaactttttagaaatgttatatataaaagaattttttcgtgttccaaacattagcagattagtatgaagataaacactcatattatcaggaacattatcaatttttacatacacatcagcatcttgaatagaaacgataccatcttctggaacctctacgatctcggcagactccggataaccagtcggtgggccatcgctaacaataactagatcatccaacaatctactcacatatgcatctatataatctttttcatcttgtgagtaccctggatacgaaataaatttattatccgtatttccataataaggtttagtataaacagagagagatgttgccgcatgaacttcagttacagtcgccgttggttggtttatttgacctattactctcctaggtttctctataaacgatggtttaatttgtacattcttaaccatatatccaataaagctcaattcaggaacataaacaaattctttgttgaacgtttcaaagtcgaacgaagagtcacgaataacgatatcggatactggattgaaggttaccgttacggtaatttttgaatcggatagtttaagactgctgaatgtatcttccacatcaaacggagttttaatataaacgtatactgtagatggttctttaatagtgtcattaggagttaggccaatagaaatatcattaagttcactagaatatccagagtgtttcaaagcaattgtattattgatacaattattatataattcttcgccctcaatttcccaaataacaccgttacacgaagagatagatacgtgattaatacatttatatccaacatatggtacgtaactgaatcttcccatacctttaacttctggaagttccaaactcagaaccaaatgattaagcgcagtaatatactgatccctaatttcgaagctagcgatagcctgattgtctggaccatcgtttgtcataactccggatagagaaatatattgcggcatatacaaagttggaatttgactatcgactgcgaagacattagaccgtttaatagagtcatccccaccgatcaaagaattaatgatagtattattcattttctatttaaaatggaaaaagcttacaataaactccgtagagaaatatctataatttgtgagttttccttaaagtaacagcttccgtaaacgccgtctttatctcttagtaggtttattgtatttatgaccttttccttatcttcatagaatactaaaggcaacaaagaaatttttggttcttctctaagagctacgtgagacttaaccatagaagccaacgaatccctacatattttagaacagaaataccctacttcaccacccttgtatgtctcaatactaataggtctaaaaaccaaatcttgattacaaaaccaacacttatcaattacactatttgtcttaatagacacatctgccatagatttataatactttggtagtatacaagcgagtgcttcttctttagcgggcttaaagactgctttaggtgctgaaataaccacatctggaaggcttactcgcttagccatttaattacggaactatttttttatacttctaatgagcaagtagaaaacctctcatctacaaaaacgtactcgtgtccataatcctctaccatagttacacgttttttagatctcatatgtgctaaaaagttttcccatactaattggttactattatttttcgtataatttttaacagtttgaggttttagatttttagttacagaagtgatatcgaatattttatccaaaaagaatgaataattaattgtcttagaaggagtgttttcttggcaaaagaataccaagtgcttaaatatttctactacttcattaatcttttctgtactcagattcagtttctcatcttttacttgattgattatttcaaagactaacttataatcctttttatttattctctcgttagccttaagaaaactagatacaaaatttgcatctacatcatccgtggatatttgatttttttccatgatatccaagagttccgagataatttctccagaacattgatgagacaataatctccgcaatacatttctcaaatgaataagtttattagacacgtggaagtttgactttttttgtacctttgtacatttttgaaataccgactcgcaaaaaatacaatattcatatccttgttcagatactataccgttatgtctacaaccgctacataatcgtagattcatgttaacactctacgtatctcgtcgtccaatattttatataaaaacattttatttctagacgttgccagaaaatcctgtaatatttttagttttttgggctgtgaataaagtatcgccctaatattgttaccgtcttccgccaatatagtagttaaattatccgcacatgcagaagaacaccgcttaggcggattcagtacaatgttatatttttcgtaccaactcatttaaatatcataatctaaaatagttctgtaatatgtctagcgctaatatattgatcataatcctgtgcataaattaagatacaacaatgtctcgaaatcatcgacatggcttcttccatagttagaagatcgtcgtcaaagttagcaacgtgattcatcaacatttgctgttttgaggcagcaaatactgaaccgtcgccattcaaccattcataaaaaccatcgtctgaatccattgataatttcttgtactggtttttgagagctcgcatcaatctagcatttctagctcccggattgaaaacagaaagaggatcgtacatccagggtccattttctgtaaatagaatcgtataatgtcccttcaagaagatatcagacgatccacaatcaaagaattggtctccgagtttgtaacaaactgcggactttaacctatacatgataccgtttagcataatttctggtgatacgtcaatcggagtatcatctattagagatctaaagccggtgtaacattctccaccaaacatattcttattctgacgtcgttctacataaaacatcattgctccattaacgataacaggggaatgaacagcactacccatcacattagttcccaatggatcaatgtgtgtaactccagaacatcttccatagcctatgttaggaggagcgaacaccactcttccactattgccatcgaatgccatagaataaatatccttggaattgatagaaatcggactgtcggatgttgtgatcatcttcataggattaacaactatgtatggtgccgcctgaagtttcatatcgtaactgatgccgtttataggtctagccacagaaaccaacgtaggtctaaatccaactatagacaaaatagaagccaatatctgttcctcatctgtcataacttgagagcatccagtatgaataatcttcattagatggggatctaccgcatcatcatcgttacaataaaaaattcccattctaatgttcataattgcttttctaatcatggtatgcatgtttgctctctgaatctctgtggaaattagatctgatacacctgtaatcactatcggattatcctccgtaagacgattaaccaacaacatataattataagactttacttttctaaattcataaagttgctggattaggctataggtgtctccatgtacatacgcgttctcgagcgcaggaagtttaataccgaatagtgccatcagaataggatgaatatagtaattagtttctggttttctataaataaaagacaaatcttgtgaactagacatatcggtaaaatgcatggattggaatcgtgtagtcgacagaagaatatgatgattagatggagagtatattttatctaactctttgagttggtcaccgattctaggactagctcgagaatgaataagtactaaaggatgagtacatttcacagaaacactagcattgttcaatgtgctctttacatgggtaaggagttgaaatagctcgtttctatttgttctgacaatatttagtttattcataatgttaagcatatcctgaatagtaaagttagatgtgtcatacttgttagtagttagatatttagcaattgcattcccatcatttctcaatctcgtactccaatcatgcgtggatgctacttcgtcgatggaaaccatacaatcctttttgataggctgttgagattgatcatttcctgcacgtttaggtttggtacgttgatttctagcccctgcggatataaagtcatcgtctacaatttgggacaatgaattgcatacactacaagacaaagatttatcagaagtgtgaatatgatcttcatctaccaaagaaagagtttgattagtataactagattttagtcctgcgttagatgttaaaaaaacatcgctattgaccacggcttccattatttatattcgtagtttttactcgaaagcgtgattttaatatccaatcttattacttttggaatcgttcaaaacctttgactagttgtagaatttgatctattgccctacgcgtatactcccttgcatcatatacgttcgtcaccagatcgtttgtttcggcctgaagttggtgcatatctctttcaacattcgacatgagatccttaagggccatatcgtctagattttgttgagatgctgctcctggatttggattttgttgtgctgttgtacatactgtaccaccagtaggtgtaggagtacatacagtggccacaataggaggttgagaaagtgtaaccgttggagtagtacaagaaatacttccatccgattgttgtgtacatgtagttgttggtaacgtctgagaaggttgggtagatggcggcgtcgtcgttttttgatctttattaaatttagagataatatcctgaacagcattgctcggcgtcaacgctggaaggagtgaactcgccggcgcatcagtatcttcagacagccaatcaaaaagattagacatatcagatgatgtattagtttgttgtcgtggttttggtgtaggagcagtactactaggtagaagaataggagccgatgtagctgttggaaccggctgtggagttatatgaatagttggttgtagcggttggataggctgtctgctggcggccatcatattatctctagctagttgttctcgcaactgtctttgataatacgactcttgagactttagtcctatttcaatcgcttcatcctttttcgtatccggatccttttcttcagaataatagattgacgactttggtgtagaggattctgccagcctctgtgagaacttgttaaagaagtccatttaaggctttaaaattgaattgcgattataagattaaatggcagacacagacgatattatcgactatgaatccgatgatctcaccgaatacgaggatgatgaagaagaggaagaagatggagagtcactagaaactagtgatatagatcccaaatcttcttataagattgtagaatcagcatccactcatatagaagatgcgcattccaatcttaaacatatagggaatcatatatctgctcttaaacgacgctatactagacgtataagtctatttgaaatagcgggtataatagcagaaagctataacttgcttcaacgaggaagattacctctagtttcagaattttctgacgaaacgatgaagcaaaatatgctacatgtaattatacaagagatagaggagggttcttgtcctatagtcatcgaaaagaacggagaattgttgtcggtaaacgattttgacaaagatggtctaaaattccatctagactatattatcaaaatttggaaacttcaaaaacgatattagaatttatacgaatatcgttctctaaatgtcacaatcaagtctcgcatgttcagcaatttattgtcgtactttatatcgtgttcattaacgatatcttgcaaaatagtaatgattctatcttccttcgatagatattcttcagagattattgtcttatattctttcttgttatcagatatgaatttgataagactttgaacattattgatacccgtctgtttaattttttctacagatattttagttttggcagattctatcgtatctgtcaatagacatccaacatcgacattcgacgtcaattgtctataaatcaacgtataaattttagaaataacattagcgaattgttgtgcgttgatgtcgttattctgaaacagtatgattttaggtagcattttcttaacaaagagaacgtatttattgttactcagttgaacagatgatatatccagattactaacgcatctgattccgtataccaaactttcagaagaaatggtatacaattgtttgtattcattcaatgtctctttttcagaaattagtttagagtcgaatactgcaataattttcaagagatagttttcatcagataagattttatttagtgtagatatgataaaactattgttttgttggagaacttgatacgccgcgttctctgtagtcgacgctctcaaatgggaaacaatctccattatttttttggaatcggatactatatcttcggtatcttgacgcagtctagtatacatagagttaagagagattagagtttgtacattaagcaacatgtctctaaatgtggctacaaacttttcctttttcacatcatctagtttattatataccgatttcacaacggcaccagatttaaggaaccagaatgaaaaactctgataactacaatatttcatcatagttacgattttatcatcttctatagttggtgtaatagcgcatacctttttctccaagactggaaccaacgtcataaaaatgtttaaatcaaaatccatatcaacatctgatgcgctaagaccagtctcgcgttcaagattatctttactaatggtgacgaactcatcgtataaaactctaagtttgtccattatttatttacagatttagttgtttaatttatttgtgctcttccagagttgggatagtatttttctaacgtcggtattatattattaggatctacgttcatatgtatcataatattaatcatccacgttttgataaatctatctttagcttctgaaataacgtatttaaacaaaggagaaaaatatttagctacggcatcagacgcaataacattttttgtaaatgtaacgtatttagacgacagatcttcgttaaaaagttttccatctatgtagaatccatcggttgttaacaccattcccgcgtcagattgaataggagtttgaatagtttgttttggaaatagatccttcaataacttatagttgggtgggaaaaaatcgattttatcactagactctttcttttttactatcattacctcatgaactatttcttgaatgagtatatgtattttctttcctatatcggacgcgttcattggaaaatataccatgtcgttaactataagaatatttttatcctcgtttacaaactgaataatatcagatgtagttcgtaaacgaactatatcatcaccagcacaacatctaactatatgatatccactagtttcctttagccgtttattatcttgttccatattagcagtcattccatcatttaagaaggcgtcaaaaataatagggagaaatgacattttggattctgttacaactttaccaaaattaaggatatacggacttactatctttttctcaacgtcaatttgatgaacacacgatgaaaatgtgcttctatgagattgatcatgtagaaaacaacaagggatacaatatttccgcatatcatgaaatatattaagaaatcccaccttattatatttccccaaaggatccatgcacgtaaacattatgccgttatcattaataaagacttctttctcatcggatctgtaaaagttgttactgatttttttcattccaggatctagataattaataatgatgggttttctattcttattctttgtattttggcatatcctagaccagtaaacagtttccactttggtaaaatcagcagacttttgaacgctattaaacatggcattaatggcaataactaaaaatgtaaaatatttttctatgttaggaatatggtttttcactttaatagatatatggtttttggccaaaatgatagatatttttttatccgaggatagtaaaatattattagtcgccgtctctataaaaatgaagctagtctcgatatccaattttattctagaattgataggagtcgccaaatgtaccttatacgttatatctcccttgatgcgttccatttgtgtatctatatcggacacaagatctgtaaatagttttacgttattaatcatcacggtatcgccgtcgctagataacgctaatgtaccatccaagtcccaaatggagagatttaactgttcatcgtttagaataaaatgattaccggtcatattaataaagtgttcatcgtatctagataacaacgacttataattaatgtccaagtcttgaactcgctgaatgatcttttttaacccagttagttttagattggtacgaaatatattgttaaactttgattctacagtaatgtccaaatctagttgtggaaatacttccatcaacattgtttcaaacttgataatattattatctacatcttcgtacgatccaaattccggaatagatgtatcgcacgctctggccacccagataaccaaaaagtcacacgctccaggatatacattgtataaaaagctatcgttttttagtagggtttttttctgcgtgtatacgaagggattaaaaatagtattatcaacgtaactatattccaaattattcttatgagaatagataataatatcgtccttaatatctaacaaatttcctaaatatccctttaattgagtcattcgaagcgtcaatagaatatgtctcttaactatttccggctgttgtatatttaaatgacttcgtaaaaaataatatatgggcgacttctcatctatgtaatcatatggagtgagatatagggctcgttctacctcctgccccttacccacctgtaataccaattgcggacttactatatatcgcatatttatatcgtggggtaaagtgaaaatctactaccgatgatgtaagtcttacaatgttcgaaccagtaccagatcttaatttggaggcctccgtagaactaggggaggtaaatatagatcaaacaacacctatgataaaggagaatagcggttttatatcccgcagtagacgtctattcgcccatagatctaaggatgatgagagaaaactagcactacgattctttttacaaagactttattttttagatcatagagagattcattatttgttcagatgcgttgacgctgtaaaagacgtcactattaccaaaaaaaataacattatcgtggcgccttatatagcacttttaactatcgcatcaaaaggatgcaaacttacagaaacaatgattgaagcattctttccagaactatataatgaacatagtaagaaatttaaattcaactctcaagtatccatcatccaagaaaaactcggataccagtttggaaactatcacgtttatgattttgaaccgtattactctacagtagctctggctattcgagatgaacattcatctggcatttttaatatccgtcaagagagttatctggtaagttcattatctgaaataacatatagattttatctaattaatctaaaatctgatcttgttcaatggagtgctagtacgggcgctgtaattaatcaaatggtaaatactgtattgattacagtgtatgaaaagttacaactggtcatagaaaatgattcacaatttacatgttcattggctgtggaatcaaaacttccaataaaattacttaaagatagaaatgaattatttacaaaattcattaacgagttaaaaaagaccagttcattcaagataagcaaacgcgataaggatacgctactaaaatattttacttaggactggagttagaatttatagacgactcatttcgtttatcattgttactattattactattactatcattattagtgttggcattattagtattcttcttgtcatcttgttcagaaatatacagcaatgctatacctaatactaaatacattatcatgctcgcaatggctctaacaacaacgaaccaaaatgaatttggtcgtagcttttgttcacaaaaatacataaagaaatgtctacataaatctatggcgccattggctacttgaaatagcgccagtcctcctacagattttaatatagctgtataacatgacatttattcatcatcaaaagagacagagtcaccatctgtcatatttagattttttttcatgtgttcaaagtatcctctactcatttcattataatagtttatcatacttagaattttaggacggatcaatgagtaagacttgactagatcgtcagtagtaatttgtgcatcgtctattctgcatccgcttcgtcgaataatgtatagcatcgctttgagattctccatagctatcaagtctttatacaatgacatggaaatatctgtgaatactttatacttctccaacatcgatgccttaacatcatcgcctactttagcattgaaaatacgttctattgtgtagatggatgtagcaagatttttaaacaacaatgccatcttacacgatgattgcctcaagtctccaatcgtttgtttagaacgattagctacagagtccaatgcttggctgactagcatattattatctttagaaattgtattcttcaatgaggcgtttatcatatctgtgatttcgttagtcatattacagtctgactgggttgtaatgttatccaacatatcacctatggatacggtacacgtaccagcatttgtaataatcctatctaagatgttgtatggcattgcgcagaaaatatcttctcctgtaatatctccactctcgataaatctactcagattattcttaaatgccttattctctggagaaaagatatcagtgtccatcatttcattaatagtatacgcagaaaagataccacgagtatcaattctatccaagatacttatcggttccgagtcacagataatggtttcctctccttcgggagatcctgcatagaaatatctaggacaatagtttctatactgtctgtaactctgataatctctaaagtcactaactgataccatgaaattgagaagatcaaacgctgaagtaattaatttttctgcctcgtttttactacaactagttttcatcaatgtagtgacgatgtattgtttagttacttttggtctaatactgatgatagagatattattgcttcccataatggatcttctagtagtcaccttaaagcccattgatgcgaatagcagatagataaagtcttggtatgactcctttctaatatagtacggactacctttgtcacccaactttatacccacataagccataacaacctctttaatagccgtttcatgaggtttatcagccatgagcctgagtagttggaagaatctcatgaatcccgtctcagaaagtcctatatgcatgatagatttatctttcctgggaaactctcgtatagtcatagatgaaatactctttaaagtttctgaaataagattagtaacagtcttacctccgactactctaggtaacaaacaaactctaataggtgttttctctgcggagataatatcagaaaggatagagcaataagtagtattattgtgattataaagaccgaatacataacaggtagaatttataaacatcatgtcctgaaggtttttagacttgtattcctcgtaatccataccgtcccaaaacatggatttggtaactttgatagccgtagatctttgttccttcgccaacaggttaaagaaattaataaagaatttgttgtttctatttatgtccacaaattgcacgtttggaagcgccacggttacattcactgcagcattttgaggatcgcgagtatgaagtacgatgttattgtttactggtatatctggaaagaaatctaccagtctaggaataagagattgatatcgcatagaaatagtaaagtttataatctcatcatcgaagagcattttgttaccattgtaataaatatccactctgtcatatgtataaatgaagtactgttcaaacatgatgagatgtttatatgttggcatagtagtgagatcgacgtttggtaatggcaatgtattaagattaactccataatgtctagcagcatctgcgatgttataagcgtcgtcaaagcggggtcgatcttgtattgttatatattgtctaacacctataagattatcaaaatcttgtctgcttaatacaccgttaacaatttttgccttgaattcttttattggtgcattaataacatccttatagaggatgttaaacaaataagtgttatcaaagttaagatctggatatttcttttctgctagaacatccattgagtcggagccatctggtttaatataaccaccgataaatctagctctgtattctgtatccgtcaatctaatattaagaaggtgttgagtgaaaggtggaagatcgtaaaagctgtgagtattaatgataggattagtttccgaactaatgttaattggggtattaataatatctatatttccagcgttaagtgtaacattaaacagttttaattcacgtgacgtggtatcaattaaataattaatgcccaatttggatatagcagcctgaagctcatcttgtttagttacggatcctaatgagttattaagcaatatatcgaacggatgaacgaaggttgttttaagttggtcacatactttgtaatctagacatagatgcggaagaacggtagaaactatacgaaataaatattcagagtcctctaattgatcaagagtaactattgacttaataggcatcatttatttagtattaaatgacgaccgtaccagtgacggatatacaaaacgatttaattacagagttttcagaagataattatccatctaacaaaaattatgaaataactcttcgtcaaatgtctattctaactcacgttaacaacgtggtagatagagaacataatgccgccgtagtgtcatctccagaggaaatatcctcacaacttaatgaagatctatttccagatgatgattcaccggccactattatcgaacgagtacaacctcatactactattattgacgatactccacctcctacgtttcgtagagagttattaatatcggaacaacgtcaacaacgagaaaaaagatttaatattacagtatcgaaaaatgctgaagcaataatggaatctagatctatgataacttctatgccaacacaaacaccatccttgggagtagtttatgataaagataaaagaattcagatgttagaggatgaagtggttaatcttagaaatcaacgatctaatacaaaatcatctgataatttagataattttaccaaaatactatttggtaagactccgtacaaatcaacagaagttaataagcgtatagccatcgttaattatgcaaatttgaacgggtcccccttatcagtcgaggacttggatgtttgttcggaggatgaaatagatagaatctataaaacgattaaacaatatcacgaaagtagaaaacgaaaaattatcgtcactaacgtgattattattgtcataaacattatcgagcaggcattgctaaaactcggatttgaagaaatcaaaggactgagtaccgatatcacttcagaaattatcgatgtggagatcggagatgactgcgatgctgtagcatctaaactaggaatcggtaacagtccggttcttaatattgtattgtttatactcaagatattcgttaaacgaattaaaattatttaatttaatacattcccatatccagacaacaatcgtctggattaatctgttcctgtcgtctcataccggacgacatattaatctttttattagtgggcatctttttagatggtttctttttcccagcattaactgagtcgatacctagaagatcgtgattgatctctccgaccattccacgaacttctaattggccgtctctgacggtaccataaactattttaccagcattagtaacagcttggacaatctgaccatccatcgcattgtacgatgtagtagtaactgttgttctacgtctaggagcaccagaagtatttttggagcccttggatgttgatgtagaagaagacgaggattttgattttggtttacatgtaatacattttgaactctttgattttgtatcacatgcgccggcagtcacatctgtttgagaattaagattattgttgcctcctttgacggctgcatctccaccgatttgcgctagtagatttttaagctgtggtgtaatcttattaactgtttcgatataatcatcgtaactgcttctaacggctaaattttttttatccgccatttagaagctaaaaatatttttatttatgcagaagatttaactagattatacaatgaactaatatgatccttttccagattatttacaaacttggtattttttggttctggaggaggcgaatttaaattcggacttggattcggattttgtaagttcttgatcttattatacatcgagtataggatggcgacagtaactgctacacaaataccgatcaaaagaagaataccaatcatttattgacaataacttcactattgatcaagtatgcaatatatcatcttttcactaaataagtagtaataatgattcaacaatgtcgagatatatggacgataataatttagttcatggaaatatcgctatgattggtgtgaatgactccgctaactctgtggggtgcgcagtgctttccccacatagaataaattagcattccgactgtgataataataccaagtataaacgccataatactcaatactttccatgtacgagtgggactggtagacttactaaagtcaataaaggcgaagatacacgaaagaatcaaaagaatgattccagcgattagcacgccggaaaaataatttccaatcataagcatcatgtccatttaactaataaaaattttaaatcgccgaatgaacaaagtggaatataaaccatataaaaacaatagtttgtactgcaaaaataatatctatttttgttttcgaagatatggtaaaattaaatagtagtacacagcatgttataactaacagcagcaacggctcgtaattacttatcatttactagacgaaaaggtggtgggatattttcttgctcaaataatacgaatatatcacccatccattttatgcgatgtttatatactctaatctttaatagatctatagacgacgggtttaccaacaatatagattttatcgattcatctaatttaaacccttccttaaacgtgaatgatctattatctggcataacgatgaccctacctgatgaatcggacaatgtactgggccatgtagaataaattatcaacgaattatcgtctacgaacatttatatcatttgttttaattttaggacgcgaataaatggatataaaatagaaaataacagatattacaaccagtgttatggccgcgcccaaccaggtaggcagttttattttatcttttactacaggttctcctggatgtacgtcaccaacggcggacgtagttctagtacaattagacgtaagttccgcttgggaattttttaacgctaaagagttaacgttaatcgtgcacccaacgtatttacatctagttcgttgaacatcttgattataatataaccattttctatctctagattcgtcagtgcactcatgtaaccaacataccctaggtcctaaatatttatctccggaattagattttggataattcgcgcaccaacaatttctatttcctttatgatcgttacaaaagacgtataatgccgtatccccaaaagtaaaataatcaggacgaataattctaataaactcagaacaatatctcgcatccatatgtttggagcaaatatcggaataagtagacatagccggtttccgttttgcacgtaaccattctaaacaattggggtttccaggatcgtttctacaaaatccagtcatgaaatcgtcacaatgttctgtcttgtaattattattaaatatttttggacagtgtttggtatttgtcttagaacaacattttgccacgctatcactatcgcccaggagataatccttttttataaaatgacatcgttgcccggatgctatataatcagtagcgtgttttaaatccttaatatattcaggagttacctcgttctgataatagattaatgatccaggacgaaatttgaaagaactacatggttctccatgaattaatacatattgtttagcaaattcaggaactataaaactactacaatgatctatcgacataccatctatcaaacaaaacttgggtttaatttctcccggagatgtttcataatagtacgtataactttcttctgcaaacttaacagctctattatattcaggataattaaaacctaattccatatatttgtctcgtatatctgctattcctggtgctattttgattctattaagagtaacagctgcccccattcttaataatcgtcagtatttaaactgttaaatgttggtatatcaacatctaccttatttcccgcagtataaggtttgttgcaggtatactgttcaggaatggttacatttatacttcttctatagtcctgtctttcgatgttcatcacatatgcaaagaacagaataaacaaaataatgtaagaaataatattaaatatctgtgaattcgtaaatacattgattgccataataattacagcagctacaatacacacaatagacattcccacagtgttgccattacctccacgatacatttgagttactaagcaataggtaataactaagctagtaagaggcaatagaaaagatgagataaatatcatcaatatagagattagaggagggctatatagagccaagacgaacaaaatcaaaccgagtaacgttctaacatcattatttttgaagattcccaaataatcattcattcctccataatcgttttgcatcatacctccatctttaggcataaacgattgctgctgttcctctgtaaataaatctttatcaagcactccagcacccgcagagaagtcgtcaagcatattgtaatatcttaaataactcatttatatattaaaaaatgtcactattaaagatggagtataatctttatgccgaactaaaaaaaatgacttgtggtcaacccctaagtctttttaacgaagacggggatttcgtagaagttgaaccgggatcatcctttaagtttctgatacctaagggattttacgcctctccttccgtaaagacgagtctagtattcgagacattaacaacgaccgataataaaatcactagtatcaatccaacaaatgcgccaaagttatatcctcttcaacgcaaagtcgtatctgaagtagtttctaatatgaggaaaatgatcgaatcaaaacgtcctctatacatcactcttcacttggcgtgtggatttggtaagactattaccacgtgttatcttatggctacacacggtagaaaaaccgtcatttgcgtacccaataaaatgttaatacatcaatggaagacacaggtagaggcagtcggattggaacataagatatccatagatggagtaagtagtctattaaaggaactaaagactcaaagtccggatgtattaatagtagtcagtagacatctgacaaacgatgccttttgtaaatatatcaataagcattatgatttgttcatcttggatgaatcacatacgtataatctgatgaacaatacagcagttacaagatttttagcgtattatcctccgatgatgtgttattttttaactgctacacctagaccatctaaccgaatttattgtaacagtattattaatattgccaagttatccaatctaaaaaaaactatctatgcagtagatagtttttttgagccatattccacagataatattagacatatggtaaaacgactagatggaccatctaataaatatcatatatataccgagaagttattatctgtagacgagcctagaaatcaacttattcttgataccctggtagaagaattcaagtcaggaactattaatcgcattttagttattactaaactacgtgaacatatggtattattctacaaacgattattagattttttcggaccagaggttgtatttataggagacgcccaaaatagacgtactccagatatggtcaaatcaatcaaggaactaaatagatttatattcgtatccaccttattttattccggtactggtttagatattcctagtttggattcgttgttcatttgctcggcagtaatcaacaatatgcaaatagagcaattactagggagggtatgtcgagaaacagaactattagataggacggtatatgtatttcctaacacatccatcaaagaaataaagtacatgataggaaatttcatgcaacgaattattagtctgtctgtagataaactaggatttaaacaaaaaagttatcggaaacatcaagaatccgatcccacttctgcatgtacaacatcatccagagaagaacgtgtattaaatagaatatttaactcgcaaaatcgttaagaagtttaagcgacgatccgcatgctgcgcaggccagtgtattacccctcatagtattaatataatccaatgatacttttgtgatgtcggaaatcttaaccaatttagactgacaggcagaacacgtcatgcaatcatcatcgtcatcgataactgtagtcttgggcttctttttgcgactcttcattccggaacgcacattggtgctatccatttaggtagtaaaaaataagtcagaatatgccctataacacgatcgtgcaaaacctggtatatcgtctctatctttatcacaatatagtgtatcgacatttttattattattgacctcgtttatcttggaacatggaatgggaacatttttgttatcaacggccatctttgccttaattccagatgttgtaaaattataactaaacagtctatcatcgacacaaatgaaattcttgtttagacgtttgtagtttacgtatgcggctcgttcgcgtctcattttttcagatattgcaggtactataatattaaaaataagaatgaaataacataggattaaaaataaagttatcatgacttctagcgctgatttaactaacttaaaagaattacttagtctgtacaaaagtttgagattttcagattctgcggctatagaaaagtataattctttggtagaatggggaacatctacttactggaaaataggcgtgcaaaaggtagctaatgtcgagacgtcaatatctgattattatgatgaggtaaaaaataaaccgtttaatattgatccgggctattacattttcttaccggtatattttgggagcgtctttatttattcgaagggtaaaaatatggtagaacttggatctggaaactcttttcaaataccagatgatatgcgaagtgcgtgtaacaaagtattagacagcgataacggaatagactttctgagatttgttttgttaaacaatagatggataatggaagatgctatatcaaaatatcagtctccagttaatatatttaaactagctagtgagtacggattaaacatacccaaatatttagaaattgaaatagaggaagacacattatttgacgacgagttatactctattatagaacgctctttcgatgataaatttccaaaaatatccatatcgtatattaagttgggagaacttagacggcaagttgtagactttttcaaattctcattcatgtatattgagtccatcaaggtagatcgtataggagataatatttttattcctagcgttataacaaaatcaggaaaaaagatattagtaaaagatgtagaccatttaatacgatccaaggttagagaacatacatttgtaaaagtaaaaaagaaaaacacattttccattttatacgactatgatggaaacggaacagaaactagaggagaagtaataaaacgaattatagacactataggacgagactattatgttaacggaaagtatttctctaaggttggtagtgcaggcttaaagcaattgactaataaattagatattaatgagtgcgcaactgtcgatgagttagttgatgagattaataaatccggaactgtaaaacgaaaaataaaaaaccaatcagcatttgatttaagcagagaatgtttgggatatccagaagcggattttataacgttagttaataacatgcggttcaaaatagaaaattgtaaggttgtaaatttcaatattgaaaatactaattgtttaaataacccgagtattgaaactatatatggaaactttaaccagttcgtctcaatctttaatgtcgtcaccgatgtcaaaaaaagattattcgagtgaaataatatgcgcctttgatataggtgcaaaaaatcctgccagaactgttttagaagtcaaggataactccgttagggtattggatatatcaaaattagactggagttctgattgggaaaggcgcatagctaaagatttgtcacaatatgaatacactacagttcttctagaacgtcagcctagaaggtcgccgtatgttaaatttatctattttattaaaggctttttatatcatacatcggctgccaaagttatttgcgtctcgcctgtcatgtctggtaattcatatagagatcgaaaaaagagatcggtcgaagcatttcttgattggatggacacattcggattgcgagactccgttccggatagacgcaaattagacgatgtagcggatagtttcaatttggctatgagatacgtattagataaatggaatactaattatacaccttataataggtgtaaatctagaaattacataaaaaaaatgtaataacgttagtaacgccattatggataatctatttacctttctacatgaaatagaagatagatatgccagaactatttttaactttcatctaataagttgcgatgaaataggagatatatatggtcttatgaaagaacgcatttcctcagaggatatgtttgataatatagtgtataataaagatatacatcctgccattaagaaactagtgtattgcgacatccaacttactaaacacattattaatcagaatacgtatccggtatttaacgattcttcacaagtgaaatgttgtcattatttcgacataaactcagataatagcaatattagctctcgtacagtagagatatttgagagggaaaagtcatctcttgtatcatatattaaaactaccaataagaagagaaaggtcaattacggcgaaataaagaaaactgttcatggaggcactaatgcaaattacttttccggtaaaaagtctgacgagtatctgagtactacagttagatccaacattaatcaaccttggatcaaaaccatctctaagaggatgagagttgatatcattaatcactctatagtaacgcgtggaaaaagctctatattacaaactatagaaattatttttactaatagaacatgtgtgaaaatattcaaggattctactatgcacattattctatccaaggacaaggatgaaaaggggtgtatacacatgattgacaaattattctatgtctattataatttatttctgttgttcgaagatatcatccaaaacgagtactttaaagaagtagctaatgttgtaaaccacgtactcacggctacggcattagatgagaaattattcctaattaagaaaatggctgaacacgatgtttatggagttagcaatttcaaaatagggatgtttaacctgacatttattaagtcgttggatcataccgttttcccctctctgttagatgaggatagcaaaataaagttttttaaggggaaaaagctcaatattgtagcattacgatctctggaggattgtataaattacgtgactaaatccgagaatatgatagaaatgatgaaggaaagatcgactattttaaatagcatagatatagaaacggaatcggtagatcgtctaaaagaattgcttctaaaatgaaaaaaaacactaattcagaaatggatcaacgactagggtataagtttttggtgcctgatcctaaagccggagttttttatagaccgttacatttccaatatgtatcgtattctaattttatattgcatcgattgcatgaaatcttgaccgtcaagcggccactcttatcgtttaagaataatacagaacgaattatgatagaaattagcaatgttaaagtgactcctccagattactcacctataatcgcgagtattaaaggtaagagttatgacgcattagccacgttcactgtaaatatctttaaagaggtaatgaccaaagagggtatatccatcactaaaataagtagttatgagggaaaagattctcatttgataaaaattccgctactaataggatacgggaataaaaatccacttgatacagccaagtatcttgttcctaatgtcataggtggagtctttatcaataaacaatctgtcgaaaaagtaggaattaatctagtagaaaagattacaacatggccaaaatttagggttgttaagccaaactcattcactttctcgttttcctccgtatcccctcctaatgtattaccgacaagatatcgccattacaagatatctctggatatatcacaattggaagcgttgaatatatcatcgacaaagacatttataacggtcaatattgttttgctgtctcaatatttatctagagtgagtctagaattcattagacgtagtttatcatacgatatgcctccagaagttgtctatctagtaaacgcgataatagatagtgctaaacgaattactgaatctattactgactttaatattgatacatacattaatgacctggtggaagctgaacacattaaacaaaaatctcagttaacgatcaacgagttcaaatatgaaatgctgcataactttttacctcatatgaactatacacccgatcaactaaagggattttatatgatatctttactaagaaagtttctctactgtatcttccacacttctagatatccagatagagattcgatggtttgtcatcgcatcctaacgtacggcaaatattttgagacgttggcacatgatgaattagagaattacataggcaacatccgaaacgatatcatgaacaatcacaagaacagaggcacttacgcggtaaacattcatgtactaacaactcccggacttaatcacgcgttttctagcttattgagtggaaagttcaaaaagtcagacggtagttatcgaacacatcctcactattcatggatgcagaatatttctattcctaggagtgttggattttatccggatcaagtaaagatttcaaagatgttttctgtcagaaaataccatccaagtcaatatctttacttttgttcatcagacgttccggaaagaggtcctcaggtaggtttagtatctcaattgtctgtcttgagttccattacaaatatactaacgtctgagtatttggatttggaaaagaaaatttgtgagtatatcagatcatattataaagatgatataagttactttgaaacaggatttccaatcactatagaaaatgctctagtcgcatctcttaatccaaatatgatatgtgattttgtaactgactttagacgtagaaaacggatgggattcttcggtaacttggaggtaggtattactttagttagggatcacatgaatgaaattcgcattaatattggagcgggaagattagtcagaccattcttggttgtggataacggagagctcatgatggatgtgtgtccggagttagaaagcagattagacgacatgacattctctgacattcagaaagagtttccgcatgtcatcgaaatggtagatatagaacaatttacttttagtaacgtatgtgaatcggttcaaaaatttagaatgatgtcaaaggatgaaagaaagcaatacgatttatgtgactttcctgccgaatttagagatggatatgtagcatcttcattagtgggaatcaatcacaattctggacccagagctattcttggatgtgctcaagctaaacaagctatctcttgtctgagctcggatatacgaaataaaatagacaatggaattcatttgatgtatccagagaggccaatcgtgattagtaaggctttagaaacttcaaagattgcggctaattgcttcggccaacatgttactatagcattaatgtcgtacaaaggtatcaatcaagaggatggaattatcatcaaaaaacaatttattcagagaggcggtctcgatattgttacagccaagaaacatcaagtagaaattccattggaaaactttaataacaaagaaagagataggtctaacgcctattcaaaattagaaagtaatggattagttagactgaatgctttcttggaatccggagacgctatggcacgaaatatctcatcaagaactcttgaagatgattttgctagagataatcagattagcttcgatgtttccgagaaatataccgatatgtacaaatctcgcgttgaacgagtacaagtagaacttactgacaaagttaaggtacgagtattaaccatgaaagaaagaagacccattctaggagacaaatttaccactagaacgagtcaaaagggaacagtcgcgtatgtcgcggatgaaacggaacttccatacgacgaaaatggtatcacaccagatgtcattattaattctacatccatcttctctagaaaaactatatctatgttgatagaagttattttaacagccgcatattctgctaagccgtacaacaataagggagaaaaccgacctgtctgttttcctagtagtaacgaaacatccatcgatacatatatgcaattcgctaaacaatgttatgagcattcaaatccgaaattgtccgatgaagaattatcggataaaatcttttgtgaaaagattctctatgatcctgaaacggataagccttatgcatccaaagtattttttggaccaatttattacttgcgtctgaggcatttaactcaggacaaggcaaccgttagatgtagaggtaaaaagacgaagctcattagacaggcgaatgagggacgaaaacgtggaggaggtatcaagttcggagaaatggagagagactgtttaatagcgcatggtgcagccaatactattacagaagttttgaaagattcggaagaagattatcaagatgtgtatgtttgtgaaaattgtggagacatagcagcacaaatcaagggtattaatacatgtcttagatgttcaaaacttaatctctctcctctcttaacaaaaattgataccacgcacgtatctaaagtatttcttactcaaatgaacgccagaggcgtaaaagtcaaattagatttcgaacgaaggcctccttcgttttataaaccattagataaagttgatctcaagccgtcttttctggtgtaatattctagtttggtagtagatacatatcaatatcatcaaattcgagatccgaattataaaatgggcgtggattgttaactatagaatcggacgtctgatattcgaaaatctgtggagtttcaggttttggtggaggtgtaactgctacttgggatactgaagtctgatattcagaaagctgtggatgttctggttcggcatccaccgatggtgtcacatcactaatcggttcggtaacgtctgtggatggaggtgctacttctacagaacctgtagcctcagttgtcaacggagatacatttttaatgcgagaaaatgtataatttggtaatggtttcttatgtggatctgaagaagaggtaagatatctactagaaagataccgatcacgttctagttctcttttgtagaacttaactttttctttctccgcatctagttgatattccaacctcttcacgttactacgttcagattccaattcacgttcgcatgggttacctccgcagtttttacgagcgatttcacgttcagccttcatgcgtctctccctctctctatcgagtttatcagagcagtctttctgaaggcgatcgaactccataaatttctccaacgctttgattgtttccatagatttccgaagttcagcttttaggactgtgattctttttctttcgaattcacagctggatgtacaaccgtttccattaccgccatctctaagtttcttttctagatcggcaacatttcatccccatgccttttacattcctcgagtctactgtcgtcgaaatatcgttccagctccttttcgacatcaataactttagcacgttgtctctcaagctctcttttgtagttatctgattccctggcacgtttaagatcttcatgcaattgagtcagctcttaacttcctctcttgcttcttcgtcatagtacgcgcaatcactgtgagatccattgttaccacgtctacactcggcgagctcgcgtttaagagattcaatttcccgtttgtattggtccatgtttccattgctaccaccattagatttacaggctgctagttgtcgttcgagatcagaaatacgggttttcttggaattgatttcgtcgatgtacttggcatcgaaacacttattaagttctttttccaattctacgattttatttctttcgcgagtcaattccctcctgtagtaactatctgttttgtcagattcacgctctctacgtagactttcttgcaagttactaatttgttccctagcacgtccgagtttagttttatatgctgaatagagttctgattcatcctttgagcagatctctagcgatcgtttaagattcctaattctagtctttagcctatttacctcctcagaagatgttccgttaccgttgcgtttacactcgttaagctgtctatcaagatccatgattctatctctaagacgttgcatctctctttccatatcagcattgctttcattattacgtctgcagtcactcaactgtctttcaatatctgagattctatctctaagacgtcgcatctctctctgtttcggcattggtttcattattacgtttacagtcgttcaactgtctttcaagatctgatattctagattggagtctgctaatctctgtagcattttcacggcattcactcagttgtctttcaagatctgaaattttagattggagtctgctaatctctgtaagatttcctcctccgctctcgatgcagtcggtcaacttattctctagttctctaatacgcgaacgcagtgcatcaacttcttgcgtgtcttcctggttgcgtgtacattcatcgagatctctaacgcgtcgtcgttcttcctcaagttctctgcgtactacagaaagcgtgtccctatcttgttgatatttagcaatttctgattctagagtactgattttgcttacgtagttactaatagttgtcttggccttatcaagatcctccttgtatttgtcgcattccttgatatccctacgaagtctggacagttcccattcgacattacgacgtttatcgatttcagctcggagatcgtcatcgcgttgttttagccacatacgactgagttcaagttctcgttgacaagatccatctacttttccattcctaatagtatccagttccttttctagttctgaacgcatttctcgttccctatcaagcgattctctcaattctcggatagtcttcttatcaatttctaataaatctgaaccatcatctgtcccattttgaatatccctgtgttctttgatctcttttgtaagtcggtcgattctttcggttttataaacagaatccctttccaaagtcctaatcttactgagtttatcactaagttctgcattcaattcggtgagttttctcttggcttcttccaactctgttttaaactctccactatttccgcattcttcctcgcatttatctaaccattcaattagtttattaataactagttggtaatcagcgattcctatagccgttcttgtaattgtgggaacataattaggatcttctaatggattgtatggcttgatagcatcatctttatcattattagggggatggacaaccttaattggttggtcctcatctcctccagtagcgtgtggttcttcaataccagtgttagtaataggcttaggcaaatgcttgtcgtacgcgggcacttcctcatccatcaagtatttataatcgggttctacttcagaatattcttttctaagagacgcgacttcgggagttagtagaagaactctgtttctgtatctatcaacgctggaatcaatactcaagttaaggatagcgaatacctcatcgtcatcatccgtatcttctgaaacaccatcatatgacatttcatgaagtctaacgtattgataaatagaatcagatttagtattaaacagatccttaacctttttagtaaacgcatatgtatattttagatctccagatttcataatatgatcacatgccttaaatgtcagtgcttccatgatataatctggaacactaatgggtgacgaaaaagatacagcaccatatgctacgttgataaataaatctgaaccactaagtagataatgattaatgttaagaaagaggaaatattcagtgtataggtatgtcttggcgtcatatcttgtactaaacacgctaaacagtttgttaatgtgatcaatttccaatagattaattagagcagcgggaataccaacaaacatattaccacatccgtattttctatgaatatcacatatcatgttaaaaaatcttgatagaagagcgaatatctcgtctgacttaatgagtcgtagttcagcagcaacataagtcataactgtaaatagaacatactttcctgtagtgttgattctagactccacatcaacaccattattaaaaatagttttatatacatctttaatctgctctccgttaatcgtcgaacgttctagtatacggaaacactttgatttcttatctgtagttaatgacttagtgatatcacgaagaatattacgaattacatttcttgtttttcttgagagacctgattcagaactcaactcatcgttccatagtttttctacctcagtggcgaaatctttggagtgcttggtacatttttcaataaggttcgtgacctccatttattataaaaaatttattcaaaacttaactacaatcgggtaattataagatcgtagatctcccatgtggcggaatactaccatctatcgcatgtggatggacagtaggtaatggccatgggaacagtaatgtttgcatatttatctttcttgctagtattactgcatattgtcccaatgtttcgatgtgatgttctaacctatcaactgccgctgtatcacaacaatagtgtccgatgaaattaagattatgatccaatgtgtttaatatatgattatcaagtcttatacgatccgcgtcttttttgacaggatcaggttcttctacaggaagaagtttcggcctcttatgatattcatgtctgggaaacggtggtctagggtgaggctccggtatcggagtgggttttggattataatcatcatcgtctatgacatcatcttcgacttcgatatttattttgctatcttgatgatgtcctgtatcagttgcattttcagcactcgactgaatattagcgcattcattgtctattattaccatatttctaaacccaaaatgtatgtgttgaacatcagtactatcgttgatgagtcttatagcatgaattcgcttatcgttatcgggtttatcttctgtcaccttagcaattccttttttattaaactctacataatcatatccatttctattgtttgttctaatataaacgagtatagcatcattgctaaatttttcaatagtatcaaaaacagaatatcctaaaccatataatatatattcaggaacactcaaactaaatgtccaggattctcctaaatacgtaaactttaatagtgcgaaatcattcaaaaatctaccacttatagatagatagtacataaatgcgtatagtagtctacctatctctttattatgaaaaccggcattacgatcatatatgtcgtgatatacctgtgatccgtttacgttaaaccataaatacatgggtgatcctataaacatgaatttatttctaattctcagagctatagttaattgaccgtgtaatatttgcttacatgcatacttgatacgcttattaataagatttttatcattgctcgttatttcagaatcgtatatataaggagtaccatcgtgattcttaccagatattatacaaaatactatatataaaatatattgacccacgttagtaatcatataaatgtttaacgttttaaattttgtattcaatgatccattatcatacgctatcatggtcttgtaatattcattctttaaaatataatattgtgttagccattgcattggagctcctaatggagattttctattctcatccattttaggataggctttcataaagtccctaataacttcgtgaataatgtttctatgttttctactgatgcatgtatttgcttcgatttttttatcccatgtttcatctatcatagatttaaacgcagtaatgctcgcaacattaacatcttgaaccgttggtacaattccgttccataaatttataatgttcgccatttatataactcattttttgaatatacttttaattaacaaaagagttaagttactcatatggacgccgtccagtctgaacatcaatctttttagccagagatatcatagccgctcttagagtttcagcgtgattttccaacctaaatagaacttcatcgttgcgtttacaacacttttctatttgttcaaactttgttgttacattagtaatctttttttccaaattagttagccgttgtttgagagtttcctcattgtcgtcttcatcggctttaacaattgcttcgcgtttagcctctggctttttagcagcctttgtagaaaaaaattcagttgctggaattgcaagatcgtcatctccggggaaaagagttccgtccatttaaagtacagattttagaaactgacactctgcgttatttatatttggtacaacacatggattataaatattgatgttaataacatcagaaaatgtaaagtctatacattgttgcatcgtgttaaattttctaatggatctagtattattgggtccaacttctgcctgaaatccaaatatggaagcggatacaaaaccgtttcctggataaaccacacatctccacttttgctttacatcagaaattgtgtcgttgacatcttgaactctcctatctaatgccggtgttccacctatagattttgaatattcgaatgctgcatgagtagcattaaattccttaatattgccataattttcatatattgagtaaccctggataaaaagtaaacacaccgcagccgtcgctaccacaataaaaaaaattgatagagagttcatttataatctattagaagctgacaaaatttttttacacgcatcagacaatgctttaataaatagttcaacatctacttttgtcatatcgaaccgatggtatgattctaacctagaattacatccgaaaaagttgactatgttcatagtcattaagtcattaacaaacaacattccagactctggattataagacgatactgtttcgtcacaattacctaccttaatcatgtgattatgaatattggctattagagcaccttctaagaaatctataatatctttgaaacacgatttaaaatcaaaccacgaatatacttctacgaagaaagttagtttacccataggagaaataactataaatggagatctaaatacaaaatccggatctatgatagttttaacattattatattctctattaaatacctccacatctaaaaatgttaattttgaaactatgtcttcgtttattaccgtacctgaactaaacgctataagctctattgtttgagaactctttaaacgatattcttgaaatacatgtaacaaagtttcctttaactcggtcggtttatctaccatagttacagaatttgtatccttatctataatataataatcaaaatcgtataaagttatataattatcgcgttcagattgtgatcttttcaaatagactaaaaaccccatttctctagtaagtatcttatgtatatgtttgtaaaatatcttcatggtgggaatatgctctaccgcagttagccattcctcattgacagcggtagatgtattagacaaaactattccaatgtttaacaagggccattttacgagattattaaatccttgtttgataaatgtagccaatgagggttcgagttcaacgacgattgaattctcttcccgcggatgctgcatgatgaacgacgggatgttgttcgattgatttggaattctttttcgactttttgtttatattaaatattttaaaatttatagcggatagcaattcatgtaccacggataatgtagacgcgtattgcgcatcgatatctttattattagataaatttatcaataaatgtgagaagtttgcctcgttaaggtcttccatttaaatattatataaacatttgtgtttgtatcttattcgtcttttatggaatagttttttactagtaaagctgcaattacacactttgtccgtaaaacataaatataaacaccagcttttatcaatcgttccaaaaagtcgacggcggacatttttaacatggcatctattttaaatacacttaggtttttggaaaaaacatcattttataattgtaacgattcaataactaaagaaaagattaagattaaacataagggaatgtcatttgtattttataagccaaagcattctaccgttgttaaatacttgtctggaggaggtatatatcatgatgatttggttgtattggggaaggtaacaattaataatctaaagatgatgctattttacatggatttatcatatcatggagtgacaagtagtggagcaatttacaaattgggatcgtctatcgatagactttctctaaataggactattgttacaaaagttaataattatgatgatacattttttgacgacgatgattgatcgctattgcacaattttgtttttgtactttctaatatagtgtttaggttctttttcatatgagaatattgatttactaaaatatctatgtttaacttttgttctatgacgtccttatcggcggtatcggtacatatacgtaattcaccttcacaaaatacggagtcttcgataataatagccaatcgattattggatctagctgtctgtatcatattcaacatgtttaatatatcctttcgtttcccctttacaggcatcgatcgtagcatattttccgcgtctgatatggaaatgttaaaactacaaaaatgcgtaatgttagcccgtcctaatattggtacgtgtctataagtttggcatagtagaataatagacgtgtttaaatgccttccaaagtttaagaattctattagagtattgcattttgatagtttatcgcctacatcatcaaaaataagtaaaaagtgtgctgattttttatgattttgtgcgacagcaatacatttttctatgttacttttagttcgtatcagattatattctagagattcctgactactaacgaaattaatatgatttggccaaatgtatccatcataatctgggttataaacgggtgtaaacaagaatatatgtttatattttttaactagtgtagaaaacagagatagtaaatagatagtttttccagatccagatcctcctgttaaaaccattctaaacggcatttttaataaattttctcttgaaaattgtttttcttggaaacaattcataattatatttacagttactaaattaatttgataataaatcaaaatatggaaaactaaggttgttagtagggaggagaacaaagaaggcacatcgtgatataaataacatttattatcatgatgacaccagaaaacgacgaagagcagacatctgtgttctccgctactgtttacggagacaaaattcagggaaagaataaacgcaaacgcgtgattggtctatgtattagaatatctatggttatttcactactatctatgattaccatgtccgcgtttctcatagtgcgcctaaatcaatgcatgtctgctaacgaggctgctattactgacgccgctgttgccgttgctgctgcatcatctactcatagaaaggttgcgtctagcactacacaatatgatcacaaagaaagctgtaatggtttatattaccagggttcttgttatatattacattcagactaccagttattctcggatgctaaagcaaattgcactgcggaatcatcaacactacccaataaatccgatgtcttgactacctggctcattgattatgttgaggatacatggggatctgatggtaatccaattacaaaaactacatccgattatcaagattctgatgtatcacaagaagttagaaagtatttttgtgttaaaacaatgaactaatatttatttttgtacattaataaatgaaatcgcttaatagacaaactgtaagtaggtttaagaagttgtcggtgccggccgctataatgatgatactctcaaccattattagtggcataggaacatttctgcattacaaagaagaactgatgcctagtgcttgcgccaatggatggatacaatacgataaacattgttatttagatactaacattaaaatgtctacagataatgcggtttatcagtgtcgtaaattacgagctagattgcctagacctgatactagacatctgagagtattgtttagtattttttataaagattattgggtaagtttaaaaaagaccaatgataaatggttagatattaataatgataaagatatagatattagtaaattaacaaattttaaacaactaaacagtacgacggatgctgaagcgtgttatatatacaagtctggaaaactggttaaaacagtatgtaaaagtactcaatctgtactatgtgttaaaaaattctacaagtgacaacaaaaaatgaattaataataagtcgttaacgtacgccgccatggacgccgcgtttgttattactccaatgggtgtgttgactataacagatacattgtatgatgatctcgatatctcaatcatggactttataggaccatacattataggtaacataaaaactgtccaaatagatgtacgggatataaaatattccgacatgcaaaaatgctactttagctataagggtaaaatagttcctcaggattctaatgatttggctagattcaacatttatagcatttgtgccgcatacagatcaaaaaataccatcatcatagcatgcgactatgatatcatgttagatatagaagataaacatcagccattttatctattcccatctattgatgtttttaacgctacaatcatagaagcgtataacctgtatacagctggagattatcatctaatcatcaatccttcagataatctgaaaatgaaattgtcgtttaattcttcattctgcatatcagacggcaatggatggatcataattgatgggaaatgcaatagtaattttttatcataaaagttgtaaagtaaataataaaacaataaatattgaactagtagtacgtatattgagcaatcagaaatgatgctggtacctcttatcacggtgaccgtagttgcgggaacaatattagtatgttatatattatatatttgtaggaaaaagatacgtactgtctataatgacaataaaattatcatgacaaaattaaaaaagataaagagttctaattccagcaaatctagtaaatcaactgatagcgaatcagactgggaggatcactgtagtgctatggaacaaaacaatgacgtagataatatttctaggaatgagatattggacgatgatagcttcgctggtagtttaatatgggataacgaatccaatgttatggcgcctagcacagaacacatttacgatagtgttgctggaagcacgctgctaataaataatgatcgtaatgaacagactatttatcagaacactacagtagtaattaatgaaacggagactgttgaagtacttaatgaagataccaaacagaatcctaactattcatccaatcctttcgtaaattataataaaaccagtatttgtagcaagtcaaatccgtttattacagaacttaacaataaatttagtgagaataatccgtttagacgagcacatagcgatgattatcttaataagcaagaacaagatcatgaacacgatgatatagaatcatcggtcgtatcattggtgtgattagtttcctttttataaaattgaagtaatatttagtattattgctgccgtcacgttgtacaaatggagatattccctgtattcggcatttctaaaattagcaattttattgctaataatgactgtagatattatatagatacagaacatcaaaaaattatatctgatgagatcaatagacagatggatgaaacggtacttcttaccaacatcttaagcgtagaagttgtaaatgacaatgagatgtaccatcttattcctcatagattatcgacgattatactctgtattagttctgtcggaggatgtgttatctctatagataatgacatcaatggcaaaaatattctaacctttcccattgatcatgctgtaatcatatccccactgagtaaatgtgtcgtagttagcaagggtcctacaaccatattggttgttaaagcggatatacctagcaaacgattggtaacatcgtttacaaacgacatactatatgtaaacaatctgtcactgattaattatttgccgttgtctgtattcattattagacgagtcaccgactatttggatagacacatatgcgatcagatatttgctaataataagtggtattcccttataaccatcgacgataagcaatatcctattccatcaaactgtataggtatgtcctctgccaagtacataaattctagcatcgagcaagatactttaatccatgtttgtaacctcgagcatccgttcgactcagtatacaaaaaaatgcagtcgtacaattctctacctatcaaggaacaaatattgtacggtagaattgataatataaatatgagcattagtatttctgtggattaatagatttctagtatggggatcattaatcatctctaatctctaaatacctcataaaacgaaaaaaaagctattatcaaatactgtacggaatggattcattctcttctctttttatgaaactctgttgtatatctactgataaaactggaagcaaaaaatctgatagaaagaataagaataagatcaaggattatatggaacacgattattataaaataacaatagttcctggttcctcttccacgtctactagctcgtggtattatacacatgcctagtaatagtctctttgcgttgacggaaagcagactagaaataacaggctaaaatgttcagacaccataatagttcccaacccagataataacagagttccatcaacacattcctttaaactcaatcccaaacccaaaaccgttaaaatgtatccggccaattgatagtagataatgaggtgtacagcgcatgataatttacacagtaaccaaaatgaaaatactttagtaattataagaaatatagacggtaatgtcatcatcaacaatccgataatatgcctgagagtaaacattgacggataaaacaaaaatgctccgcataactctatcatggcaataacacaaccaaatacttgtaagattcctaaattagtagaaaatacaacgaatatcgatgtataagtgatctcgagaaataataagaataaagtaatgcccgtaaagataaacatcaacattgtttggtaatcattaaaccaattagtatgaagttgaactaatttcacagtagattttattccagtgttatcctcgcatgtataagtacctggtaagatatctttatattccataatcaatgagacatcactatctgataacgaatgaagtctagcactagtatgccatttacttaatattgtcgtcttggaagttttattataagttaaaatatcatggttatccaatttccatctaatatactttgtcggattatctatagtacacggaataatgatggtatcattacatgctgtatactctatggtctttgtagttgttataacaaccaacgtatagaggtatatcaacgatattctaactcttgacattttttatttatttaaaatgatacctttgttatttattttattctattttgctaacggtattgaatggcataagtttgaaacgagtgaagaaataatttctacttacttattagacgacgtattatacacgggtgttaatggggcggtatacacattttcaaataataaactaaacaaaactggtttaactaataataattatataacaacatctataaaagtagaggatgcggataaggatacattagtatgcggaaccaataacggaaatcccaaatgttggaaaatagacggttcagacgacccaaaacatagaggtagaggatacgctccttatcaaaatagcaaagtaacgataatcagtcacaacggatgtgtactatctgacataaacatatcaaaagaaggaattaaacgatggagaagatttgacggaccatgtggttatgatttattcacggcggataacgtaattccaaaagatggtttacgaggagcattcgtcgataaagacggtacttatgacaaagtttacattcttttcactgatactatcggctcaaagagaattgtcaaaattccgtatatagcacaaatgtgcctaaacgacgaaggtggtccatcatcattgtctagtcatagatggtcgacgtttctcaaagtcgaattagaatgtgatatcgacggaagaagttatagacaaattattcattctagaactataaaaacagataatgatacgatactatatgtattcttcgatagtccttattccaagtccgcattatgtacctattctatgaataccattaaacaatctttttctacgtcaaaattggaaggatatacaaagcaattgccgtctccagctcctggtatatgtttaccagctggaaaagttgttccacataccacgtttgaagtcatagaacaatataatgtactagatgatattataaagcctttatctaaccaacctatcttcgaaggaccgtctggtgttaaatggttcgatataaaggagaaggaaaatgaacatcgggaatatagaatatacttcataaaagaaaattctatatattcgttcgatacaaaatctaaacaaactcgtagctcgcaagtcgatgcgcgactattttcagtaatggtaactgcgaaaccgttatttatagcagatatagggataggagtaggaatgccacaaatgaaaaaaatacttaaaatgtaatcttaatcgagtacaccacacgacaatgaacaaacataagacagattatgctggttatgcttgctgcgtaatatgcggtctaattgtcggaattatttttacagcgacactattaaaagttgtagaacgtaaattagttcatacaccattaatagataaaacgataaaagatgcatatattagagaagattgtcctactgactggataagctataataataaatgtatccatttatctactgatcgaaaaacctgggaggaaggacgtaatgcatgcaaagctctaaattcaaattcggatctaattaagatagagactccaaacgagttaagttttttaagaagccttagacgaggctattgggtaggagaatccgaaatattaaaccagacaaccccatataattttatagctaagaatgccacgaagaatggaactaaaaaacggaaatatatttgtagcacaacgaatactcccaaactgcattcgtgttacactatataacaattacactacatttttatcataccactacttcggttagatgttttagaaaaaaataaatatcgccgtaccgttcttgtttttataaaaataacaattaacaattatcaaattttttctttaatattttacgtggttgaccattcttggtggtaaaataatctcttagtgttggaatggaatgctgtttaatgtttccacactcatcgtatattttgacgtatgtagtcacatcgtttacgcaatagtcagactgtagttctatcatgcttcctacatcagaaggaggaacagttttaaagtctcttggttttaatctattaccgttagttttcatgaaatcctttgttttatccacttcacattttaaataaatgtccactatacattcttttgttaattttactagatcgtcatgggtcatagaatttataggttccgtagtccatggatccaaactagcaaacttcgcgtatacggtatcgcgattagtgtatacaccaactgtatgaaaattaagaaaacagtttaataaatcaacagaaatatttaatcctccgtttgatacagatgcgccatatttatggatttcggattcacacgttgtttgtctgaggtgttcgtctagtgttgcttctacgtaaacttcgattcccatatattctttattgtcagaatcgcataccgatttatcatcatacactgtttgaaaactaaatggtatacacatcaaaataataaataataacgagtacattctgcaatattgttatcgtaattggaaaaatagtgttcgagtgagttggattatgtgagtattggattgtatattttattttatattttgtaataagaataaaatgctaatgtcaagtttattccaatagatgtcttattaaaaacatatataataaataacaatggctgaatggcataaaattatcgaggatatctcaaaaaataataagttcgaggatgccgccatcgttgattacaagactacaaagaatgttctagctgctattcctaacagaacatttgccaagattaatccgggtgaaattattcctctcatcactaatcgtaatattctaaaacctcttattggtcagaaatattgtattgtatatactaactctctaatggatgagaacacgtatgctatggagttgcttactgggtacgcccctgtatctccgatcgttatagcgagaactcataccgcacttatatttttgatgggtaagccaacaacatccagacgtgacgtgtatagaacgtgtagagatcacgctacccgtgtacgtgcaactggtaattaaaataaaaagtaatattcatatgtagtgtcaattttaaatgatgatgatgaaatggataatatccatattgacgatgtcaataatgccggtattggcatacagttcatcgatttttagatttcattcagaggatgtggaattatgttatgggcatttgtattttgataggatctataatgtagtaaatataaaatataatccgcatattccatatagatataattttattaatcgcacgttaaccgtagatgaactagacgataatgtcttttttacacatggttattttttaaaacacaaatatggttcacttaatcctagtttgattgtctcattatcaggaaacttaaaatataatgatatacaatgctcagtaaatgtatcgtgtctcattaaaaatttggcaacgagtacatctactatattaacatctaaacataagacttattctctacatcggtccacgtgtattactataataggatacgattctattatatggtataaagatataaatgacaagtataatgacatctatgattttactgcaatatgtatgctaatagcgtctacattgatagtgaccatatacgtgtttaaaaaaataaaaatgaactcttaattatgctatgctattagaaatggataaaatcaaaattacggttgattcaaaaattggtaatgttgttaccatatcgtataacttggaaaagataactattgatgtcacacctaaaaagaaaaaagaaaaggatgtattattagcgcaatcagttgctgtcgaagaggcaaaagatgtcaaggtagaagaaaaaaatattatcgatattgaagatgacgatgatatggatgtagaaagcgcgtaatacgatctataaaaataagtatataaatactttttatttactgtactcttactgtgtagtggtgataccctactcgattatttttttaaaaaaaaaatacttattctgattcttctagccatttccgtgttcgtttgaatgccacatcgacgtcaaagataggggagtagttgaaatctagttctgcattgttggtacgcacctcaaatgtagtgttggatatcttcaacgtatagttgttgagtagtgatggttttctaaatagaattctcttcatatcattcttgcacgcgtacatttttagcatccatcttggaatcctagatccttgttctattcccaatggtttcatcaatagaagattaaacatatcgtacgaacacgatggagagtaatcgtagcaaaagtaagcatttcctttaatcttagatcccggatactggatatattttgcagccaacacgtgcatccatgcagcatttcctacatatacccggctatgcaccgcgtcatcatcgactgtacgatacataatgttaccgtgttgcttacattgctcgtaaaagactttcatcaatttgtctccttctccgtaaattccagtgggtcttaggcaacaagtatacaattttgctccattcatgattacggaattattggctttcataaccagttgctcggccatacgtttactttttgcgtatacatgtcctggtgatatatcataaagggtatgctcatggccgatgaatggatcaccgtgtttattgggtcctattgcttccatgctactagtatagatcaaatacttgattcctaggtccacacaagctgccaaaatagtctgtgttccataatagtttactttcatgatttcattatcggtgtattttccaaatacatccactagagcagccgtatgaataatcagatttaccccatctagcgcttctctcaccttatcaaagtcgtttatatcacattgtatatagtttataaccttaactttcgaggttattggttgtggatcttctacaatatctatgactctgatttcttgaacatcatctgcactaattaacagttttactatatacctgcctagaaatccggcaccaccagtaaccgcgtacacggccattgctgccactcataatatcagactacttattctattttactaaataatggctgtttgtataatagaccacgataatatcagaggagttatttactttgaaccagtccatggaaaagataaagttttaggatcagttattggattaaaatccggaacgtatagtttgataattcatcgttacggagatattagtcaaggatgtgattccataggcagtccagaaatatttatcggtaacatctttgtaaacagatatggtgtagcatatgtttatttagatacagatgtaaatatatttacaattattggaaaggcgttatctatttcaaaaaatgatcagagattagcgtgtggagttattggtatttcttacataaatgaaaagataatacattttcttacaattaacgagaatggcgtttgatatatcagttaatgcgtctaaaacaataaatgcattagtttacttttctactcagcaaaataaattagtcatacgtaatgaagttaatgatacacactacactgtcgaatttgatagggacaaagtagttgacacgtttatttcatataatagacataatgacaccatagagataagaggggtgcttccagaggaaactaatattggttgcgcggttagtatgacttacttgtataataagtatagttttaaactgattttagcagaatatataagacacagaaatactatatccggcaatatttattcggcattgatgacactagatgatttggctattaaacagtatggagacattgatctattatttaatgagaaacttaaagtagactccgattcgggactatttgactttgtcaactttgtaaaggatatgatatgttgtgattctagaatagtagtagctctatctagtctagtatctaaacattgggaattgacaaataaaaaatataggtgtatggcattagccgaacatatatctgatagtattccaatatctgagctatctagactacgatacaatctatgtaagtatctacgcggacacactgagagcatagaggataaatttgattattttgaagacgatgattcgtctacatgttctgccgtaaccgacagggaaacggatgtataattttttttatagcgtgaaggatatgataaaaaatataattgttgtatttatcccattccaatcaccttatatgattctgtaacacaataaaggagtcttatagatgtatagaggtcagatactggtttgataaactgtttattccacataagtatgtttgactttatggttagacccgcatactttaacaaatcactgaaaattggagttaggtattgacctctcagaatcagttgccgttctggaacattaaatgtattttttatgatatactccaacgcatttatgtgggcatacaacaagtcattactaatggaatattccaagagttttagttgtctagtatttaacaagagaagagatttcaacagactgtttatgaactcgaatgccgcctcattgtcgcttatattgatgatgtcgaattctcccaatatcatcaccgatgagtagctcatcttgttatcgggatccaagttttctaaagatgtcattaaaccctcgatcatgaatggatttatcatcatcgtttttatgttggacatgagcttagtccgtttgtccacatctatagaagatgatttctgaattatttcatatatctctctctttaactccaggaacttgtcaggatggtctactttaatatgttctcgtctaagagatgaaaatctttggatggttgcacgcgacttttctctaaaggatgacgttgcccaagatcctctcttaaatgaatccatcttatccttggacaagatggacagtctattttccttagatggtttaatatttttgttacccatgatctataaaggtagacctaatcgtctcggatgaccatatatttattttcagttttattatacgcataaattgtaaaaaatatgttaggtttacgaaaatgtctcgtggggcattaatcgtttttgaaggattggacaaatctggaaaaacaacacaatgtatgaacatcatggaatcaataccttcaaacacaataaaataccttaactttcctcagagatccactgtcactggaaagatgatagatgactatctaactcgtaaaaaaacctataatgatcatatagttaatctattattttgtgcaaatagatgggagtttgcatcttttatacaagaacaactagaacagggaattactttaatagttgatagatacgcattttctggagtagcgtatgccgccgctaaaggcgcgtcaatgactctcagtaagagttatgaatctggattgcctaaacccgacttagttatattcttggaatctggtagcaaagaaattaatagaaacgtcggtgaggaaatttatgaagatgttacattccaacaaaaggtattacaagaatataaaaaaatgattgaagaaggagatattcattggcaaattatttcttctgaattcgaggaagatgtaaagaaggagttgattaagaatatagttatagaggctatacacacggttactggaccagtggggcaactgtggatgtaatagtgaaattacattttttataaatagatgttagtacagtgttataaatggatgaagcatattactctggcaacttggaatcagtactcggatacgtgtccgatatgcataccgaactcgcatcaatatctcaattagttattgccaagatagaaactatagataatgatatattaaacaaggacattgtaaattttatcatgtgtagatcaaacttggataatccatttatctctttcctagatactgtatatactattatagatcaagagaactatcagactgagttgattaattcattagacgacaatgaaattatcgattgtatagttaataagtttatgagcttttataaggataacctagaaaatatagtagatgctatcattactctaaaatatataatgaataatccagattttaaaactacgtatgccgaagtactcggttccagaatagccgatatagatattaaacaagtgatacgtaagaatatactacaattgtctaataatatccgcgaacgatatttgtgaaaatattaaaaaaaaatactttttttattaaatgacgtcttttcgtgaatttagaaaattatgctgtgctatatatcacgcatcaggatataaagaaaaatctaaattaattagagactttataacagatagggatgataaatatttgatcattaagctattgcttcccggattagacgatagaatttataacatgaacgataaacaaattataaaattatatagtataatatttaaacaatctcaggaagatatgctacaagatttaggatacggatatataggagacactattaggactttcttcaaagagaacacagaaatccgtccacgagataaaagcattttaactttagaagaagtggatagttttttaactacgttatcatccgtaactaaagaatcgcatcaaataaaattattgactgatgtagcatctgtttgtacatgtaatgatttaaaatgtgtagtcatgcttattgataaagatctaaaaattaaagcgggtcctcggtacgtacttaacgctattagtcctaatgcctatgatgtgtttagaaaatctaataacttgaaagagataatagaaaattcatctaaacaaaatctagactctatatctatttctgttatgactccaattaatcccatgttagcggaatcgtgtgattctgtcaataaggcgtttaaaaaatttccatcaggaatgtttgcggaagtcaaatacgatggtgaaagagtacaagttcataaaaataataacgagtttgccttctttagtagaaacatgaaaccagtactctctcataaagtggattatctcaaagaatacataccgaaagcatttaaaaaagctacgtctatcgtattggattctgaaattgttcttgtagacgaacataatgtaccgctcccgtttggaagtttaggtatacacaaaaagaaagaatataaaaactctaacatgtgtttgttcgtgtttgactgtttgtactttgatggattcgatatgacggacattccattgtacgaacgaagatcttttctcaaagatgttatggttgaaatacccaatagaatagtattctcagagttgacgaatattagtaacgagtctcagttaactgacgtattggatgatgcactaacgagaaaattagaaggattggtcttaaaagatattaatggagtatacgaaccgggaaagagaagatggttaaaaataaagcgagactatttgaacgagggttccatggcagattctgccgatttagtagtactaggtgcctactatggtaaaggagcaaagggtggtatcatggcagtctttctaatgggttgttacgacgatgaatccggtaaatggaagacggttaccaagtgttcaggacacgatgataatacgttaagggagttgcaagaccaattaaagatgattaaaattaacaaggatcccaaaaaaattccagagtggttagtagttaataaaatctatattcccgattttgtagtagaggatccgaaacaatctcagatatgggaaatttcaggagcagagtttacatcttccaagtcccataccgcaaatggaatatccattagatttcctagatttactaggataagagaggataaaacgtggaaagaatctactcatctaaacgatttagtaaacttgactaaatcttaatagttacatacaaactgaaaattaaaataacactatttagttggtggtcgccatggatggtgttattgtatactgtctaaacgcgctagtaaaacatggcgaggaaataaatcatataaaaaatgatttcatgattaaaccatgttgtgaaagagtttgtgaaaaagtcaagaacgttcacattggcggacaatctaaaaacaatacagtgattgcagatttgccatatatggataatgcggtatccgatgtatgcaattcactgtataaaaagaatgtatcaagaatatccagatttgctaatttgataaagatagatgacgatgacaagactcctactggtgtatataattattttaaacctaaagatgccattcctgttatcatatctataggaaaggataaagatgtctgtgaactattaatctcatcagacatatcgtgtgcatgcgtggagttaaattcatatcacgtagccattcttcccatggatgtttccttttttaccaaaggaaatgcatcattgattattctcctgtttgatttctctatcgatgcggcacctctcttaagaagtgtaaccgataataatgttattatatctagacaccagcgtctacatgacgagcttccgagttccaattggttcaagttttacataagtataaagtccgactattgttctatattatatatggttgttgatggatctgtgatgcatgcgatagctgataatagaactcacgcaattattagcaaaaatatattagacaatactacgattaacgatgagtgtagatgctgttattttgaaccacagattaggattcttgatagagatgagatgctcaatggatcatcgtgtgatatgaacagacattgtattatgatgaatttacctgatgtaggcgaatttggatctagtatgttggggaaatatgaacctgacatgattaagattgctctttcggtggctggtaatttaataagaaatcgagactacattcccgggagacgaggatatagctactacgtttacggtatagcctctagataatttttttaagcacgaaataaaaaacataattttaaaccaatctatttcatactattttgtgtgatcaccatggacataaagatagatattagtatttctggtgataaatttacggtgactactaggagggaaaatgaagaaagaaaaaaatatctacctctccaaaaagaaaaaactactgatgttatcaaacctgattatcttgagtacgatgacttgttagatagagatgagatgtttactattctagaggaatattttatgtacagaggtctattaggcctcagaataaaatatggacgactctttaacgaaattaaaaaattcgacaatgatgcggaagaacaattcggtactatagaagaactcaagcagaaacttagattaaattctgaagagggagcagataactttatagattatataaaggtacaaaaacaggatatcgtcaaacttactgtatacgattgcatatctatgataggattgtgtgcatgcgtggtagatgtttggagaaatgagaaactgttttctagatggaaatattgtttacgagcgattaaactgtttattgatgatcacatgcttgataagataaaatctatactgcagaatagactagtatatgtggaaatgtcatagaaagttaaaagttaatgagagcaaaaatatataaggttgtattccatatttgttatttttttctgtaatagttagaaaaatacattcgatggtctatctatcagattattatgtgttataaggtactttttctcataataaactagagtatgagtaagatagtgtttttcaaaacatataaatctaaaattgatggatgagatatacagctattaatttcgaaaatatattttaatctgataactttaaacatggatttttaatggtggtttaacgttttaaaaaaagattttgttattgtagtatatgataatattaaaagatggatataaagaatttgctgactgcatgtactattttttacattactacattggctacggcagatatacctacttcgtcactgccacacgctccggtaaacggggcatgtgacgagggagaatatcttgataagaggcataatcaatgttgtaatcagtgtccacctggagaatttgccaaggttagatgtaatggtaacgataacacaaaatgtgaacgctgcccacctcatacatataccgcaatccccaattactctaatggatgtcatcaatgtagaaaatgcccaacaggatcatttgataaggtaaagtgtaccggaacacagaacagtaaatgttcgtgtcttcctggttggtattgcgctactgattcttcacagactgaagattgtcgagattgtataccaaaaaggagatgtccatgcggatactttggtggaatagatgaacaaggaaatcctatttgtaaatcgtgttgtgttggtgaatattgcgactacctacgtaattatagacttgatccatttcctccatgcaaactatctaaatgtaattaattatgattttgatgataatgttaccatacattatatcgctacttggttagtgtattattcagtatgaagacctattaataattacttatcttttgacgatcttgttataattataatataaaaatacttatggcatagtaactcataattgctgacgcgataaattcgtaataatctgttttgttcaaatttttataaggaatctacaggcataaaaataaaaatataatttataatatactcttacagcgcgccatcatgaataacagcagtgaattgattgctgttattaatggatttagaaatagtggacgattttgtgatattaatatagttattaatgatgaaaggataaacgctcacagactcatcctatctggagcctccgaatatttttccattctgttttccaataattttatcgattctaatgaatacgaagttaatctaagtcatttagattatcaaagtgttaacgatttgatcgattacatttatgggatacctttgagcctaactaacgataacgtgaaatatattctttcaaccgctgattttttacaaattggatctgctattacggagtgtgaaaattacatacttaaaaatctttgttctagaaactgtatcgatttctacatatacgctgataaatataataacaagaaaatagaatcagcgtcgtttaacacaatattacaaaatattttgagactcatcaacgatgaaaactttaaatacttaacagaggaatcaatgataaaaattttaagcgatgatatgttaaatataaaaaatgaggatttcgccccactaattctcattaaatggttagagagtactcaacaaccatgcaccgtcgagttacttaaatgcctcagaatatcattgctttccccacaagttataaaatcactttatagtcatcgactggttagttcaatctacgaatgtataacattcttaaacaatatagcattcttggatgaatcatttcctagataccatagcatcgagttgatatctatcggtataagtaattcgcatgataagatttccataaactgctacaatcataaaaaaaatacatgggaaatgatatcttcacgtagatataggtgtagtttcgcagtggccgtcctggataatattatctatatgatgggtggatatgatcagtccccgtatagaagttcaaaggttatagcgtacaatacatgtacaaattcttggatatatgatataccagagctaaaatatcctcgttctaattgtgggggactggctgatgacgaatacatttattgtataggcggcatacgcgatcaggattcatcgttgacatctagtattgatagatggaagccatcaaaaccatattggcagaagtatgctaaaatgcgcgaaccaaaatgtgatatgggggttgcgatgttaaacggattaatatatgttataggtggaatcgttaaaggtgacacgtgtaccgacgcactagagagtttatcagaagatggatggatgaagcatcaacgtcttccaataaaaatgtccaatatgtcgacgattgttcatgatggcaagatttatatatctggaggttacaacaatagtagtgtagttaatgtaatatcgaatctagtccttagctataattcgatatatgatgaatggaccaaattatcatcattaaacattcctagaattaatcccgctctatggtcagcgcataataaattatatgtaggaggaggaatatctgatgatgttcgaactaatacatctgagacatacgacaaagaaaaagattgttggacattggataatggtcacgtgttaccacgcaattatataatgtataaatgcgaaccgattaaacataaatatccattggaaaaaacacagtacacgaatgattttctaaagtatttggaaagttttataggtagttgatagaacaaaatacataattttgtaaaaataaatcactttttatactaatatgacacgattaccaatacttttgttactaatatcattagtatacgctacaccttttcctcagacatctaaaaaaataggtgatgatgcaactctatcatgtaatcgaaataatacaaatgactacgttgttatgagtgcttggtataaggagcccaattccattattcttttagctgctaaaagcgacgtcttgtattttgataattataccaaggataaaatatcttacgactctccatacgatgatctagttacaactatcacaattaaatcattgactgctagagatgccggtacttatgtatgtgcattctttatgacatcaactacaaatgacactgataaagtagattatgaagaatactccacagagttgattgtaaatacagatagtgaatcgactatagacataatactatctggatctacacattcaccggaaactagttctgagaaacctgattatatagataattctaattgctcgtcggtattcgaaatctaagctcaaaaattgaaaaactagcgtctttttttgctcgaagtcgaccaccatggtgggtgaggatagcgtgctgatcaccgagaacatgcacatgaaactgtacatggagggcaccgtgaacgaccaccacttcaagtgcacatccgagggcgaaggcaagccctacgagggcacccagaccatgaagatcaaggtggtcgagggcggccctctccccttcgccttcgacatcctggctaccagcttcatgtacggcagcaaaacctttatcaaccacacccagggcatccccgacttctttaagcagtccttccctgagggcttcacatgggagaggatcaccacatacgaagacgggggcgtgctgaccgctacccaggacaccagcctccagaacggctgcctcatctacaacgtcaagatcaacggggtgaacttcccatccaacggccctgtgatgcagaagaaaacactcggctgggaggccagcaccgagatgctgtaccccgctgacagcggcctgagaggccatagccagatggccctgaagctcgtgggcgggggctacctgcactgctccctcaagaccacatacagatccaagaaacccgctaagaacctcaagatgcccggcttctacttcgtggacaggagactggaaagaatcaaggaggccgacaaagagacctacgtcgagcagcacgagatggctgtggccaggtactgcgacctgcctagcaaactggggcacagctgattaattaatttttatcgatctaattcaacaatgtctggagagcttcgcaggatcccgactccggaaccaattactgataaagaagatcatacagttacagacactgtctcatacactacagtaagtacatcatctggaattgtcactactaaatcaaccaccgatgatgcggatctttatgatacgtacaatgataatgatacagtaccaccaactactgtaggcggtagtacaacctctattagcaattataaaaccaaggactttgtagaaatatttggtattaccgcattaattatattgtcggccgtggcaattttctgtattacatattatatatataataaacgttcacgtaaatacaaaacagagaacaaagtctagatttttgacttacataaatgtctgggatagtaaaatctatcatattgagcggaccatctggtttaggaaagacagccatagccaaaagactatgggaatatatttggatttgtggtgtcccataccactagatttcctcgtcctatggaacgagaaggtgttgattaccattacgttaacagagaggccatctggaagggaatagccgccggaaactttctagaacatactgagtttttaggaaatatttacggaacttctaaaacagctgtgaatacagcggctattaataatcgtatttgtgtgatggatctaaacatcgacggtgttagaagtcttaaaaatacgtacctaatgccttactcggtgtatataagacctacctctcttaaaatggttgagaccaagcttcgtcgtagaaacactgaagctaacgatgagattcatcgtcgtgtgatgttggcaaaaactgacatggatgaggcaggtgaagccggtctattcgacactattatcattgaagatgatgtgaatttagcatatagtaagttaattcagatactacaggaccgtattagaatgtattttaacactaattagagacttaagacttaaaacttgataattaataatataactcgtttttatatgtgtctatttcaacgtctaatgtattagttaaatattaaaacttaccacgtaaaacttaaaatttaaaatgatatttcattgacagatagatcacacattatgaactttcaaggacttgtgttaactgacaattgcaaaaatcaatgggtcgttggaccattaataggaaaaggtggattcggtagtatttatactactaatgacaataattatgtagtaaaaatagagcccaaagctaacggatcattatttaccgaacaggcattttatactagagtacttaaaccatccgttatcgaagaatggaaaaaatctcacaatataaagcacgtaggtcttatcacgtgcaaggcatttggtctatacaaatccattaatgtggaatatcgattcttggtaattaatagattaggtgcagatctagatgcggtgatcagagccaataataatagactaccaaaaaggtcggtgatgttgatcggaatcgaaatcttaaataccatacaatttatgcacgagcaaggatattctcacggagatattaaagcgagtaatatagtcttagatcaaatagataagaataaattatatctagtggattacggattggtttctaaattcatgtctaatggcgaacatgttccatttataagaaatccaaataaaatggataacggtactctagaatttacacctatagattcgcataaaggatacgttgtatctagacgtggagatctagaaacacttggatattgtatgattagatggttgggaggtatcttaccatggactaagatatctgaaacaaagaattgtgcattagtaagtgccacaaaacagaaatatgttaacaatactgcgactttgttaatgaccagtttgcaatatgcacctagagaattgctgcaatatattaccatggtaaactctttgacatattttgaggaacccaattacgacaagtttcggcacatattaatgcagggtgtatattattaagtgtggtgtttggtcgataaaaattaaaaaataacttaatttattattgatctcgtgtgtacaaccgaaatcatggcgatgttttacgcacacgctctcggtgggtacgacgagaatcttcatgcctttcctggaatatcatcgactgttgccaatgatgtcaggaaatattctgttgtgtcagtttataataacaagtatgacattgtaaaagacaaatatatgtggtgttacagtcaggtgaacaagagatatattggagcactgctgcctatgtttgagtgcaatgaatatctacaaattggaaatccgatccatgatcaagaaggaaatcaaatctctatcatcacatatcgccacaaaaactactatgctctaagcggaatcgggtacgagagtctagacttgtgtttggaaggagtagggattcatcatcacgtacttgaaacaggaaacgctgtatatggaaaagttcaacatgattattctactatcaaagagaaggccaaagaaatgagtgcacttagtccaggacctatcatcgattaccacgtctggataggagattgtatctgtcaagttactgctgtggacgtacatggaaaggaaattatgaaaatgagattcaaaaagggtgcggtgcttccgatcccaaatctggtaaaagttaaacttggggagaatgatacagaaaatctttcttctactatatcggcggcaccatcgaggtaaccacctctctggaagacagcgtgaatcatgtactcatgaaacgtttggaaactatacgccatatgtggtctgttgtatatgatcattttgatattgtgaatggtaaagaatgctgttatgtgcatacgcattcatctaatcaaaatcctataccgagtactgtaaaaacaaatttgtacatgaagactatgggatcatgcattcaaatggattccatggaagctctagagtatcttagcgaactgaaggaatcaggtggatggagtcccagaccagaaatgcaggaatttgaatatccagatggagtggaagacactgaatcaattgagagattggcagaggagttcttcaatagatcagaacttcaggctggtgaatcagtcaaatttggtaattctattaattgttaaacatacatctgtttcagctaagcaactaagaacacgtatacggcagcagcttccttctatactctcatcttttaccaacacaaagggtggatatttgttcattggagttgataataatacacacaaagtatttggattcacggtgggttacgactacctcagactgatagagaatgatatagaaaagcatatcaaaagacttcgtgttgtgcatttctgtgagaagaaagaggacatcaagtacgcgtgtcgattcatcaaggtatataaacctggggatgagactacctcgacatacgtgtgcgctatcaaagtggaaagatgctgttgtgctgtgtttgcagattggccagaatcatggtatatggatactaatggtatcaagaagtattctccagatgaatgggtgtcacatataaaattttaattaatgtaactatagagaacaaataataaggttgtaatatcatatagacaataactaacaattaattagtaactgttatctcttttttaactaaccaactaactatatacctattaatacatcgtaattatagttcttaacatctattaatcattaattcgcttctttaattttttataaactaacattgttaattgaaaagggataacatgttacagaatataaattatatatggatttttttaaaaaggaaatacttgactggagtatatatttatctcttcattatatagcacgcgtgttttccaatttttccacatcccatataatacaggattataatctcgttcgaacatacgagaaagtggataaaacaatagttgattttttatctaggttgccaaatttattccatattttagaatatggggaaaatattctacatatttattctatggatgatgctaatacgaatattataattttttttctagatagagtattaaatattaataagaacgggtcatttatacacaatctcgggttatcatcatccattaatataaaagaatatgtatatcaattagttaataatgatcatccagataataggataagactaatgcttgaaaatggacgtagaacaagacattttttgtcctatatatcagatacagttaatatctatatatgtattttaataaatcatggattttatatagatgccgaagacagttacggttgtacattattacatagatgtatatatcactataagaaatcagaatcagaatcatacaatgaattaattaagatattgttaaataatggatcagatgtagataaaaaagatacgtacggaaacacaccttttatcctattatgtaaacacgatatcaacaacgtggaattgtttgagatatgtttagagaatgctaatatagactctgtagactttaatagatatacacctcttcattatgtctcatgtcgtaataaatatgattttgtaaagttattaatttctaaaggagcaaatgttaatgcgcgtaataaattcggaactactccattttattgtggaattatacacggtatctcgcttataaaactatatttggaatcagacacagagttagaaatagataatgaacatatagttcgtcatttaataatttttgatgctgttgaatctttagattatctattatccagaggagttattgatattaactatcgtactatatacaacgaaacatctatttacgacgctgtcagttataatgcgtataatacgttggtctatctattaaacaaaaatggtgattttgagacgattactactagtggatgtacatgtatttcggaagcagtcgcaaacaacaacaaaataataatggaagtactattgtctaaacgaccatctttgaaaattatgatacagtctatgatagcaattactaaacataaacagcataatgcagatttattgaaaatgtgtataaaatatactgcgtgtatgaccgattatgatactcttatagatgtacagtcgctacagcaatataaatggtatattttaagatgtttcgatgaaatagatatcatgaagagatgttatataaaaaataaaactgtattccaattagttttttgtatcaaagacattaatactttaatgagatacggtaaacatccttctttcgtgaaatgcactagtctcgacgtatacggaagtcgtgtacgtaatatcatagcatctattagatatcgtcagagattaattagtctattatccaagaagctggatcctggagataaatggtcgtgttttcctaacgaaataaaatataaaatattggaaaactttaacgataacgaactatccacatatctaaaaatcttataaacattattaaaatataaaatctaagtaggataaaatcacactacatcattgtttccttttagtgctcgacagtgtatactatttttaacgctcataaataaaaatgaaaacgatttccgttgttacgttgttatgcgtactacctgctgttgtttattcaacatgtactgtacccactatgaataacgctaaattaacgtctaccgaaacatcgtttaatgataaccagaaagttacgtttacatgtgatcagggatatcattctttggatccaaatgctgtctgtgaaacagataaatggaaatacgaaaatccatgcaaaaaaatgtgcacagtttctgattatgtctctgaactatataataaaccgctatacgaagtgaattccaccatgacactaagttgcaacggcgaaacaaaatattttcgttgcgaagaaaaaaatggaaatacttcttggaatgatactgttacgtgtcctaatgcggaatgtcaacctcttcaattagaacacggatcgtgtcaaccagttaaagaaaaatactcatttggggaatatatgactatcaactgtgatgttggatatgaggttattggtgcttcgtacataagttgtacagctaattcttggaatgttattccatcatgtcaacaaaaatgtgatatgccgtctctatctaacggattaatttccggatctacattttctatcggtggcgttatacatcttagttgtaaaagtggttttacactaacggggtctccatcatccacatgtatcgacggtaaatggaatcccatactcccaatatgtgtacgaactaacgaaaaatttgatccagtggatgatggtcccgacgatgagacagatttgagcaaactctcgaaagacgttgtacaatatgaacaagaaatagaatcgttagaagcaacttatcatataatcatagtggcgttgacaattatgggcgtcatatttttaatctccgttatagtattagtttgttcctgtgacaaaaataatgaccaatataagttccataaattgctaccgtaaatataaatccgttaaaataattaataatttaataacaaacaagtatcaaaagattaaagacttatagctagaatcaattgagatgtcttcttcagtggatgttgatatctacgatgccgttagagcatttttactcaggcactattataacaagagatttattgtgtatggaagaagtaacgccatattacataatatatacaggctatttacaagatgcgccgttataccgttcgatgatatagtacgtactatgccaaatgaatcacgtgttaaacaatgggtgatggatacacttaatggtataatgatgaatgaacgcgatgtttctgtaagcgttggcaccggaatactattcatggaaatgtttttcgattacaataaaaatagtatcaacaatcaactaatgtatgatataattaatagcgtatctataattctagctaatgagagatatagaagcgcttttaacgacgatggtatatacatccgtagaaatatgattaacaagttgtacggatacgcatctctaactactattggcacgatcgctggaggtgtttgttattatctgttgatgcatctagttagtttgtataaataattatttcaatatactagttaaaattttaagattttaaatgtataaaaaactaataacgtttttatttgtaataggtgcattagcatcctattcgaataatgagtacactccgtttaataaactgagtgtaaaactctatatagatggagtagataatatagaaaattcatatactgatgataataatgaattggtgttaaattttaaagagtacacaatttctattattacagagtcatgcgacgtcggatttgattccatagatatagatgttataaacgactataaaattattgatatgtataccattgactcgtctactattcaacgcagaggtcacacgtgtagaatatctaccaaattatcatgccattatgataagtacccttatattcacaaatatgatggtgatgagcgacaatattctattactgcagagggaaaatgctataaaggaataaaatatgaaataagtatgatcaacgatgatactctattgagaaaacatactcttaaaattggatctacttatatatttgatcgtcatggacatagtaatacatattattcaaaatatgatttttaaaaatttaaaatatattatcacttcagtgacagtagtcaaataacaaacaacaccatgagatatattataattctcgcagttttgttcattaatagtatacatgctaaaataactagttataagtttgaatccgtcaattttgattccaaaattgaatggactggggatggtctatacaatatatcccttaaaaattatggcatcaagacgtggcaaacaatgtatacaaatgtaccagaaggaacatacgacatatccgcatttccaaagaatgatttcgtatctttctgggttaaatttgaacaaggcgattataaagtggaagagtattgtacgggactatgcgtcgaagtaaaaattggaccaccgactgtaacattgactgaatacgacgaccatatcaatttgtacatcgagcatccgtatgctactagaggtagcaaaaagattcctatttacaaacgcggtgacatgtgtgatatctacttgttgtatacggctaacttcacattcggagattctaaagaaccagtaccatatgatatcgatgactacgattgcacgtctacaggttgcagcatagactttgtcacaacagaaaaagtgtgcgtgacagcacagggagccacagaagggtttctcgaaaaaattactccatggagttcgaaagtatgtctgacacctaaaaagagtgtatatacatgcgcaattagatccaaagaagatgttcccaatttcaaggacaaaatggccagagttatcaagagaaaatttaatacacagtctcaatcttatttaactaaatttctcggtagcacatcaaatgatgttaccacttttcttagcatgcttaacttgactaaatattcataactaatttttattaatgatacaaaaacgaaataaaactgcatattatacactggttaacgcccttataggctctaaccattttcaagatgaggtccctgattatagtccttctgttcccctctatcatctactccatgtctattagacgatgtgagaagactgaagaggaaacatggggattgaaaatagggttgtgtataattgccaaagatttctatcccgaaagaactgattgcagtgttcatctcccaactgcaagtgaaggattgataactgaaggcaatggattcagggatatacgaaacaccgataaattataaaaaaagcaatgtgtccgctgtttccgttaataatactattttcgtaactggcggattattcataaataactctaatagcacgatcgtggttaacaatatggaaaaacttgacatttataaagacaaacaatggtcgattatagaaatgcctatggctagggtatatcacggcattgactcgacatttggaatgttatattttgccggaggtctatccgttaccgaacaatatggtaatttagagaaaaacaacgagatatcttgttacaatcctagaacgaataagtggtttgatatttcatatactatttataagatatccatatcatcattgtgtaaactaaataacgtcttctatgtatttagtaaggacattggatatgtggaaaagtatgatggtgcatggaagttagtacatgatcgtctccccgctataaaggcattatcaacttctccttattgattgaaaatgaaaatataaatagtttttatgtatagcagtattaccctatagttttattgcttactactaacatggatacagatgttacaaatgtagaagatatcataaatgaaatagatagagagaaagaagaaatactaaaaaatgtagaaattgaaaataataaaaacattaacaagaatcatcccaatgaatatattagagaagcactcgttattaataccagtagtaatagtgattccattgataaagaagttatagaatgtatcagtcacgatgtaggaatatagatcatatctactaatttttataatcgatacaaaacataaaaaacaactcgttattacatagcaggcatggaatccttcaagtattgttttgataacgatggcaagaaatggattatcggaaatactttatattctggtaattcaatactctataaggtcagaaaaaatttcactagttcgttctacaattacgtaatgaagatagatcacaaatcacacaagccattgttgtctgaaatacgattctatatatctgtattggatcctttgactatcgacaactggacacgggaacgtggtataaagtatttggctattccagatctgtatggaattggagaaaccgatgattatatgttcttcgttataaagaattcgggaagagtattcgccccaaaggatactgaatcagtcttcgaagcatgcgtcactatgataaacacgttagagtttatacactctcgaggatttacccatggaaaaatagaaccgaggaatatactgattagaaataaacgtctttcactaattgactattctagaactaacaaactatacaagagtggaaactcacatatagattacaacgaggacatgataacttcaggaaatatcaattatatgtgtgtagacaatcatcttggagcaacagtttcaagacgaggagatttagaaatgttgggatattgcatgatagaatggttcggtggcaaacttccatggaaaaacgaaagtagtataaaagtaataaaacaaaaaaaagaatataaaaaatttatagctactttctttgaggactgttttcctgaaggaaatgaacctctggaattagttagatatatagaattagtatacacgttagattattctcaaactcctaattatgacagactacgtaaactgtttatacaagattgaaattatattcttttttttatagagtgtggtagtgttacggatatctaatattaatattagactatctctatcgcgctacacgaccaatatcgattactatggatatcttctatgaaaggagagaatgtatttatttctccagcgtcaatctcgtcagtattgacaatactgtattatggagctaatggatccactgctgaacagctatcaaaatatgtagaaacggaggagaacacggataaggttagcgctcagaatatctcattcaaatccatgaataaagtatatgggcgatattctgccgtgtttaaagattcctttttgagaaaaattggcgataagtttcaaactgttgacttcactgattgtcgcactatagatgcaatcaacaagtgtgtagatatctttactgaggggaaaatcaatccactattggatgaaccattgtctcctagcaattagtgccgtatactttaaagcaaaatggttgacgccattcgaaaaggaatttaccagtgattatcccttttacgtatctccgacggaaatggtagacgtaagtatgatgtctatgtacggcaaggcatttaatcacgcatctgtaaaagaatcattcggcaacttttcaatcatagaactgccatatgttggagatactagtatgatggtcattcttccagacaagattgatggattagaatccatagaacaaaatctaacagatacaaattttaagaaatggtgtgactttatggatgctatgtttatagatgttcacattcccaagtttaaggtaacaggctcgtataatctggtggatactctagtaaagtcaggactgacagaggtgttcggttcaactggagattatagcaatatgtgtaatttagatgtgagtgtcgacgctatgatccacaaaacgtatatagatgtcaatgaagagtatacagaagcagctgcagcaacttctgtactagtggcagactgtgcatcaacaattacaaatgagttctgtgcagatcatccgttcatctatgtgattaggcatgttgatggaaaaattcttttcgttggtagatattgctctccgacaactaattgttaaccattttttttaaaaaaaatagaaaaaacatgtggtattagtgcaggtcgttgttcttccaattgcaattggtaagatgacggccaactttagtacccacgtcttttcaccacagcactgtggatgtgacagactgaccagtattgatgacgtcaaacaatgtttgactgaatatatttattggtcgtcctatgcataccgcaacaggcaatgcgctggacaattgtattccacactcctctcttttagagatgatgcggaattagtgttcatcgacattcgcgagctggtaaaaaatatgccgtgggatgatgtcaaagattgtacagaaatcatccgttgttatataccggatgagcaaaaaaccatcagagagatttcggccatcatcggactttgtgcatatgctgctacttactggggaggtgaagaccatcccactagtaacagtctgaacgcattgtttgtgatgcttgagatgctaaattacgtggattataacatcatattccggcgtatgaattgatgagttgtacatcttgacattttctttcttctcttctccctttcttctcttctcccttcctccctcttctccctttcccagaaacaaacttttttacccactataaaataaaatgagtatactacctattatatttcttcctatatttttttattcttcattcgttcagacttttaacgcgtctgaatgtatcgacaaagggcaatattttgcatcattcatggagttagaaaacgagccagtaatcttaccatgtcctcaaataaatacgctatcatccggatataatatattagatattttatgggaaaaacgaggagcggataatgatagaattataccgatagataatggtagcaatatgctaattctgaacccgacacaatcagactctggtatttatatatgcattaccacgaacgaaacctactgtgacatgatgtcgttaaatttgacaatcgtgtctgtctcagaatcaaatatagatcttatctcgtatccacaaatagtaaatgagagatctactggcgaaatggtatgtcccaatattaatgcatttattgctagtaacgtaaacgcagatattatatggagcggacatcgacgccttagaaataagagacttaaacaacggacacctggaattattaccatagaagatgttagaaaaaatgatgctggttattatacatgtgttttagaatatatatacggtggcaaaacatataacgtaaccagaattgtaaaattagaggtacgggatagaataataccttctactatgcaattaccagatggcattgtaacttcaataggtagtaatttgactattgcatgcagagtatcgttgagacctcccacaacggacaccgacgtcttttggataagtaatggtatgtattacgaagaagatgatggggacggaaacggtagaataagtgtagcaaataaaatctatatgaccgataagagacgtgttattacatcccggttaaacattaatcctgtcaaggaagaagatgctacaacgtttacgtgtatggcgtttactattcctagcatcagcaaaacagttactgttagtataacgtgaatgtatgttgttacatttccatgtcaattgagtttataagaatttttatacattatcttccaacaaacaattgacgaacgtattgctatgattaactcccacgatactatgcatattattaatcattaacttgcagactatacctagtgctattttgacatactcgtgttcttgtgtaattgcggtatctatattattaaagtacgtaaatctagctatagttttattatttaattttagataatataccgtctccttatttttaaaaattgccacatcctttattaaatcatgaatgggaatttctatgtcatcgttagtatattgtgaacaacaagagcagatatctataggaaagggtggaatgcgatacattgatctatgtagttttaaaacacacgcgaactttgaagaatttatataaatcattccatcgatacatccttctatgttgacatgtatatatccaggaattcttttattaatgtcaggaaatgtataaactaaaacattgcccgaaagcggtgcctctatctgcgttatatccgttcttaacttacaaaatgtaaccaatacctttgcatgacttgttttgttcggcaacgttagtttaaacttgacgaatggattaattacaatagcatgatccgcgcatctattaagtttttttactttaacgcccttgtatgtttttacagagactttatctaaatttctagtgcttgtatgtgttataaatataacgggatatagaaccgaatcacctaccttagatacccaattacattttatcagatccagataataaacaaattttgtcgccctaactaattctatattgttatatattttacaattggttatgatatcatgtaataacttggagtctaacgcgcatcgtcgtacgtttatacaattgtgatttagtgtagtatatctacacatgtatttttccgcactatagtattctggactagtgataaaactatcgttatatctgtcttcaatgaactcatcgagatattgctctctgtcatattcatacacctgcataaactttctagacatcttacaatccgtgttattttaggatcatatttacatatttacgggtatatcaaagatgttagattagttaatgggaatcgtctataataatgaatattaaacaattatatgaggacttttaccacaaagcatcataaaaatgagtcgtcgtctgatttatgttttaaatatcaaccgcaaatcaactcataaaatacaagagaatgaaatatatacatattttagtcattgcaatatagaccatacttctacagaacttgattttgtagttaaaaactatgatctaaacagacgacaacctgtaactgggtatactgcactacactgctatttgtataataattactttacaaacgatgtactgaagatattattaaatcatgacgtaaatgtaacgatgaaaaccagtagcggacgtatgcctgtttatatattgcttactagatgttgtaatatttcacatgatgtagtgatagatatgatagacaaagataaaaaccacttattacatagagactattccaacctattactagagtatataaaatctcgttacatgttattgaaggaagaggatatcgatgagaacatagtatccactttattagataagggaatcgatcctaactttaaacaagacggatatacagcgttacattattattatttgtgtctcgcacacgtttataaactaggtgagtgtagaaaaccgataacgataaaaaaggccaagcgaattatttctttgtttatacaacatggagctaatctaaacgcgttagataattgtggtaatacaccattccatttgtatcttagtattgaaatgtgtaataatattcatatgactaaaatgctgttgacttttaatccgaatttcaaaatatgtaataatcatggattaacgcctatactatgttatataacttccgactacatacaacacgatattcttgttatgttaatacatcactatgaaacaaatgttggagaaatgccgatagatgagcgtcgtatgatcgtattcgagtttatcaaaacatattctacacgtccggcagattcgataacttatttgatgaataggtttaaaaatataaatatttatacccgctatgaaggaaagacattattacacgtagcatgtgaatataataatacacaagtaatagattatcttatacgtatcaacggagatataaatgcgttaaccgacaataacaaacacgctacacaactcattatagataacaaagaaaattccccatataccattaattgtttactgtatatacttagatatattgtagataagaatgtgataagatcgttggtggatcaacttccatctctacctatcttcgatataaaatcatttgagaaattcatatcctactgtatacttttagatgacacattttacgataggcacgttaagaatcgcgattctaaaacgtatcgatacgcattttcaaaatacatgtcgtttgataaatacgatggtataataactaaatgtcacgacgaaacaatgttactcaaactgtccactgttctagacactacactatatgcagttttaagatgtcataattcgagaaagttaagaagatacctcaacgagttaaaaaaatataataacgataagtcctttaaaatatattctaatattatgaatgagagataccttaatgtatattataaagatatgtacgtgtcaaaggtatatgataaactatttcctgttttcacagataaaaattgtctactaacattactaccttcagaaattatatacgaaatattatacatgctgacaattaacgatctttataatatatcgtatccacctaccaaagtatagttgtatttttctcatgcgatgtgtgtaaaaaaactgatattatataaatattttagtgccgtataataaagatgacgatgaaaatgatggtacatatatatttcgtatcattattgttattgctattccacagttacgccatagacatcgaaaatgaaatcacagaattcttcaataaaatgagagatactctaccagctaaagactctaaatggttgaatccagcatgtatgttcggaggcacaatgaatgatatagccgctctaggagagccattcagcgcaaagtgtcctcctattgaagacagtcttttatcgcacagatataaagactatgtggttaaatgggagaggctagaaaagaatagacggcgacaggtttctaataaacgtgttaaacatggtgatttatggatagccaactatacatctaaattcagtaaccgtaggtatttgtgcaccgtaactacaaagaatggtgactgtgttcagggtatagttagatctcatattaaaaaacctccttcatgcattccaaaaacatatgaactaggtactcatgataagtatggcatagacttatactgtggaattctttacgcaaaacattataataatataacttggtataaagataataaggaaattaatatcgacgacattaagtattcacaaacgggaaaggaattaattattcataatccagagttagaagatagcggaagatacgactgttacgttcattacgacgacgttagaatcaagaatgatatcgtagtatcaagatgtaaaatacttacggttataccgtcacaagaccacaggtttaaactaatactagatccgaaaatcaacgtaacgataggagaacctgccaatataacatgcactgctgtgtcaacgtcattattgatcgacgatgtactgattgaatgggaaaatccatccggatggcttataggattcgattttgatgtatactctgttttaactagtagaggcggtatcaccgaggcgaccttgtactttgaaaatgttactgaagaatatataggtaatacatataaatgtcgtggacacaactattattttgaaaaaacccttacaactacagtagtattggagtaaatatacaatgcatttttatatacattactgaattattattactgaattattattactgaattattattaattatatcgtatttgtgctatagaatggatgaagatacgcgactatctaggtatttgtatctcaccgatagagaacatataaatgtagactctattaaacagttgtgtaaaatatcagatcctaatgcatgttatagatgtggatgtacggctttacatgagtacttttataattatagatcagtcaacggaaaatacaagtatagatacaacggttactatcaatattattcatctagcgattatgaaaattataatgaatattattatgatagaactggtatgaacagtgagagtgataatatatcaatcaaaacagaatatgaattctatgatgaaacacaagatcaaagtacacaactagtaggttacgacattaaactcaaaaccaatgaggatgattttatggctatgatagatcagtgggtgtccatgattatatagatgaatcaattaataaagtagtatatggaagagagtctcacgtaagatggcgggatatatggcaagaacataatgatggcgtatacagtataggaaaggagtgcatagataatatatacgaagacaaccataccgtagacgaattctacaagatagacagcgtatcagatgtagatgacgcggaacacatatctccgataactaaaaaaccatagaatcagttgatgataatacctacatttctaatcttccgtataccatcaaatacaaaatattcgagcaacaataagtattttttatacctttaaaactgataaataaattttttctagtgatattttggcaagatgagaatcctatttctcatcgctttcatgtatgggtgtgttcactcatatgttaacgcggttgaaaccaaatgtccaaatctagacattgtaacatcttctggagaatttcattgttcaggatgtgtggaacatatgcctgagtttagctatatgtattggttggcaaaggatatgaaatcggacgaggataccaagtttatagaacatctgggtgatggcatcaaagaagatgaaaccgttcgtaccacagatagtggaatcgtcactctacgtaaagtccttcatgtgactgatactaataaatttgataattataggttcacttgtgtcctcgctacgctagatggcatttataaaaagaatgtttgctgaagtagttgtgtgctactatttttatttatgatataatctaatggaattaatttgaattgatatttatccaatactaaagattatattagaatcaaattaatcttttatacgagaaaaaataacgacatacgtcgtcaacaaattaaactttttatttattagttaactagcttatagaacttgctcattgttatgtttctaaaacgggtacggcatataggacaattatccgacgcaccggtttctcttcgtgttctatgccatatattgatgcatgttatgcaaaatatatgagtacacgaatccaataaaccaaagtatctatcgttttgagtaaacaacttcatagcaaattccacattctttttctttacttactctatacacgtcctcgtatttatttagtattttgatgatatccaactcagaaatggttgttgtattattgggtgtatttggagtataggtattattagctatgtaccaatttaccaaccctcttaatattgattgataatcacatcggttatccaattaataactaaattgtagtgtatatatagaccatatatgtttctatttttttgacagttacgtatagtttcagtaagttttgattgttgtattcctgtatctctagataagttagtcatatagtcccttccggcgatacgttttttccaagcccgaaattgattagccaaatgtgtatttatttttgtgatattgatataatatttcggataatgcatactgttagtcttatatcatttggttcatctatgtattgtaatattgttacatgatctatagatgatgtattgattttggcaggatcgaattccatatccgcgactaaacagtgaaaaaaatgtaaatactttttaaattttaaattagtaaaacttttttttattttttatgattccaaaaatactgaatacaaagtcctaaattataaatatggagatcatactaccacaacttattattatgtatacaaggccggtgtaatagatagatatatataattctattacaccggcagacaattaccgaccggtatttgtcgttaccaacataccgtataatatgtaatatacaattccataacccattgacagttgttatacatcaaaattgcaattcttttgattacgatgttataagaatgtagttaattgatgtatgatgttaatgtgtcctctttcctcttataacatcgtaatcaaaaacttttttataatatatacctaataatgtgtcttaatagttctcgtgattcgtcaaacaatcattcttataaaatataataaagcaacgtaaaaacacataaaaataagcgtaactaataagacaatggatatttacgacgataaaggtctacagactattaaactgtttaataatgaatttgattgtataaggaatgacatcagagaattatttaaacatgtaactgattccgatagtatacaacttccgatggaagacaattctgatattatagaaaatatcagaaaaatactatatagacgattaaaaaatgtagaatgtgttgacatcgataacacaataacttttatgaaatacgatccaaatgatgataataagcgtacgtgttctaattgggtacccttaactaataactatatggaatattgtctagtaatatatttggaaacaccgatatgtggaggcaaaataaaattataccaccctacaggaaatataaagtcggataaggatattatgtttgcaaagactctagactttaaatcaacgaaagtgttaactggacgtaaaacaattgccgttctagacatatccgtttcatataatagatcaatgactactattcactacaacgacgacgttgatatagatatacatactgataaaaatggaaaagagttatgttattgttatataacaatagatgatcattacttggttgatgtggaaactataggagttatagtcaatagatctggaaaatgtctgttagtaaataaccatctaggtataggtatcgttaaagataaacgtataagcgatagttttggagatgtatgtatggatacaatatttgacttttctgaagcacgagagttattttcattaactaatgatgataacaggaatatagcatgggacactgataaactagacgatgatacagatatatggactcccgtcacagaagatgattacaaatttctttctagactagtattgtatgcaaaatctcaatcggatactgtatttgactattatgttcttactggtgatacggaaccacccactgtattcattttcaaggtaactagattttactttaatatgccgaaataaaaaatttttgtataatatctagaggtagaggtattgtttagataaatacaaataacatagatacatcgcatacttagcatttttataaatatacataagacatacactttatacatttttgtaaaaatactcataaaaaaatttataaaaattatggcacaaccatatcttgtataggtagtttagttcgtcgagtgaacctataaacagataatagacaacacataataatgcctactaatacaagcataataccgggagatgggatatatgacgttgtagtgtttgggttttctgaacgttgatagtctactaatactacatgctgacatctaatgcctgtataaccatgagagcatctacaatacataccgtcaatatctctagcgtggatacagtcaccgtgtaaacaatatccatctccctctggaccgcataatctgatagctggaatatctgttgtagcgtttgtaatttctggcaatgtcgtttcgatagcgttaccactatcggcgaatgatctgattatcatagcagcgaacaacaacatcagataatttatcaacatttttgatggattctgtgtttatgctgtttctcagtgtgtgtttatgacaagattgggaattttatattattaattcagtaatataaactaataatatattgttaattgtgtaaataatataaaaataacaatacaatattgaatgtgttgctgttaaaaatgtatgtgttaatataatagaataaaataaatgagtatgatcattttagataacgattgattttatcattaccgcttcattcttatattctttgcttacggaacctatatttagaaacatctactaacaattttttatgcttgcattattaatggtatgtaatatgattgattgtgtacgcaataccaatttgttaagtatgaatacggggtacaaacataaattgaaatttaacattatttatttatgatatatatcgttatcgttaggtctataccatggatatctttaaagaactaatcttaaaacaccctgatgaaaatgttttgatttctccagtttccattttatctactttatctattctaaatcatggagcagctggttctacagctgaacaactatcaaaatatatagagaatatgaatgagaatacacccgatgacaataatgatgacatggaggtagatattccgtattgtgcgacactagctaccgcaaataaaatatacggtagcgatagtatcgagttccacgcctccttcctacaaaaaataaaagacgattttcaaactgtaaactttaataatgctaaccaaacaaaggaactaatcaacgaatgggttaagacaatgacaaatggtaaaattaattccttattgactagtccgctatccattaatactcgtatgacagttgttagcgccgtccattttaaagcaatgtggaaatatccattttctaaacatcttacatatacagacaagttttatatttctaagaatatagttaccagcgttgatatgatggtgggtaccgagaataacttgcaatatgtacatattaatgaattattcggaggattctctattatcgatattccatacgagggaaactctagtatggtaattatactaccggacgacatagaaggtatatataacatagaaaaaaatataacagatgaaaaatttaaaaaatggtgtggtatgttatctactaaaagtatagacttgtatatgccaaagtttaaagtggaaatgacagaaccgtataatctggtaccgattttagaaaatttaggacttactaatatattcggatattatgcagattttagcaagatgtgtaatgaaactatcactgtagaaaaatttctacatacgacgtttatagatgttaatgaggagtatacagaagcatcggccgttacaggagtatttacgattaacttttcgatggtatatcgtacgaaggtctacataaaccatccattcatgtacatgattaaagacaccacaggacgtatactttttatagggaaatactgctatccgcaataaatataaacaaatagacttttataaagagtcttcaacgataagtatatcgacatactacttatgctgcgaaagattctgaacgagaacgactatctcaccctcttggatcatatccgcactgctaaatactaaatctccactacactttttatcatcttatgaggaatgattgccttcgtgaaataggaataattagcaccagaatagctatggattattgtggtagagagtgcactattctatgtcgtctactggatgaagatgtgacgtacaaaaaaataaaactagaaattgaaacgtgtcacaacttatcaaaacatatagatagacgaggaaacaatgcgctacattgttacgtctccaataaatgcgatacagacattaagattgttctctcgcggagtcgagagactttgtagaaacaacgaaggattaactccgctaggagtatacagtaagcatagatacgtaaaatctcagattgtgcatctactgatatccagctattcaaattcctctaacgaactcaagtcgaatataaatgatttcgatctgtattcggataatatcgacttacgtctgctaaaatacctaattgtggataaacggatacgtccgtccaagaatacgaattatgcaatcaatggtctcggattggtggatatatacgtaacgacgcctaatccgagaccagaagtattgctatggcttcttaaatcagaatgttacagcaccggttacgtatttcgtacctgtatgtacgacagtgatatgtgtaagaactctcttcattactatatatcgtctcatagagaatctcaatctctatccaaggatgtaattaaatgtttgatcgataacaatgtttccatccatggcagagacgaaggaggatctttacccatccaatactactggtctttctcaaccatagatatagagattgttaaattattattaataaaggatgtggacacgtgtagagtatacgacgtcagccctatattagaggcgtattatctaaacaagcgatttagagtaaccccatataatgtagacatggaaatcgttaatcttcttattgagagacgtcatactcttgtcgacgtaatgcgtagtattacttcgtacgattccagagaatataaccactacatcatcgataacattctaaagagatttagacaacaggatgaatccatcgtacaagccatactgataaactacttacattacggcgatatggtcgttcgatgcatgttagataacggacaacaactatcctctacacgactactttgttaataataatctcgtcgatgtaaacgtcgtaaggtttatcgtggaaaatatggacacgcggctgtaaatcacgtatcgaacaatggccgtctatgtatgtacggtctgatattatcgagatttaataattgcgggtatcactgttatgaaaccatactgatagatgtatttgatatactaagcaagtacatggatgatatagatatgatcgataactctactatattacgcggtcgatgtcaataatatacaatttgcaaagcggttattggaatatggagcgagtatcacgctcgataatcaatacggccatccagaaaagcagttacagaagagaaaacaaaacgaaatcgttgttctacaagatgtctctccctacgacgattactacgtaaaaaagatactagcctactgcctattaagggacgagtcattcgcggaactacatagtaaattctgtttaaacgaggactataaaagtgtatttatgaaaaatatatcattcgataagatagattccatcatcgtgacataagtcgcctcaaagagattcgaatctccgacaccgacctgtatacggtatcacagctatcttaaagccatacattcagacagtcacatttcatttcccatgtacgacgatctcatagaacagtgccatctatcgatggagcgtaaaagtaaactcgtcgacaaagcactcaataaattagagtctaccatcggtcaatctagactatcgtatttgcctccggaaattatgcgcaatatcatctaaacagtatgttgtacggaaagaaccattacaaatattatccatgatagaaagaaaatatctatatgattggagaagtaggaaacaggaacaagacaacgattactacattattaaatcatgaagtccgtattatactcgtatatattgtttctctcatgtataataataaacggaagagatatagcaccgcatgcaccatccgatggaaagtgtaaagacaacgaatacaaacgccataatttgtgtccgggaacatacgcttccagattatgcgatagcaagactaacacacgatgtacgccgtgtggttcgggtaccttcacatctcgcaataatcatttacccgcttgtctaagttgtaacggaagacgcgatcgtgtaacacgactcacaatagaatctgtgaatgctctcccggatattattgtcttctcaaaggatcatccggatgcaaggcatgtgtttcccaaacaaaatgtggaataggatacggagtatccggagacgtcatctgttctccgtgtggtctcggaacatattctcacaccgtctcttccgcagataaatgcgaacccgtacccagaaatacgtttaactatatcgatgtggaaattaacctgtatccagttaacgacacgtcgtgtactcggacgaccactaccggtctcagcgaatccatctcaacgtcggaactaactattactatgaatcataaagactgtaatcccgtatttcgtgatggatacttctccgttcttaataaggtagcgacttcaggtttctttacaggagaaaggtgtgcactctgaatttcgagattaaatgcaataacaaagattcttcctccaaacagttaacgaaagcaaagaatgatactatcatgccgcattcggagacagtaactctagtgggcgacatctatatactatatagtaataccaatactcaagactacgaaactgatacaatctcttatcatgtgggtaatgttctcgatgtcgatagccatatgcccggtagttgcgatatacataaactgatcactaattccaaacccacccactttttatagtaagtttttcacccataaataataaatacaataattaatttctcgtaaaagtagaaaatatattctaatttattgcacggtaaggaagtagaatcataaagaacagtactcaatcaatagcaattatgaaacaatatatcgtcctggcatgcatgtgcctggcggcagctgctatgcctgccagtcttcagcaatcatcctcatcctcctcctcgtgtacggaagaagaaaacaaacatcatatgggaatcgatgttattatcaaagtcacaaagcaagaccaaacaccgaccaatgataagatttgccaatccgtaacggaaattacagagtccgagtcagatccagatcccgaggtggaatcagaagatgattccacatcagtcgaggatgtagatcctcctaccacttattactccatcatcggtggaggtctgagaatgaactttggattcaccaaatgtcctcagattaaatccatctcagaatccgctgatggaaacacagtgaatgctagattgtccagcgtgtccccaggacaaggtaaggactctcccgcgatcactcatgaagaagctcttgctatgatcaaagactgtgaagtgtctatcgacatcagatgtagcgaagaagagaaagacagcgacatcaagacccatccagtactcgggtctaacatctctcataagaaagtgagttacgaagatatcatcggttcaacgatcgtcgatacaaaatgcgtcaagaatctagagtttagcgttcgtatcggagacatgtgcaaggaatcatctgaacttgaggtcaaggatggattcaagtatgtcgacggatcggcatctgaaggtgcaaccgatgatacttcactcatcgattcaacaaaactcaaagcgtgtgtctgaatcgataactctattcatctgaaattggatgagtagggttaatcgaacgattcaggcacaccacgaattaaaaaagtgtaccggacactatattccggtttgcaaaacaaaaatgttcttaactacattcacaaaaagttacctctcgcgacttcttctttttctgtctcaatagtgtgatacgattatgacactattcctattcctattcctatttcctttcagagtatcacaaaaatattaaacctctttctgatggtctcataaaaaaagttttacaaaaatatttttattctctttctctctttgatggtctcataaaaaaagttttacaaaaatatttttattctctttctctctttgatggtctcataaaaaaagttttacaaaaatatttttattctctttctctctttgatggtctcataaaaaaagttttacaaaaatatttttattctctttctctctttgatggtctcataaaaaaagttttacaaaaatatttttattctctttctctctttgatggtctcataaaaaaagttttacaaaaatatttttattctctttctctctttgatggtctcataaaaaaagttttacaaaaatatttttattctctttctctctttgatggtctcataaaaaaagttttacaaaaatatttttattctctttctctctttgatggtctcataaaaaaagttttacaaaaatatttttattctctttctctctttgatggtctcataaaaaaagttttacaaaaatatttttattctctttctctctttgatggtctcataaaaaaagttttacaaaaatatttttattctctttctctctttgatggtctcataaaaaaagttttacaaaaatatttttattctctttctctctttgatggtctcataaaaaagttttacaaaaatatttttattctctttctctctttgatggtctcataaaaaagttttacaaaaatatttttattctctttctctctttgatggtctcataaaaaaagttttacaaaaatatttttattctctttctctctttgatggtctcataa

SEQ ID NO: 194 - DNA, 184241 bp, Artificial Sequence
  GLV-2b372
tttttttatgagaccatcaaagagagaaagagaataaaaatatttttgtaaaactttttttatgagaccatcaaagagagaaagagaataaaaatatttttgtaaaactttttttatgagaccatcaaagagagaaagagaataaaaatatttttgtaaaactttttttatgagaccatcaaagagagaaagagaataaaaatatttttgtaaaactttttttatgagaccatcaaagagagaaagagaataaaaatatttttgtaaaactttttttatgagaccatcaaagagagaaagagaataaaaatatttttgtaaaactttttttatgagaccatcaaagagagaaagagaataaaaatatttttgtaaaactttttttatgagaccatcaaagagagaaagagaataaaaatatttttgtaaaactttttttatgagaccatcaaagagagaaagagaataaaaatatttttgtaaaactttttttatgagaccatcaaagagagaaagagaataaaaatatttttgtaaaactttttttatgagaccatcagaaagaggtttaatatttttgtgatactctgaaaggaaataggaataggaataggaatagtgtcataatcgtatcacactattgagacagaaaaagaagaagtcgcgagaggtaactttttgtgaatgtagttaagaacatttttgttttgcaaaccggaatatagtgtccggtacacttttttaattcgtggtgtgcctgaatcgttcgattaaccctactcatccaatttcagatgaatagagttatcgattcagacacacgctttgagttttgttgaatcgatgagtgaagtatcatcggttgcaccttcagatgccgatccgtcgacatacttgaatccatccttgacctcaagttcagatgattccttgcacatgtctccgatacgaacgctaaactctagattcttgacacattttgtatcgacgatcgttgaaccgatgatatcttcgtaactcactttcttatgagagatgttagacccgagtactggatgtcgctgtctttctcttcttcgctacatctgatgtcgatagacacctcacagtctttgatcatagcaagagcttcttcatgagtccttaccttgtcctggggacacgctggacaatctagcattcactgtgtttccatcagcggattctgagatggatttaatctgaggacatttggtgaatccaaagttcattctcagacctccaccgatgatggagtaataagtggtaggaggatctacatcctcgactgatgtggaatcatcttctgattccacctcgggatctggatctgactcggactctgtaatttccgttacggattggcaaatcttatcattggtcggtgtttggtcttgctttgtgactttgataataacatcgattcccatatgatgtttgttttcttcttccgtacacgaggaggaggatgaggatgattgctgaagactggcaggcatagcagctgccgccaggcacatgcatgccaggacgatatattgtttcataattgctattgattgagtactgttctttatgattctacttccttaccgtgcaataaattagaatatattttctacttttacgagaaattaattattgtatttattatttatgggtgaaaaacttactataaaaagtgggtgggtttggaattagtgatcagtttatgtatatcgcaactaccgggcatatggctatcgacatcgagaacattacccacatgataagagattgtatcagtttcgtagtcttgagtattggtattactatatagtatatagatgtcgcccactagagttactgtctccgaatgcggcatgatagtatcattctttgctttcgttaactgtttggaggaagaatctttgttattgcatttaatctcgaaattcagagtgcacacctttctcctgtaaagaaacctgaagtcgctaccttattaagaacggagaagtatccatcacgaaagacgggattacagtctttatgattcatagtaatagttagttccgacgttgagatggattcgctgagaccggtagtggtcgtccgagtacacgacgtgtcgttgacgggatacaggttaatttccacatcgatatagttaaaggtatttctgggtacgggttcgcatttatctgcggaagagacggtgtgagaatatgttccgagaccacacggagaacagatgacgtctccggatactccgtatcctattccacattttgtttgggaaacacatgccttgcatccggatgatcctttgagaagacaataatatccgggagagcattcacagattctattgtgagtcgtgttacacgatcgcgtcttccgttacaacttagacaagcgggtaaatgattattgcgagatgtgaaggtacccgaaccacacggcgtacattgtgtgttagtcttgctatcgcataatctggaagcgtatgttcccggacacaaattatggcgtttgtattcgttgtctttacactttccatcggatggtgcatgcggtgctatatctcttccgtttattattatacatgagagaaacaatatatacgagtataatacggacttcatgatttaataatgtagtaatcgtcgtcttgttcctgtttcctacttctccaatcatatagatattttctttctatcatggataatatttgtaatggttctttccgtacaacatactgtttagatgatattgcgcataatttccggaggcaaatacgatagtctagattgaccgatggtagactctaatttattgagtgctttgtcgacgagtttacttttacgctccatcgatagatggcactgttctatgagatcgtcgtacatgggaaatgaaatgtgtctgtctgaatgtatggctttaagatagctgtgataccgtatacaggtcggtgtcggagattcgaatctctttaaggcgacttatgtcacgatgatggaatctatcttatcgaatgatatatttttcataaatacacttttatagtcctcgtttaaacagaatttactatgtagttccgcgaatgactcgtcccttaataggcagtaggctagtatcttttttacgtagtaatcgtcgtagggagagacatcttgtagaacaacgatttaatcataggtagagatactttcagtctgtggtggatgatgtcattcacaacatccgccttgtatatgatgtttctgttttcaaacaccaagtcgaataccgtctttagtcggaaggttgatgtcgtatccgatgtatgaggcaacattgttgttacaattttgaaaggcggtattatagtattcgtctttctgaatgtcgaacctatctaatagataccgtagtatattgagagtgtatccttgattatgttttatgaatagataaagtagatgttgtccttcttccttttgttcgtgccaattgagtaacattatgagaatatgacctgttgcacaatcgttccatgatgggtgtacaatcaagattattacgtatcctcgtatcggctcctcgagataaaagagcatacaccacacgaggactatgtttggtatactgttgaaggtaagtgtgtaaccgcgttaatgtttgctccataatctattatcgcgtagatgaatcgcttctcggctcgcatcttagtgtgacttaacttgtaataattgctttcgtagaacgtggatatgtgtttacagtagtaatgaagagaagtgagttcatcctcgtcggcgcaattagggtcggatcctttgtacagaacgtaatagtttaagctcccattgaatttatatctaagataacacagcaatagatcggatgatttactaaagtcatcaatggtgtccgttagtatatcaaagatcttgttatcgattgatagtggtcatccttgctatcaaagttacgcatgccgtggtgtaacaatatctttaatacagatggattaaatcgtgtattcatcgtatagcaatgtaatggagagttacctcgtttattcagatcgcagtgtttaataactagcttaaacagatgagacgatgtatccacatcaaagaacgtaaaatacatatgacagacattgttgacagaaacgtgaccttcattcttaccgtcgtccataaatacgttaggtatgtaccacatactgtcgcgaacgatgcgtacaatctcgtccatctcataatgatttactttttcataattaaagatgtgaaagaaaaccgaacaatatatttttttagtaatgtttatgcgagacatataaaataaactccgtgtttatgatgccggtaaatgtttttatcatcttggacggaatcgattttgtaatatgtcatggaaacaaatgaaacaggacattatcgctccatgataaattatttaatggagtaataaagtatctccatgggtaatttcgaaatcaagttatcgtctgtattaatgttgtccactatggagtcgatcctctcattgttctttacagtttctgtaatgatggacgttagttcttttttgtaccatttgatgtcggattctttgcgtatctcaatttgtggcgtttgcttcgtttaaataatatatcaaacatggagacgcctgatatgtagacattcttcattctattaatgtctactctatagcgctttagttccttatgacgaccggcgatatcatactttactttagaaggaaaatcatcatctaggattaaggcgtatctgatacaggcgaataatggttcaggatatagatagcgtatatctctattaaatgcgtcaatcatagtctctagagtgggatggtaactcagtaataaatcaactagcttcgttttgttttctctttggtaactgcttttctggatggccgtattgattatcgagcgtgacactcgctccatattccaataaccgctttgcaaattgtatattattgacatcgaccgcgtaatatagtagagttatcgatcatatctatatcatccatgtacttgcttagtatatcaaatacatctatcagtatggtttcataacagtgatacccgcaattattaaatctcgataatatcagaccgtacatacatagacggccattgttcgatacgtgatttacagccgcgtgtccatattttccacgataaaccttacgacgtttacatcgacgagattattattaacaaagtagtcgtgcagaggatagttgttgtccgttatctaacatgcatcgaacgaccatatcgccgtaatgtaagtagtttatcaacatggcttgtacatcctgttgtctaaatctctttagaatgttatcgatgatgtagtggttatattctctggaatcgtacgaagtaatactacgcattacgtcgacaagagtatgacgtctctcaataagaagattaacgatttccatgtctacattatatggggttactctaaatcgcttgtttagataatatagggctgacgtcgtatactctacacgtgtccacatcctttattaataataatttaacaatctctatatctatggttgagaaagaccagtagtattggatgggtaaagatcctccttcgtctctgccatggatggaaacattgttatcgatcaaacatttaattacatccttggatagagattgagattctctatgagacgatatatagtaatgaagagagttcttacacatatcactgtcgtacatacaggtacgaaatacgtaaccggtgctgtaacattctgatttaagaagccatagcaatacttctggtctcggattaggcgtcgttacgtatatatccaccaatccgagaccattgattgcataattcgtattcttggacggacgtatccgtttatccacaattaggtattttagcagacgtaagtcgatattatccgaatacagatcgaaatcatttatattcgacttgagttcgttagaggaatttgaatagctggatatcagtagatgcacaatctgagattttacgtatctatgcttactgtatactcctagcggagttaatccttcgttgtttctacaaagtctctcgactccgcgagagaacaatcttaatgtctgtatcgcatttattggagacgtaacaatgtagcgcattgtttcctcgtctatctatatgttttgataagttgtgacacgtttcaatttctagttttatttttttgtacgtcacatcttcatccagtagacgacatagaatagtgcactctctaccacaataatccatagctattctggtgctaattattcctatttcacgaaggcaatcattcctcataagatgataaaaagtgtagtggagatttagtatttagcagtgcggatatgatccaagagggtgagatagtcgttctcgttcagaatctttcgcagcataagtagtatgtcgatatacttatcgttgaagactctttataaaagtctatttgtttatatttattgcggatagcagtatttccctataaaaagtatacgtcctgtggtgtctttaatcatgtacatgaatggatggtttatgtagaccttcgtacgatataccatcgaaaagttaatcgtaaatactcctgtaacggccgatgcttctgtatactcctcattaacatctataaacgtcgtatgtagaaatttttctacagtgatagtttcattacacatcttgctaaaatctgcataatatccgaatatattagtaagtcctaaattttctaaaatcggtaccagattatacggttctgtcatttccactttaaactttggcatatacaagtctatacttttagtagataacataccacaccattttttaaatttttcatctgttatatttttttctatgttatatataccttctatgtcgtccggtagtataattaccatactagagtttccctcgtatggaatatcgataatagagaatcctccgaataattcattaatatgtacatattgcaagttattctcggtacccaccatcatatcaacgctggtaactatattcttagaaatataaaacttgtctgtatatgtaagatgtttagaaaatggatatttccacattgctttaaaatggacggcgctaacaactgtcatacgagtattaatggatagcggactagtcaataaggaattaattttaccatttgtcattgtcttaacccattcgttgattagttcctttgtttggttagcattattaaagtttacagtttgaaaatcgtcttttattttttgtaggaaggaggcgtggaactcgatactatcgctaccgtatattttatttgcggtagctagtgtcgcacaatacggaatatctacctccatgtcatcattattgtcatcgggtgtattctcattcatattctctatatattttgatagttgttcagctgtagaaccagctgctccatgatttagaatagataaagtagataaaatagaaactggagaaatcaaaacattttcatccgtgtgttttaagattagttctttaaagatatccatggtatagaccaaacaataacgataacgatatatatcataaataaataatgttaaatttcagtttatgtttgtaccccgtattcatacttaacaaattggtattgcgtacacaatcaatcatattacataccattaataatgcaagcataaaaaattgttagtagatgtttctaaatataggttccgtaagcaaagaatataagaatgaagcggtaatgataaaatcaatcgttatctaaaatgatcatactcatttattttattctattatattaacacatacatttttaacagcaacacattcaatattgtattgttatttttatattatttacacaattaacaatatattattagtttatattactgaattaataatataaaattcccaatcttgtcataaacacacactgagaaacagcataaacacagaatccatcaaaaatgttgataaattatctgatgttgttgttcgctgctatgataatcagatcattcgccgatagtggtaacgctatcgaaacgacattgccagaaattacaaacgctacaacagatattccagctatcagattatgcggtccagagggagatggatattgtttacacggtgactgtatccacgctagagatattgacggtatgtattgtagatgctctcatggttatacaggcattagatgtcagcatgtagtattagtagactatcaacgttcagaaaacccaaacactacaacgtcatatatcccatctcccggtattatgcttgtattagtaggcattattatgtgttgtctattatctgtttataggttcactcgacgaactaaactacctatacaagatatggttgtgccataatttttataaatttttttatgagtatttttacaaaaatgtataaagtgtatgtcttatgtatatttataaaaatgctaagtatgcgatgtatctatgttatttgtatttatctaaacaatacctctacctctagatattatacaaaaattttttatttcggcatattaaagtaaaatctagttaccttgaaaatgaatacagtgggtggttccgtatcaccagtaagaacataatagtcaaatacagtatccgattgagattttgcatacaatactagtctagaaagaaatttgtaatcatcttctgtgacgggagtccatatatctgtatcatcgtctagtttatcagtgtcccatgctatattcctgttatcatcattagttaatgaaaataactctcgtgcttcagaaaagtcaaatattgtatccatacatacatctccaaaactatcgcttatacgtttatctttaacgatacctatacctagatggttatttactaacagacattttccagatctattgactataactcctatagtttccacatcaaccaagtaatgatcatctattgttatataacaataacataactcttttccatttttatcagtatgtatatctatatcaacgtcgtcgttgtagtgaatagtagtcattgatctattatatgaaacggatatgtctagaacggcaattgttttacgtccagttaacactttcgttgatttaaagtctagagtctttgcaaacataatatccttatccgactttatatttcctgtagggtggtataattttattttgcctccacatatcggtgtttccaaatatattactagacaatattccatatagttattagttaagggtacccaattagaacacgtacgcttattatcatcatttggatcgtatttcataaaagttattgtgttatcgatgtcaacacattctacattttttaatcgtctatatagtatttttctgatattttctataatatcagaattgtcttccatcggaagttgtatactatcggaatcagttacatgtttaaataattctctgatgtcattccttatacaatcaaattcattattaaacagtttaatagtctgtagacctttatcgtcgtaaatatccattgtcttattagttacgcttatttttatgtgtttttacgttgctttattatattttataagaatgattgtttgacgaatcacgagaactattaagacacattattaggtatatattataaaaaagtttttgattacgatgttataagaggaaagaggacacattaacatcatacatcaattaactacattcttataacatcgtaatcaaaagaattgcaattttgatgtataacaactgtcaatgggttatggaattgtatattacatattatacggtatgttggtaacgacaaataccggtcggtaattgtctgccggtgtaatagaattatatatatctatctattacaccggccttgtatacataataataagttgtggtagtatgatctccatatttataatttaggactttgtattcagtatttttggaatcataaaaaataaaaaaaagttttactaatttaaaatttaaaaagtatttacatttttttcactgtttagtcgcggatatggaattcgatcctgccaaaatcaatacatcatctatagatcatgtaacaatattacaatacatagatgaaccaaatgatataagactaacagtatgcattatccgaaatattatatcaatatcacaaaaataaatacacatttggctaatcaatttcgggcttggaaaaaacgtatcgccggaagggactatatgactaacttatctagagatacaggaatacaacaatcaaaacttactgaaactatacgtaactgtcaaaaaaatagaaacatatatggtctatatatacactacaatttagttattaattggataaccgatgtgattatcaatcaatattaagagggttggtaaattggtacatagctaataatacctatactccaaatacacccaataatacaacaaccatttctgagttggatatcatcaaaatactggataaatacgaggacgtgtatagagtaagtaaagaaaaagaatgtggaatttgctatgaagttgtttactcaaaacgatagatactttggtttattggattcgtgtactcatatattttgcataacatgcatcaatatatggcatagaacacgaagagaaaccggtgcgtcggataattgtcctatatgccgtacccgttttagaaacataacaatgagcaagttctataagctagttaactaataaataaaaagtttaatttgttgacgacgtatgtcgttattttttctcgtataaaagattaatttgattctaatataatctttagtattggataaatatcaattcaaattaattccattagattatatcataaataaaaatagtagcacgcactacttcagccaaatattcttttttgaaacgccatctatcgtagtgaggacacaagtgaacctataattatcaaatttattagtatcggttacatgaaggactttacgtagagtgacgattccactatctgtggtacgaacggtttcatcttctttgatgccatcacccagatgttctataaacttggtatcctcgtccgatctcatatcctttgccaaccaatacatgtagctaaaattaggcataaatttcacacatcctgaacaatgaaattctccagaagatgttacaatgtctagatttggacatttggtttcaaccgcgttaacatatgagtgaacacacccatacatgaaagcgatgagaaataggattctcatcttgccaaaatatcactagaaaaaatttatttatcagttttaaaggtataaaaaatacttattgttgctcgaatattttgtatttgatggtatacggaagattagaaatgtaggtattatcatcaactgattctatggttttatgtattctatcatgtttcactattgcgttggaaataatatcatatgcttccacatatattttattttgttttaactcataatactcacgtaattctggattattggcatatctatgaataattttagctccatgatcagtaaatattaatgagaacatagtattaccacctaccattatttttttcatctcattcaattcttaattgcaaagatctatataatcattatagcgttgacttatggactctggaatcttagacgatgtacagtcatctataatcatggcatatttaatacattgttttatagcatagtcgttatctacgatgttagatatttctctcaatgaatcaatcacacaatctaatgtaggtttatgacataatagcattttcagcagttcaatgtttttagattcgttgatggcaatggctatacatgtatatccgttatttgatctaatgttgacatctgaaccggattctagcagtaaagatactagagattgtttattatatctaacagccttgtgaagaagtgtttctcctcgtttgtcaatcatgttaatgtctttaagataaggtaggcaaatgtttatagtactaagaattgggcaagcataagacatgtcacaaagacccttttttgtatgtataagtgtaaaaattataacatccatagttggatttacataggtgtccaatcgggatctctccatcatcgagataattgatggcatctcccttccttttttagtagatatttcatcgtgtaagaatcaatattaatatttctaaagtatccgtgtatagcctctttatttaccacagctccatattccactagagggatatcgccgaatgtcatatactcaattagtatatgttggaggacatccgagttcattgttttcaatatcaaagagatggtttccttatcatttctccatagtggtacaatactacacattattccgtgcggctttccattttccaaaaacaatttgaccaaatctaaatctacatctttattgtatctataatcactatttagataatcagccataattcctcgagtgcaacatgttagatcgtctatatatgaataagcagtgttatctattcctttcattaacaatttaacgatgtctatatctatatgagatgacttaatataatattgaagagctgtacaatagtttttatctataaaagacggcttgattccgtgattaattagacatttaacaacttccggacgcacatatgctctcgtatccgactttgaatacagatgagagatgatatacagatgcaatacggtaccgcaatttcgtagttgataatcatcatacgcgtatcagtactcgtcctcataaagaacactgcagccattttctatgaacaaatcaataattttagaaacaggatcattgtcattacataattttctataactgaacgatggttttcacatttaacactcaagtcaaatccatgttctaccaacacctttatcaagtcaacgtctacatttttggatttcatatagctgaatatattaaagttatttatgttgctaaatccagtggcttctagtagagccatcgctatatccttattaactttaacatgtctactatttgtgtattcttctaatggggtaagctgtctccaatttttgcgtaatggattagtgccactgtctagtagtagtttgacgacctcgacattattacaatgctcattaaaaaggtatgcgtgtaaagcattattcttgaattggttcctggtatcattaggatctctgtctttcaacatctgtttaagttcatcaagagccacctcctcattttccaaatagtcaaacattttgactgaatgagctactgtgaactctatacacccacacaactaatgtcattaaatatcatgtcaaaaacttgtacaattattaataaaaataatttagtgtttaaattttaccagttccagattttacacctccgttaatacctccattaaccccactggacgatcctcctccccacattccaccgccaccagatgtataagttttagatcctttattactaccatcatgtccatggataaagacactccacatgccgccactaccccctttagaagacatattaataagacttaaggacaagtttaacaataaaattaatcacgagtaccctactaccaacctacactattatatgattatagtttctatttttacagtaccttgactaaagtttctagtcacaagagcaatactaccaacctacactattatatgattatagtttctatttttataggaacgcgtacgagaaaatcaaatgtctaatttctaacggtagtgttgataaacgattgttatccgcggatacctcctctatcatgtcgtctattttcttactttgttctattaacttattagcattatatattatttgattataaaacttatattgcttattagcccaatctgtaaatatcggattattaacatatcgtttctttgtaggtttatttaacatgtacatcactgtaagcatgtccttaccatttattttaatttgacgcatatccgcaatttctttttcgcagtcggttataaattctatatatgatggatacatgctacatgtgtacttataatcgactaatatgaagtacttgatacatattttcagtaacgatttattattaccacctatgaataagtacctgtgatcgtctaggtaatcaactgttttcttaatacattcgatggttggtaatttactcagaataatttccaatatcttaatatataattctgctatttctgggatatatttatctgccagtataacacaaatagtaatacatgtaaacccatattttgttattatattaatgtctgcgccattatctattaaccattctactaggctgacactatgcgactcaatacaatgataaagtatactacatccatgtttatctattttgtttatatcatcaatatacggcttacaaagttttagtatcgataacacatccaactcacgcatagagaaggtagggaataatggcataatatttattaggttatcatcattgtcattatctacaactaagtttccattttttaaaatatactcgacaactttaggatctctattgccaaatttttgaaaatatttatttatatgcttaaatctatataatgtagctccttcatcaatcatacatttaataacattgatgtatactgtatgataagatacatattctaacaatagatcttgtatagaatctgtatatcttttaagaattgtggatattaggatattattacataaactattacacaattctaaaatataaaacgtatcacggtcgaataatagttgatcaactatataattatcgattttgtgatttttcttcctaaactgtttacgtaaatagttagatagaatattcattagttcatgaccactatagttactatcgaataacgcgtcaaatatttcccgtttaatatcgcatttgtcaagataataatagagtgtggtatgttcacgataagtataataacgcatctctttttcgtgtgaaattaaatagtttattacgtccaaagatgtagcataaccatcttgtgacctagtaataatataataatagagaactgttttacccattctatcatcataatcagtggtgtagtcgtaatcgtaatcgtctaattcatcatcccaattataatattcaccagcacgtctaatctgttctattttgatcttgtatccatactgtatgttgctacatgtaggtattcctttatccaataatagtttaaacacatctacattgggatttgatgttgtagcgtatttttctacaatattaataccatttttgatactatttatttctatacctttcgaaattagtaatttcaataagtctatattgatgttatcagaacatagatattcgaatatatcaaaatcattgatatttttatagtcgactgacgacaataacaaaatcacaacatcgtttttgatattattatttttcttggtaacgtatgcctttaatggagtttcaccatcatactcatataatggatttgcaccactttctatcaatgattgtgcactgctggcatcgatgttaaatgttttacaactatcatagagtatcttatcgttaaccatgattggttgttgatgctatcgcattttttggtttctttcatttcagttatgtatggatttagcacgtttgggaagcatgagctcatatgatttcagtactgtagtgtcagtactattagtttcaataagatcaatctctagatctatagaatcaaaacacgataggtcagaagataatgaatatctgtacgcttcttgttgtactgtaacttctggttttgttagatggttgcatcgtgctttaacgtcaatggtacaaattttatcctcgctttgtgtatcatattcgtccctactataaaattctatattcagattatcatgcgatgtgtatacgctaacggtatcaataaacggagcacaccatttagtcataaccgtaatccaaaaatttttaaagtatatcttaacgaaagaagttgtatcattgtctacggtgtatggtactagatcctcataagtgtatatatctagagtaatgtttaatttattaaatggttgataatatggatcgtcgtggcaatttcctaagatggaaatgagatatagacacgcaataaatctaatcgaagacatggttactccttaaaaaaatacgaataatcaccttggctatttagtaagtgtcatttaacactatactcatattaatccatggactcataatctctatacgggattaacggatgttctatatacggggatgagtagttctcttctttaactttatactttttactaatcatatttagactgatgtatgggtaatagtgtttgaagagctcgttctcatcatcagaataaatcaatatctctgtttttttgttatacagatgtattacagcctcatatattacgtaatagaacgtgtcatctaccttattaactttcaccgcatagttgtttgcaaatacggttaatcctttgacctcgttgatttccgaccaatctgggcgtataatgaatctaaactttaatttcttgtaatcattcgaaataatttttagtttgcatccgtagttatcccctttatgtaactgtaaatttctcaacgcgatatctccattaataatgatgtcgaattcgtgctgtatacccatactgaatggatgaacgaataccgacggcgttaatagtaatttactttttcatctttacatattgggtactagttttactatcataagtttataaattccacaagctactatggaataagccaaccatcttagtataccacacatgtcttaaagtttattaattaattacatgttgttttatatatatcgctacgaatttaaacagagaaatcagtttaggaaaaaaaaaattatctatctacatcatcacgtctctgtattctacgatagagtgctactttaagatgagacatatccgtgtcatcaaaaatatactccattaaaatgattattccggcagcgaacttgatattggatatatcacaacctttgttaatatctacgacaatagacagcagtcccatggttccataaacagtgagtttatctttctttgaagagatattttgtagagatcttataaaactgtcgaatgacatcgcatttatatctttagctaaatcgtatatgttaccatcgtaatatctaaccgcgtctatcttaaacgtttccatcgctttaaagacgtttccgatagatggtctcatttcatcagtcatactgagccaacaaatataatcgtgtataacatctttgatagaatcagactctaaagaaaacgaatcggctttattatacgcattcatgataaacttaatgaaaaatgtttttcgttgtttaagttggatgaatagtatgtcttaataattgttattatttcattaattaatatttagtaacgagtacactctataaaaacgagaatgacataactaatcataactagttatcaaagtgtctaggacgcgtaattttcatatggtatagatcctgtaagcattgtctgtattctggagctattttctctatcgcattagtgagttcagaatatgttataaatttaaatcgaataacgaacataactttagtaaagtcgtctatattaactcttttattttctagccatcgtaataccatgtttaagatagtatattctctagttactacgatctcatcgttgtctagaatatcacatactgaatctacatccaattttagaaattggtctgtgttacatatctcttctatattattgttgatgtattgtcgtagaaaactattacgtagaccattttctttataaaacgaatatatagtactccaattatctttaccgatatatttgcacacataatccattctctcaatcactacatctttaagattttcgttgttaagatatttggctaaactatataattctattagatcatcaacagaatcagtatatatttttctagatccaaagacgaactctttggcgtcctctataatattcccagaaaagatattttcgtgttttagtttatcgagatctgatctgttcatatacgccatgattgtacggtacgttatgataaccgcataaaataaaaatccattttcatttttaaccaatactattcataattgagattgatgtaatactttgttactttgaacgtaaagacagtacacggatccgtatctccaacaagcacgtagtaatcaaatttggtgttgttaaacttcgcaatattcatcaatttagatagaaacttatactcatcatctgttttaggaatccatgtattattaccactttccaacttatcattatcccaggctatgtttcgtccatcatcgttgcgcagagtgaataattcttttgtattcggtagttcaaatatatgatccatgcatagatcggcaaagctattgtagatgtgatttttcctaaatctaatataaaactcgtttactagcaaacactttcctgatttatcgaccaagacacatatggtttctaaatctatcaagtggtggggatccatagttatgacgcagtaacatatattattacattcttgactgtcgctaatatctaaatatttattgttatcgtattggattctgcatatagatggcttgtatgtcaaagatatagaacacataaccaatttatagtcgcgctttacattctcgaatctaaagttaagagatttagaaaacattatatcctcggatgatgttatcactgtttctggagtaggatatattaaagtctttacagatttcgtccgattcaaataaatcactaaataatatcccacattatcatctgttagagtagtatcattaaatctattatattttatgaaagatatatcactgctcacctctatatttcgtacatttttaaactgtttgtataatatctctctgatacaatcagatatatctattgtgtcggtagacgataccgttacatttgaattaatggtgttccattttacaacttttaacaagttgaccaattcatttctaatagtatcaaactctccatgattaaatattttaatagtatccattttatatcactacggacacaaagtagctgacataaaccattgtataatttttatgttttatgtttattagcgtacacattttggaagttccggcttccatgtatttcctggagagcaagtagatgatgaggaaccagatagtttatatccgtacttgcacttaaagtctacattgtcgttgtatgagtatgatcttttaaacccgctagacaagtatccgtttgatattgtaggatgtggacatttaacaatctgacacgtgggtggatcggaccattctcctcctgaacacaggacactagagttaccaatcaacgaatatccactattgcaactataagttacaacgctcccatcggtataaaaatcctcgtatccgttatgtcttccgttggatatagatggaggggattggcatttaacagattcacaaataggtgcctcgggattccataccatagatccagtagatcctaattcacaatacgatttagattcaccgatcaactgatatccgctattacaagagtacgttatactagagccaaagtctactccaccaatatcaagttggccattatcgatatctcgaggcgatgggcatctccgtttaatacattgattaaagagtgtccatccagtacctgtacatttagcatatataggtcccattttttgctttctgtatccaggtagacatagatattctatagtgtctcctatgttgtaattagcattagcatcagtctccacactattcttaaatttcatattaatgggtcgtgacggaatagtacagcatgatagaacgcatcctattcccaacaatgtcaggaacgtcacgctctccaccttcatatttatttatccgtaaaaatgttatcctggacatcgtacaaataataaaaagcccatatatgttcgctattgtagaaattgtttttcacagttgctcaaaaacgatggcagtgacttatgagttacgttacactttggagtctcatctttagtaaacatatcataatattcgatattacgagttgacatatcgaacaaattccaagtatttgattttggataatattcgtattttgcatctgctataattaagatataatcaccgcaagaacacacgaacatctttcctacatggttaaagtacatgtacaattctatccatttgtcttccttaactatatatttgtatagataattacgagtctcgtgagtaattccagtaattacatagatgtcgccgtcgtactctacagcataaactatactatgatgtctaggcatgggagacttttttatccaacgatttttagtgaaacattccacatcgtttaatactacatatttctcatacgtggtataaactccacccattacatatatatcatcgtttacgaataccgacgcgcctgaatatctaggagtaattaagtttggaagtcttatccatttcgaagtgccgtgtttcaaatattctgccacacccgttgaaatagaaaattctaatcctcctattacatataactttccatcgttaacacaagtactaacttctgattttaacgacgacatattagtaaccgttttccattttttcgttttaagatctacccgcgatacggaataaacatgtctattgttaatcatgccgccaataatgtatagacaattatgtaaaacatttgcattatagaattgtctatctgtattaccgactatcgtccaatattctgttctaggagagtaatgggttattgtggatatataatcagagtttttaatgactactatattatgttttataccatttcgtgtcactggctttgtagatttggatatagttaatcccaacaatgatatagcattgcgcatagtattagtcataaacttgggatgtaaaatgttgatgatatctacatcgtttggatttttatgtatccactttaataatatcatagctgtaacatcctcatgatttacgttaacgtcttcgtgggataagatagttgtcagttcatcctttgataattttccaaattctggatcggatgtcaccgcagtaatattgttgattatttctgacatcgacgcattatatagttttttaattccatatcttttagaaaagttaaacatccttatacaatttgtgaaattaatattatgaatcatagtttttacacatagatctactacaggcggaacatcaattattatggcagcaactagtatcatttctacattgtttatggtgatgtttatcttcttccagcgcatatagtctaatagcgattcaaacgcgtgatagtttataccattcaatataatcgcttcatcctttagatggtgatcctgaatgcgtttaaaaaaattatacggagacgccgtaataatttccttattcacttgtataatttccccattgatagaaaatattacgctttccattcttaaagtactataagtaattatagtataatgtaaacgtttatatattcaatatttttataaaaatcattttgacattaattcctttttaaatttccgtctatcatctatagaaacgtattctatgaatttataaaatgcttttacgtgtcctatcgtaggcgatagaaccgctaaaaagcctatcgaatttctacaaaagaatctgttatatggtatagggagagtataaaacattaaatgtccgtacttattaaagtattcagtagccaatcctaactctttcgaatacttattaatggctcttgttctgtacgaatctatttttttgaacaacggacctagtggtatatcttgttctatgtatctaaaataatgtctgactagatccgttagtttaatatccgcagtcatcttgtctagaatggcaaatctaactgcgggtttaggctttagtttagtttctatatctacatctatgtctttatctaacaccaaaaatataatagctaatattttattacaatcatccggatattcttctacgatctcactaactaatgtttctttggttatactagtatagtcactatcggacaaataaagaaaatcagatgatcgatgaataatacatttaaattcatcatctgtaagatttttgagatgtctcattagaatattattagggttagtactcattatcattcggcagctattacttattttattatttttcaccatatagatcaatcattagatcatcaaaatatgtttcaatcatcctaaagagtatggtgaatgactcttcccatctaatttctgaacgttcaccaatgtctctagccactttggcactaatagcgatcattcgcttagcgtcttctatattattaactggttgatttaatctatctagcaatggaccgtcggacagcgtcattctcatgttcttaatcaatgtacatacatcgccgtcatctaccaattcatccaacaacataagctttttaaaatcatcattataataggtttgatcgttgtcatttctccaaagaatatatctaataagtagagtcctcatgcttagttaacaactattttttatgttaaatcaattagtacaccgctatgtttaatacttattcatattttagtttttaggattgagaatcaatacaaaaaattaatgcatcattaattttagaaatacttagtttccacgtagtcaatgaaacatttgaactcatcgtacaggacgttctcgtacaggacgtaactataaaccggtttatatttgttcaagatagatacaaatccgataactttttttacgaattctacgggatccactttaaaagtgtcataccgggttctttttatttttttaaacagatcaatggtgtgatgttgattaggtcttttacgaatttgatatagaatagcgtttacatatcctccataatggtcaatcgccatttgttcgtatgtcataaattctttaattatatgacactgtgtattatttagttcatccttgttcattgttaggaatctatccaaaatggcaattatactagaactataggtgcgttgtatacacatattgatgtgtctgtttatacaatcaatgctactaccttcgggtaaaattgtagcatcatataccatttctagtactttaggttcattattatccattgcagaggacgtcatgatcgaatcataaaaaaatatattatttttatgttattttgttaaaaataatcatcgaatacttcgtaagatactccttcatgaacataatcagttacaaaacgtttatatgaagtaaagtatctacgatttttacaaaagtccggatgcataagtacaaagtacgcgataaacggaataataatagatttatctagtctatctttttctatagctttcatagttagatacatggtctcagaagtaggattatgtaacatcagcttcgataaaatgactgggttatttagtcttacacattcgctcatacatgtatgaccgttaactacagagtctacactaaaatgattgaacaatagatagtctaccattgtttcgtattcagatagtacagcgtagtacatggcatcttcacaaattatatcattgtctaatagatatttgacgcatcttatggatcccacttcaacagccatcttaaaatcggtagaatcatattgctttcctttatcattaataatttctagaacatcatctctatcataaaagatacaaatattaactgtttgatccgtaataacattgctagtcgatagcaatttgttaataagatgcgctgggctcaatgtcttaataagaagtgtaagaggactatctccgaatttgttttgtttattaacatccgttgatggaagtaaaagatctataatgtctacattcttgactgttttagagcatacaatatggagaggtgtatttccatcatgatctggttttgagggactaattcctagtttcatcatccatgagattgtagaagcttttggattgtctgacataagatgtctatgaatatgatttttgccaaatttatccactatcctggcttcgaatccgatggacattatttttttaaacactctttctgaaggatctgtacacgccaacaacggaccacatccttcttcatcaaccgagttgttaatcttggctccatactgtaccaataaatttattctctctatgacttcatcatctgttcccgagagataatatagaggcgttttatgctgtttatcacacgcgtttggatctgcgccgtgcgtcagcagcatcgcgactattctattattattaattttagaagctatatgcaatggataatttccatcatcatccgtctcatttggagagtatcctctatgaagaagttcttcgacaaatcgttcatctagtcctttaattccacaatacgcatgtagaatgtgataattatttccagaaggttcgatagcttgtagcatattcctaaatacatctaaatttttactattatatttggcataaagagatagataatactcggccgacataatgttgtccattgtagtataaaaattaatatttctatttctgtatatttgcaacaatttactctctataacaaatatcataacttagttcttttatgtcaagaaggcactggtttagttcatctataaatgtcacgccataactaccacgcatgccatactcagaattatgataaagatatttatccttggggtgtaggtaatggggattaatctttgttggatcagtctctaagttaacacatgtcacacatgatccatttatagttatatcacacgatgatgatttatgaattgattccggaagatcgctatcgtattttgtggttccacaattcatttccatacatgttattgtcacactaatattatgatgaactttatctagccgctgagtggtaaacaacagaacagatagtttattatctttaccaacaccctcagccgctgccacaaatctctgatccgtatccatgatggtcatgtttatttctagtccgtatccagtcaacactatgttagcatttctgtcgatatagctttcactcatatgacactcaccaataatagtagaattaatgtcgtaatttacaccaatagtgagttcggcggcaaagtaccaataccggtaatcttgtcgaggaggacatatagtattcttgtattctaccgaatacccgagagatgcgatacaaaagagcaagactaatttgtaaaccatcttactcaaaatatgtaacaatagtacgatgcaatgagtaagacaataggaaatctatcttatatacacataattattctatcaattttaccaattagttagtgtaatgttaacaaaaatgtgggagaatctaattagtttttctttacacaattgacgtacatgagtctgagttccttgtttttgctaattatttcatccaatttattattcttgacgatatcgagatcttttgtataggagtcaaacttgtattcaacatgcttttctataatcattttagctatttcggcatcatccaatagtacattttccagattagcagaatagatattaatgtcgtatttgaacagagcctgtaacatctcaatgtctttattatctatagccaatttaatgtccggaatgaagagaagggaattattggtgtttgtcgacgtcatatagtcgagcaagagaatcatcatatccacgtgtccattttttatagtgatgtgaatacaactaaggagaatagccagatcaaaagtagatggtatctctgaaagaaagtaggaaacaatacttacatcattaagcatgacggcatgataaaatgaagttttccatccagttttcccatagaacatcagtctccaatttttcttaacaaacagttttaccgtttgcatgttaccactatcaaccgcataatacaatgcggtgtttcccttgtcatcaaattgtgaatcatccagtccactgaatagcaaaatctttactattttggtatcttccaatgtggctgcctgatgtaatggaaattcattctctagaagatttttcaatgctccagcgttcaacaacgtacatactagacgcacgttattatcagctattgcataatacaaggcactatgtccatggacatccgccttaaatgtatctttactagagagaaagcttttcagctgcttagacttccaagtattaattcgtgacagatccatgtctgaaacgagacgctaattagtgtatattttttcattttttataattttgtcatattgcaccagaattaataatatctttaatagatctgattagtagatacatggctatcgcaaaacaacatatacacatttaataaaaataatatttattaagaaaattcagatttcacgtacccatcaatataaataaaataatgattccttacaccgtacccatattaaggagattccaccttacccataaacaatataaatccagtaatatcatgtctgatgatgaacacaaatggtgtattaaattccagtttttcaggagatgatctcgccgtagctaccataatagtagatgcctctgctacagttccttgttcgtcgacatctatctttgcattctgaaacattttataaatatataatgggtccctagtcatatgtttaaacgacgcattatctggattaaacatactaggagccatcatttcggctatcgacttaatatccctcttattttcgatagaaaatttagggagtttaagattgtacactttattccctaattgagacgaccaatagtctaattttgcagccgtgatagaatctgtgaaatgggtcatattatcacctattgccaggtacatactaatattagcatccttatacggaaggcgtaccatgtcatattctttgtcatcgattgtgattgtatttccttgcaatttagtaactacgttcatcatgggaaccgttttcgtaccgtacttattagtaaaactagcattgcgtgttttagtgatatcaaacggatattgccatatacctttaaaatatatagtattaatgattgcccatagagtattattgtcgagcatattagaatctactacattagacataccggatctacgttctactatagaattaattttattaaccgcatctcgtctaaagtttaatctatataggccgaatctatgatattgttgataatacgacggtttaatgcacacagtattatctacgaaactttgataagttagatcagtgtacgtatatttagatgttttcagcttagctaatcctgatattaattctgtaaatgctggacccagatctctttttctcaaatccatagtcttcaataattctattctagtattacctgatgcaggcaatagcgacataaacatagaaaacgaataaccaaacggtgagaagacaatattatcatcttgaatatttttatacgctactataccggcattggtaaatccttgtagacgataggcggacgctgaacacgctaacgatagtatcaataacgcaatcatgattttatggtattaataattaaccttatttttatgttcggtataaaaaaattattgatgtctacacatccttttgtaattgacatctatatatccttttgtataatcaactctaatcactttaacttttacagttttccctaccagtttatccctatattcaacatatctatccatatgcatcttaacactctctgccaagatagcttcagagtgaggatagtcaaaaagataaatatatagagcataatcattctcgtatactctgccctttattacatcacccgcattgggcaacgaataacaaaatgcaagcatcttgttaacgggctcgtaaattgggataaaaattatgtttttattgtcttatatctattttattcaagagaatattcaggaatttctttttccggttgtatctcgtcgcagtatatatcatttgtacattgtttcatattttttaatagtttacaccttttagtaggactagtatcgtacaattcatagctgtattttgaattccaatcacgcataaaaatatcttccaattgttgacgaagacctaatccatcatccggtgtaatattaatagatgctccacatgtatccgtaaagtaatttcctgtccaatttgaggtacctatataggccgttttatcggttaccatatatttggcatggtttaccctagaatacggaatgggaggatcagcatctggtacaataaatagctttacttctatatttatgtttttagattttagcatagcgatagatcttaaaaagtttctcatgataaacgaagatcgttgccagcaactaatcaatagcttaacggatacttgtctgtctatagcggatcttcttaattcatcttctatataaggccaaaacaaaattttacccgccttcgaataaataatagggataaagttcataacagatacataaacgaatttactcgcatttctaatacatgacaataaagcggttaaatcattggttctttccatagtacatagttgttgcggtgcagaagcaataaatacagagtgtggaacgccgcttacgttaatactaagaggatgatctgtattataatacgacggataaaagtttttccaattatatggtagattgttaactccaagataccagtatacctcaaaaatttgagtgagatccgctgccaagttcctattattgaagatcgcaatacccaattccttgacctgagttagtgatctccaatccatgttagcgcttcctaaataaatatgtgtattatcagatatccaaaattttgtatgaagaactcctcctaggatatttgtaatatctatgtatcgtacttcaactccggccatttgtagtctttcaacatcctttaatggtttgttagatttattaacggctactctaactcgtactcctcttttgggtaattgtacaatctcgtttaatattatcgtgccgaaattcgtacccacttcatccgataaactccaataaaaagatgatatatctagtgtttttgtggtattggatagaatttccctccacatgttaaatgtagacaaatatactttatcaaattgcatacctataggaatagtttctgtaatcactgcgattgtattatccggattcattttatttgttaaaagaataatcctatatcacttcactctattaaaaatccaagtttctatttctttcatgactgattttttaacttcatccgtttccttatgaagatgatgtttggcaccttcataaatttttatttctctattacaatttgcatgttgcatgaaataatatgcacctaaaacatcgctaatcttattgtttgttccctggagtatgagagtcgggggggtgttaatcttggaaattatttttctaaccttgttggtagccttcaagacctgactagcaaatccagccttaattttttcatgattgactaatgggtcgtattggtatttataaactttatccatatctctagatactgattctggacatagctttccgactggcgcatttggtgtgatggttcccataagtttggcagctagcagattcagtcttgaaacagcatctgcattaactagaggagacattagaatcattgctgtaaacaagtttggattatcgtaagaggctagctcccatggaatgacccaataagtagatttaatagttaccacgtgctgtaccaaagtcatcaatcatcattttttcaccattacttcttccatgtccaatatgatcatgtgagaatactaaaattcctaacgatgatatgttttcagctagttcgtcataacgtccagaatgtttaccagctccatgacttatgaatactaatgccttaggatatgtaataggtttccaatatttacaatatatgtaatcattgtccagattgaacatacagtttgcactcatgattcacgttatataactatcaatattaacagttcgtttgatgatcatattatttttatgttttattgataattgtaaaaacatacaattaaatcaatatagaggaaggagacggctactgtcttttgtaagatagtcatggcgactaaattagattatgaggatgctgttttttactttgtggatgatgataaaatatgtagtcgcgactccatcatcgatctaatagatgaatatattacgtggagaaatcatgttatagtgtttaacaaagatattaccagttgtggaagactgtacaaggaattgatgaagttcgatgatgtcgctatacggtactatggtattgataaaattaatgagattgtcgaagctatgagcgaaggagaccactacatcaattttacaaaagtccatgatcaggaaagtttattcgctaccataggaatatgtgctaaaatcactgaacattggggatacaaaaagatttcagaatctagattccaatcattgggaaacattacagatttgatgaccgacgataatataaacatcttgatactttttctagaaaaaaaattgaattgatgatataggggtcttcataacgcataattattacgttagcattctatatccgtgttaaaaaaaattatcctatcatgtatttgagagttttatatgtagcaaacatgatagctgtgatgccaataagctttagatattcacgcgtgctagtgttagggatggtattatctggtggtgaaatgtccgttatataatctacaaaacaatcatcgcatatagtatgcgatagtagagtaaacatttttatagtttttactggattcatacatcgtctacccaattcggttataaatgaaattgtcgccaatcttacacccaaccccttgttatccattagcatagtattaacttcgttatttatgtcataaactgtaaatgattttgtagatgccatatcatacatgatattcatgtccctattataatcattactaactttatcacaatatatgttgataatatctatatatgatctagtctttgtgggcaactgtctatacaagtcgtctaaacgttgtttactcatatagtatcgaacagccatcattacatggtcccgttccgttgatagataatcgagtatgttagtggacttgtcaaatctatataccatattttctggaagtggatatacatagtcgtgatcaacattattgctagcctcatcttctatatcctgtactataccattatctatatcatctacataatctatgatattattacacataaacatcgacaacatactattgtttattatctaagtcctgttgatccaaacccttgatctcctctatttgtactatctagagattgtacttcttccagttctggataatatatacgttgatagattagctgagctattctatctccagtatttacattaaacgtacattttccattattaataagaatgactcctatgtttcccctataatcttcgtctattacaccacctcctatatcaatgccttttagtgacagaccagacctaggagctattctaccatagcagaacttaggcatggacatactaatatctgtcttaattaactgtctttctcctggagggatagtataatcgtaagcgctatacaaatcatatccggcagcacccggcgattgcctagtaggagatttagctctgttagtttccttaacaaatctaactggtgagttaatattcatgttgaacataaaactaatattttatttcaaaattatttaccatcccatatattccatgaataagtgtgatgattgtacacttctatagtatctatatacgatccacgataaaatcctcctatcaatagcagtttattatccactatgatcaattctggattatccctcggataaataggatcatctatcagagtccatgtattgctggattcacaataaaattccgcatttctaccaaccaagaataaccttctaccgaacactaacgcgcatgatttataatgaggataataagtggatggtccaaactgccactgatcatgattgggtagcaaatattctgtagttgtatcagtttcagaatgtcctcccattacgtatataacattgtttatggatgccactgctggattacatctaggtttcagaagactcggcatattaacccaagcagcatccccgtggaaccaacgctcaacagatgtgggatttggtagacctcctactacgtataatttattgttagcgggtatcccgctagcatacagtctggggctattcatcggaggaattggaatccaattgtttgatatataatttaccgctatagcattgttatgtatttcattgttcatccatccaccgatgagatatactacttctccaacatgagtacttgtacacatatggaatatatctataatttgatccatgttcataggatactctatgaatggatacttgtatgatttgcgtggttgtttatcacaatgaaatattttggtacagtctagtatccattttacattatttatacctctgggagaaagataatttgacctgattacatttttgataaggagtagcagatttcctaatttatttcttcgctttatataccacttaatgacaaaatcaactacataatcctcatctggaacatttagttcatcgctttctagaataagtttcatagatagataatcaaaattgtctatgatgtcatcttccagttccaaaaagtgtttggcaataaagtttttagtatgacataagagattggatagtccgtattctatacccatcatgtaacactcgacacaatattcctttctaaaatctcgtaagataaagtttatacaagtgtagatgataaattctacagaggttaatatagaagcacgtaataaattgacgacgttatgactatctatatatacctttccagtatacgagtaaataactatagaagttaaactgtgaatgtcaaggtctagacaaaccctcgtaactggatctttatttttcgtgtatttttgacgtaaatgtgtgcgaaagtaaggagataactttttcaatatcgtagaattgactattatattgcctcctatggcatcaataattgttttgaatttcttagtcatagacaatgctaatatattcttacagtacacagtattgacaaatatcggcatttatgtttctttaaaagtcaacatctagagaaaaatgattatctttttgagacataactcccattttttggtattcacccacacgtttttcgaaaaaattagtttttccttccaatgatatattttccatgaaatcaaacggattggtaacattataaatttttttaaatcccaattcagaaatcaatctatccgcgacgaattctatatatgttttcatcatttcacaattcattcctataagtttaactggaagagccgcagtaagaaattcttgttcaatggatactgcatctgttataatagatctaacggtttcttcactcggtggatgcaataaatgtttaaacatcaaacatgcgaaatcgcagtgcagaccctcgtctctactaattagttcgttggaaaacgtgagtccgggcattaggccacgctttttaagccaaaatatggaagcgaatgatccggaaaagaagattccttctactgcagcaaaggcaataagtctctctccataaccggcgctgtcatgtatccacttttgagcccaatcggccttcttttttacacaaggcatcgtttctatggcattaaagagatagtttttttcattactatctttaacataagtatcgatcaaaagactatacatttccgaatgaatgttttcaatggccatctgaaatccgtagaaacatctagcctcggtaatctgtacttctgtacaaaatcgttccgccaaattttcattcactattccgtcactggctgcaaaaaacgccaatacatgttttataaaatatttttcgtctggtgttagtttattccaatcattgatatctttagatatatctacttcttccactgtccaaaatgatgcctctgcctttttatacatgttccagatgtcatgatattggattgggaaaataacaaatctatttggatttggtgcaaggatgggttccataactaaattaacaataacaataaattttttttcagttatctatatgcctgtacttggattttttgtacatcgatatcgccgcaatcactacaataattacaagtattattgatagcattgttattagtactatcataattaaattatctacattcatgggtgctgaataatcgttattatcatcattatcattttgtaattgtgacatcatactagataaatcgtttgcgagattgttgtgggaagcgggcatggaggatgcattatcattattatttaacgccttccatttggattcacaaatgttacgcacattcaacattttatggaaactataattttgtgaaaacaaataacaagaaaactcgtcatcgttcaaatttttaacgatagtaaaccgattaaacgtcgagctaatttctaacgctagcgactctgttggatatgggtttccagatatatatcttttcagttcccctacgtatctataatcatctgtaggaaatggaagatatttccatttatctactgttcctaatatcatatgtggtggtgtagtagaaccattaagcgcgaaagatgttatttcgcatcgtattttaacttcgcaataatttctggttagataacgcactctaccagtcaagtcaatgatattagcctttacagatatattcatagtagtcgtaacgatgactccatcttttagatgcgatactcctttgtatgtaccagaatcttcgtacctcaaactcgatatatttaaacaagttaatgagatattaacgcgttttatgaatgatgatatataaccagaagttttatcctcggtggctagcgctataaccttatcattataataccaactagtgtgattaatatgtgacacgtcagtgtgggtacaaatatgtacattatcgtctacgtcgtattcgatacatccgcatacagccaacaaatataaaatgacaaatactctaacgccgttcgtacccatcttgatgcggtttaataaatgttttgatttcaatttattgtaaaaaaagattcggttttatactgttcgatattctcattgcttatattttcatctatcatctccacacagtcaaatccgtggttagcatgcacctcatcaaccggtaaaagactatcggactcttctatcattataactctagaatatttaatttggtcattattaatcaagtcaattatcttatttttaacaaacgtgagtattttactcattttttataaaaacttttagaaatatacagactctatcgtgtgtctatatcttctttttatatccaatgtatttatgtctgatttttcttcatttatcatatataatggtccaaattctacacgtgcttcggattcatccagatcattaaggttcttataattgtaacatccttctcttccctcttctacatcttccttcttattcttattcttagcgtcacagaatctaccacagcaggatcccatgacgagcgtcatattaaactaatccattttcaattataatatatgattagtaatgaccattaaaataaaaaatattcttcataaccggcaagaaagtgaaaagttcacattgaaactatgtcagtagtatacatcatgaaatgatgatatatatatactctattttggtggaggattatatgatataattcgtggataatcatttttaagacacatttctttattcgtaaatcttttcacgttaaatgagtgtccatattttgcaatttcttcatatgatggcggtgtacgtggacgaggctgctcctgttcttgttgtggtcgccgactgtcgtgtctgcgtttagatccctccattatcgcgattgcgtagatggagtactattttataccttgtaattaaatttttttattaattaaacgtataaaaacgttccgtatctgtatttaagagccagatttcgtctaatagaacaaatagctacagtaaaaataactagaataattgctacacccactagaaaccacggatcgtaatacggcaatcggttttcgataataggtggaacgtatattttatttaaggacttaacaattgtctgtaaaccacaatttgcttccgcggatcctgtattaactatctgtaaaagcatatgttgaccgggcggagccgaacattctccgatatctaatttctgtatatctataatattattaacctccgcatacgcattacagttcttttctagcttggataccgcactaggtacatcgtctagatctattcctatttcctcagcgatagctcttctatccttttccggaagcaatgaaatcacttcaataaatgattcaaccatgagtgtgaaactaagtcgagaattactcatgcatttgttagttattcggagcgcgcaatttttaaactgtcctataacctctcctatatgaatagcacaagtgacattagtagggatagaatgttgagctaatttttgtaaataactatctataaaaagattatacaaagttttaaactctttagtttccgccatttatccagtctgagaaaatgtctctcataataaatttttccaagaaactaattgggtgaagaatggaaacctttaatctatatttatcacagtctgttttggtacacatgatgaattcttccaatgccgtactaaattcgatatctttttcgatttctggatatgtttttaataaagtatgaacaaagaaatggaaatcgtaataccagttatgtttaactttgaaattgttttttattttcttgttaatgattccagccacttgggaaaagtcaaagtcgtttaatgccgatttaatacgttcattaaaaacaaactttttatcctttagatgaattattattggttcattggaatcaaaaagtaagatattatcgggtttaagatctgcgtgtaaaaagttgtcgcaacagggtagttcgtagattttaatgtataacagagccatctgtaaaaagataaactttatgtattgtaccaaagatttaaatcctaatttgatagctaactcggtatctactttatctgccgaatacagtgctaggggaaaaattataatgtttcctctttcatattcgtagttagttctcttttcatgttcgaaaaagtgaaacatgcggttaaaatagtttataacattaatattactgttaataactgccggataaaagtgggatagtaatttcacgaatttgatactgtcctttctctcgttaaacgcctttaaaaaaactttagaagaatatctcaatgagagttcctgaccatccatagtttgtatcaataatagcaacatatgaagaacacgtttatacagagtatgtaaaaatgttaatttatagtttaatcccatggcccacgcacacacgattaattttttttcatctccctttagattgttgtatagaaatttgggtactgtgaactccgccgtagtttccatgggactatataattttgtggcctcgaatacaaattttactacatagttatctatcttaaagactataccatatcctcctgtagatatgtgataaaaatcgtcgtttataggataaaatcgtttatccttttgttggaaaaaggatgaattaatgtaatcattctcttctatctttagtagtgtttccttattaaaattcttaaaataatttaacaatctaactgacggagcccaattttggtgtaaatctaattgggacattatattgttaaaatacaaacagtctcctaatataacagtatctgataatctatggggagacatccattgatattcaggggatgaatcattggcaacacccatttattgtacaaaaagccccaatttacaaacgaaagtccaggtttgatagagacaaacaattaactattttgtctctgtttttaacacctccacagtttttaatttctttagtaatgaaattattcacaatatcagtatcttctttatctaccagagattttactaacttgataaccttggctgtctcattcaatagggtagtaatatttgtatgtgtgatattgatatctttttgaattgtttcttttagaagtgattctttgatggtgccagcatacgaattacaataatgcagaaactcggttaacatgcaggaattatagtaagccaattccaattgttgcctgtgttgtattagagtgtcaatatgagcaatggtgtccttgcgtttctctgatagaatgcgagcagcgattttggcgttatcatttgacgatatttctggaatgacgaatcctgtttctactaactttttggtaggacaaagtgaaacaatcaagaagatagcttctcctcctatttgtggaagaaattgaactcctctagatgatctactgacgatagtatctccttgacagatattggaccgaattacagaagtacctggaatgtaaagccctgaaaccccctcattttttaagcagattgttgccgtaaatcctgcactatgcccaagatagagagctcctttggtgaatccatctctatgtttcagtttaaccaagaaacagtcagctggtctaaaatttccatctctatctaatacagcatctaacttgatgtcaggaactatgaccggtttaatgttatatgtaacattgagtaaatccttaagttcataatcatcactgtcatcagttatgtacgatccaaacaatgtttctaccggcatagtggatacgaagatgctatccatcagaatgtttccctgattagtattttctatatagctattcttctttaaacgattttccaaatcagtaactatgttcatttttttaggagtaggacgcctagccagtatggaagaggattttctagatcctctcttcaacatctttgatctcgatggaatgcaaaaccccatagtgaaacaaccaacgataaaaataatattgtttttcactttttataattttaccatctgactcatggattcattaatatctttataagagctactaacgtataattctttataactgaactgagatatatacaccggatctatggtttccataattgagtaaatgaatgctcggcaataactaatggcaaatgtatagaacaacgaaattatactagagttgttaaagttaatattttctatgagctgttccaataaattatttgttgtgactgcgttcaagtcataaatcatcttgatactatccagtaaaccgtttttaagttctggaatattatcatcccattgtaaagcccctaattcgactatcgaatatcctgctctgatagcagtttcaatatcgacggacgtcaatactgtaataaaggtggtagtattgtcatcatcgtgataaactacgggaatatggtcgttagtaggtacggtaactttacacaacgcgatatataactttccttttgtaccatttttaacgtagttgggacgtcctgcagggtattgttttgaagaaatgatatcgagaacagatttgatacgatatttgttggattcctgattattcactataatataatctagacagatagatgattcgataaatagagaaggtatatcgttggtaggataatacatccccattccagtattctcggatactctattgatgacactagttaagaacatgtcttctattctagaaaacgaaaacatcctacatggactcattaaaacttctaacgctcctgattgtgtctcgaatgcctcgtacaaggatttcaaggatgccatagattctttgaccaacgatttagaattgcgtttagcatctgatttttttattaaatcgaatggtcggctctctggtttgctaccccaatgataacaatagtcttgtaaagataaaccgcaagaaaatttatacgcatccatccaaataaccctagcaccatcggatgatattaatgtattattatagattttccatccacagttattgggccagtatactgttagcaacggtatatcgaatagattactcatgtaacctactagaatgatagttcgtgtactagtcataatatctttaatccaatctaagaaatttaaaattagattttttacactgttaaagttaacaaaggtattacccggatacgtggatatcatatatggcattggtccattatcagtaatagctccataaactgatacggcgatggtttttatatgtgtttgatctaacgaggaagaaattcgcgcccacaattcatctctagatatgtatttaatatcaaacggtaacacatcaatttcgggacgcgtatatgtttctaaatttttaatccaaatataatgatgacctatatgccctattatcatactgtcaactatagtacacctagagaacttacgatacatctgtttcctgtaatcgttaaattttacaaatctataacatgctaaaccttttgacgacagccattcattaatttctgatatggaatctgtattctcgataccgtatcgttctaaagccagtgctatatctccctgttcgtgggaacgctttcgtataatatcgatcaacggataatctgaagtttttggagaataatatgactcatgatctatttcgtccataaacaatctagacataggaattggaggcgatgatcttaattttgtgcaatgagtcgtcaatcctataacttctaatcttgtaatattcatcatcgacataatactatctatgttatcatcgtatattagtataccatgaccttcttcatttcgtgccaaaatgatatacagtcttaaatagttacgcaatatctcaatagtttcataattgttagctgttttcatcaaggtttgtatcctgtttaacatgatggcgttctataacgtctctattttctatttttaattttttaaatttttaacgatttactgtggctagatacccaatctctctcaaatatttttttagcctcgcttacaagctgtttatctatactattaaaactgacgaatccgtgattttggtaatgggttccgtcgaaatttgccgaagtgatatgaacatattcgtcgtcgactatcaacaattttgtattattctgaatagtgaaaaccttcacagatagatcattttgaacacacaacgcatctagacttttggcggttgccatagaatatacgtcgttcttatcccaattaccaactagaagtctgatcttaactcctctattaatggctgcttctataatggagttgtaaatgtcgggccaatagtagctattaccgtcgacacgtgtagtgggaactatggccaaatgttcaatatctatactagtcttagctgacctgagtttatcaataactacatcggtatctagatctctagaatatcccaataggtgttccggagaatcagtaaagaacactccacctataggattcttaatatgatacgcagtgctaactggcaaacaacaagccgcagagcataaattcaaccatgaattttttgcgctattaaaggctttaaaagtatcaaatcttctacgaagatctgtggccagcgggggataatcagaatatacacctaacgttttaatcgtatgtatagatcctccagtaaatgacgcgtttcctacataacatctttcatcatctgacacccaaaaacaaccgagtagtagtcccacattattttttttatctatattaacggttataaaatttatatccgggcagtgactttgtagctctcccagatttcttttccctcgttcatctagcaaaactattattttaatccctttttcagatgcctcttttagtttatcaaaaataagcgctcccctagtcgtactcagaggattacaacaaaaagatgctatgtatatatatttcttagctagagtgataatttcgttaaaacattcaaatgttgttaaatgatcggatctaaaatccatattttctggtagtgtttctaccagcctacattttgctcccgcaggtaccgatgcaaatggccacatttagttaacataaaaacttatacatcctgttctatcaacgattctagaatatcatcggctatatcgctaaaattttcatcaaagtcgacatcacaacctaactcagtcaatatattaagaagttccatgatgtcatcttcgtctatttctatatccgtatccattgtagattgttgaccgattatcgagtttaaatcattactaatactcaatccttcagaatacaatctgtgtttcattgtaaatttataggcggtgtatttaagttggtagattttcaattatgtattaatatagcaacagtagttcttgctcctccttgattctagcatcctcttcattattttcttctacgtacataaacatgtccaatacgttagacaacacaccgacgatggcggccgctacagacacgaatatgactaaaccgatgaccatttaaaaacccctctctagctttcacttaaactgtatcgatcattcttttagcacatgtataatataaaaacattattctatttcgaatttaggcttccaaaaatttttcatccgtaaaccgataataatatatatagacttgttaatagtcggaataaatagattaatgcttaaactatcatcatctccacgattagagatacaatatttacattctttttgctgtttcgaaactttatcaatacacgttaatacaaacccaggaaggagatattgaaactgaggctgttgaaaatgaaacggtgaatacaataattcagataatgtaaaatcatgattccgtattctgatgatattagaactgctaatggatgtcgatggtatgtatctaggagtatctattttaacaaagcatcgatttgctaatatacaattatccttttgattaattgttattttattcatattcttaaaaggtttcatatttatcaattcttctacattaaaaatttccatttttaatttatgtagccccgcaatactcctcattacgtttcattttttgtctataatatccattttgttcatctcggtacatagattatccaattgagaagcgcatttagtagttttgtacattttaagtttattgacgaatcgtcgaaaactagttatagttaacattttattatttgataccctgatattaatacccctgccgttactattatttataactgatgtaatccacgtaacattggaattaactatcgatagtaatgcatcgacgcttccaaaattgtctattataaactcaccgataatttttttattgcatgttttcatattcattaggattatcaaatctttaatcttattacgattgtatgcgttgatattacaagacgtcattctaaaagacggaggatctccatcaaatgccagacaatcacgtacaaagtacatggaaataggttttgttctattgcgcatcatagatttatatagaacacccgtagaaatactaatttgttttactctataaaatactaatgcatctatttcatcgttttgtataacgtctttccaagtgtcaaattccaaatttttttcattgatagtaccaaattcttctatctctttaactacttgcatagataggtaattacagtgatgcctacatgccgttttttgaaactgaatagatgcgtctagaagcgatgctacgctagtcacaatcaccactttcatatttagaatatatatatgtaaaaatatagtagaatttcattttgtttttttctatgctataaatgaattctcattttgcatctgctcatactccgttttatattaataccaaagaaggaagatatctggttctaaaagccgttaaagtatgcgatgttagaactgtagaatgcgaaggaagtaaagcttcctgcgtactcaaagtagataaaccctcatcgcccgcgtgtgagagaagaccttcgtccccgtccagatgcgagagaatgaataaccctggaaaacaagttccgtttatgaggacggacatgctacaaaatatgttcgcggctaatcgcgataatgtagcttctagacttttgtcctaaaatactattatatccttttcgatattaataaatccgtgtcgtccaggttttttatctctttcagtatgtgaatagataggtattttatctctattcatcatcgaatttaagagatccgataaacattgtttgtattctccagatgtcagcatctgatacaacaatatatgtgcacataaacctctggcacttatttcatgtaccttccccttatcactaaggagaatagtatttgagaaatatgtatacatgatattatcatgaattagatatacagaatttgtaacactctcgaaatcacacgatgtgtcggcgttaagatctaatatatcactcgataacacattttcatctagatacactagacattttttaaagctaaaatagtctttagtagtaacagtaactatgcgattattttcatcgatgatacatttcatcggcatattattacgcttaccatcaaagactataccatgtgtatatctaacgtattctagcatggttgccatacgcgcattaaacttttcaggatctttggatagatcttccaatctatctatttgagaaaacatttttatcatgttcaatagttgaaacgtcggatccactatatagatattatctataaagattttaggaactacgttcatggtatcctggcgaatattaaaactatcaatgatatgattatcgttttcatcttttatcaccatatagtttctaagatatgggattttacttaatataatattatttcccgtgataaattttattagaaaggccaaatctataagaaaagtcctagaattagtctgaagaatatctatatcgccgtatagtatatttggattaattagatatagagaatatgatccgtaacatatacaacttttattatggcgtctaagatattcttccatcaacttattaacatttttgactagggaagatacattatgacgtcccattacttttgccttgtctattactgcgacgttcatagaatttagcatatctcttgccaattcttccattgatgttacattataagaaattttagatgaaattacatttggagctttaatagtaagaactcctaatatgtccgtgtatgtggtcactaatacagattgtagttctataatcgtaaataatttacctatattatatgtttgagtctgtttagaaaagtagctaagtatacgatcttttatttctgatgcagatgtattaacatcggaaaaaaatctttttttattcttttttactaaagatacaaatatgtctttgttaaaaacagttattttctgaatatttctagcttgtaattttaacatatgatattcgttcacactaggtactctgcctaaataggtttctataatctttaatgtaatattaggaaaagtattctgatcaggattcctattcattttgaggatttaaaactctgattattgtctaatatggtctctacgcaaactttttcacagagcgatagagtttttgataactcgtttttcttaagaaatataaaactactgtctccagagctcgctctatcttttattttatctaattcgatacaaactcctgatactggttcagaaagtaattcattaattttcagtcctttatagaagatatttaatatagataatacaaaatcttcagtttttgatatcgatctgattgatcctagaactagatatattaataacgtgctcattaggcagtttatggcagcttgataattagatatagtatattccagttcatatttattagataccgcattgcccagattttgatattctatgaattcctctgaaaataaatccaaaataactagacattctattttttgtggattagtgtactctcttccctctatcatgttcactactggtgtccacgatgataaatatctagagggaatataatatagtccataggatgccaatctagcaatgtcgaataactgtaattttattcttcgctcttcattatgaattgattcttgaggtataaacctaacacaaattatattattagacttttcgtatgtaatgtctttcatgttataagtttttaatcctggaatagaatctattttaatgaggcttttaaacgcagagttctccaacgagtcaaagcataatactctgttgtttttcttatatacgatgttacgattttcttctttgaatggaataggtttttgaattagtttataattacaacataatagataaggaagtgtgcaaatagtacgcggaaaaaacataatagctcccctgttttcatccatggttttaagtaaatgatcactggcttctttagtcaatggatattcgaacattaaccgtttcatcatcattggacagaatccatatttcttaatgtaaagagtgatcaaatcattgtgtttattgtaccatcttgttgtaaatgtgtattcggttatcggatctgctcctttttctattaaagtatcgatgtcgatctcgtctaagaattcaactatatcgacatatttcatttgtatacacataaccattactaacgtagaatgtataggaagagatgtaacgggaacagggtttgttgattcgcaaactattctaatacataattcttctgttaatacgtcttgcacgtaatctattatagatgccaagatatctatataattattttgtaagatgatgttaactatgtgatctatataagtagtgtaataattcatgtatttcgatatatgttccaactctgtctttgtgatgtctagtttcgtaatatctatagcatcctcaaaaaatatattcgcatatattcccaagtcttcagttctatcttctaaaaaatcttcaacgtatggaatataataatctattttacctcttctgatatcattaatgatatagtttttgacactatcttctgtcaattgattcttattcactatatctaagaaacggatagcgtccctaggacgaactactgccattaatatctctattatagcttctggacataattcatctattataccagaattaatgggaactattccgtatctatctaacatagttttaagaaagtcagaatctaagacttgatgttcatatattggttcatacatgaaatgatctctattgatgatagtgactatttcattctctgaaaattggtaactcattctatatatgctttccttgttgatgaaggatagaatatactcaatagaatttgtaccaacaaactgttctcttatgaatcgtatatcatcatctgaaataatcatgtaaggcatacatttaacaattagagacttgtctcctgttatcaatatactattcttgtgataatttatgtgtgaggcaaatttgtccacgttctttaattttgttatagtagatatcaaatccaatggagctacagttcttggcttaaacagatatagtttttctggaacaaattctacaacattattataaaggactttgggtaaataagtgggatgaaatcctattttaattaatgcgatagccttgtcctcgtgcagatatccaaacgcttttgtgatagtatggcattcattgtctagaaacgctctacgaatatctgtgacagatatcatctttagagaatatactagtcgcgttaatagtactacaatttgtattttttaatctatctcaataaaaaaattaatatgtatgattcaatgtataactaaactactaactgttattgataactagaatcagaatctaatgatgacgtacccaagaagtttatctactgccaatttagctgcattatttttagcatctcgtttagattttccatctgccttatcgaatactcttccgtcgatatctacacaggcataaaatgtaggagagttactaggcccaactgattcaatacgaaaagaccaatctctcttagttatttggcagtactcattaataacggtgacagggttagcatctttccaatcaataatttttttagccggaataacatcatcaaaagacttatgatcctctctcattgatttttcgcgggatacatcatctattatgacgtcagccataacatcagcatccggcttatccgcctccgttgtcataaaccaacgaggaggaatatcgtcggagctgtacaccatagcactacgttgaagatcgtacagagctttattaacttctcgcttctccatattaagttgtctagttagttgtgcagcagtagctccttcgattccaatggttttaatagcctcacacacaatctctgcgttagaacgttcgtcgatatagattttagacatttttagagagaactaacacaaccagcaataaaactgaacctactttatcatttttttattcatcatcctctggtggttcgtcgttcctatcaaatgtagctctgattaacccgtcatctataggtgatgctggttctggagattctggaggagatggattattatctggaagaatctctgttatttccttgttttcatgtatcgattgcgttgtaacattaagattgcgaaatgctctaaatttgggaggcttaaagtgttgtttgcaatctctacacgcgtgtctaactagtggaggttcgtcagctgctctagtttgaatcatcatcggcgtagtattcctacttttacagttaggacacggtgtattgtatttctcgtcgagaacgttaaaataatcgttgtaactcacatcctttattttatctatattgtattctactcctttcttaatgcattttataccgaataagagatagcgaaggaattctttttcggtgccgctagtacccttaatcatatcacatagtgttttatattccaaatttgtggcaatagacggtttatttctatacgatagtttgtttctggaatcctttgagtattctataccaatattattctttgattcgaatttagtttcttcgatattagattttgtattacctatattcttgatgtagtactttgatgatttttccatggcccattctattaagtcttccaagttggcatcatccacatattgtgatagtaattctcggatatcagtagcggctaccgccattgatgtttgttcattggatgagtaactactaatgtatacattttccatttataacacttatgtattaactttgttcatttatattttttcattattatgttgatattaacaaaagtgaatatatatatatgttaataattgtattgtggttatacggctacaattttataatgagtgaaagtcagtgtccgatgatcaatgacgatagctttactctgaaaagaaagtatcaaatcgatagtgcggagtcaacaataaaaatggataagaagaggataaagtttcagaatagagccaaaatggtaaaagaaataaatcagacaataagagcagcacaaactcattacgagacattgaaactaggatacataaaatttaagagaatgattaggactactactctagaagatatagcaccatctattccaaataatcagaaaacttataaactattctcggacatttcagccatcggcaaagcatcacagaatccgagtaagatggtatatgctctgctgctttacatgtttcccaatttgtttggagatgatcatagattcattcgttatagaatgcatccaatgagtaaaatcaaacacaagatcttctctcctttcaaacttaatcttattagaatattagtggaagaaagattctataataatgaatgcagatctaataaatggaaaataattggaacacaagttgataaaatgttgatagctgaatctgataaatatacaatagatgcaaggtataacctaaaacccatgtatagaatcaagggagaatctgaagaagataccctcttcatcaaacagatggtagaacaatgtgtgacatcccaggaattggtggaaaaagtgttgaagatactgtttagagatttgttcaagagtggagaatacaaagcgtacagatacgatgatgatgtagaaaatggattcattggattggatacactaaaattaaacattgttcatgatatagttgaaccatgtatgcctgttcgtaggccagtggctaagatactgtgtaaagaaatggtaaataaatactttgagaatccgctacatattattggtaaaaatcttcaagagtgcattgactttgttagtgaataggcatttcatctttctccaatactaattcaaattgttaaattaataatggatagtataaatagttattagttataagatagtaaaaataattattagaataagagtgtagtatcatagataactctcttctataaaaatggattttattcgtagaaagtatcttatatacacagtagaaaataatatagattttttaaaggatgatacattaagtaaagtaaacaattttaccctcaatcatgtactagctctcaagtatctagttagcaattttcctcaacacgttattactaaggatgtattagctaataccaatttttttgttttcatacatatggtacgatgttgtaaagtgtacgaagcggttttacgacacgcatttgatgcacccacgttgtacgttaaagcattgactaagaattatttatcgtttagtaacacaatacaatcgtacaaggaaaccgtgcataaactaacacaagatgaaaaatttttagaggttgccgaatacatggacgaattaggagaacttataggcgtaaattatgacttagttcttaatccattatttcacggaggggaacccatcaaagatatggaaatcatttttttaaaactgtttaagaaaacagacttcaaagttgttaaaaaattaagtgttataagattacttatttgggcatacctaagcaagaaagatacaggcatagagtttgcggataatgatagacaagatatatatactctatttcaacaaactggtagaatcgtccatagcaatctaacagaaacgtttagagattatatctttcccggagataagactagctattgggtgtggttaaacgaaagtatagctaatgatgcggatatcgttcttaatagacacgccattaccatgtatgataaaattcttagttatatatactctgagataaaacaaggacgcgttaataaaaacatgcttaagttagtttatatctttgagcctgaaaaagatatcagagaacttctgctagaaatcatatatgatattcctggagatatcctatctattattgatgcaaaaaacgacgattggaaaaaatattttattagtttttataaagctaattttattaacggtaatacatttattagtgatagaacgtttaacgaggacttattcagagttgttgttcaaatagatcccgaatatttcgataatgaacgaattatgtctttattctctacgagtgctgcggacattaaacgatttgatgagttagatattaataacagttatatatctaatataatttatgaggtgaacgatatcacattagatacaatggatgatatgaagaagtgtcaaatctttaacgaggatacgtcgtattatgttaaggaatacaatacatacctgtttttgcacgagtcggatcccatggtcatagagaacggaatactaaagaaactgtcatctataaaatccaagagtagacggctgaacttgtttagcaaaaacattttaaaatattatttagacggacaattggctcgtctaggtcttgtgttagatgattataaaggagacttgttagttaaaatgataaaccatcttaagtctgtggaggatgtatccgcattcgttcgattttctacagataaaaaccctagtattcttccatcgctaatcaaaactattttagctagttataatatttccatcatcgtcttatttcaaaggtttttgagagataatctatatcatgtagaagaattcttggataaaagcatccatctaaccaagacggataagaaatatatacttcaattgataagacacggtagatcatagaacagaccaaatatattattaataatttggtatatacatagatataattatcacacatttttgataaatgggaactgctgcaacaattcagactcccaccaaattaatgaataaagaaaatgcagaaatgattttggaaaaaattgttgatcatatagttatgtatattagtgacgaatcaagtgattcagaaaataatcctgaatatattgattttcgtaacagatacgaagactatagatctctcattataaaaagtgatcacgagtttgtaaagctatgtaaaaatcatgcggagaaaagttctccagaaacgcaacaaatgattatcaaacacatatacgaacaatatcttattccagtatctgaagtactattaaaacctataatgtccatgggtgacataattacatataacggatgtaaagacaatgaatggatgctagaacaactctctaccctaaactttaacaatctccgcacatggaactcatgtagcataggcaatgtaacgcgtctgttttatacattttttagttatctgatgaaagataaactaaatatataagtataatcccattctaatactttaacctgatgtattagcatcttattagaatattaacctaactaaaagacataacataaaaactcattacatagttgataaaaagcggtaggatataaatattatggctgccaccgttccgcgttttgacgacgtgtacaaaaatgcacaaagaagaattctagatcaagaaacattttttagtagaggtctaagtagaccgttaatgaaaaacacatatctatttgataattacgcgtatggatggataccagaaactgcaatttggagtagtagatacgcaaacttagatgcaagtgactattatcccatttcgttgggattacttaaaaagttcgagtttctcatgtctctatataaaggtcctattccagtatacgaagaaaaagtaaatactgaattcattgctaatggatctttctccggtagatacgtatcatatcttagaaagttttctgctcttccaacaaacgagtttattagttttttgttactgacttccattccaatctataatatcttgttctggtttaaaaatactcagtttgatattactaaacacacattattcagatacgtctatacagataatgccaaacacctggcgttggctaggtatatgtatcaaacaggagactataagcctttgtttagtcgtctcaaagagaattatatatttaccggtcccgttccaatatgtatcaaagatatagatcaccctaatcttagtagagcaagaagtccatccgattatgagacattagctaatattagtactatattgtactttaccaagtatgatccggtattaatgtttttattgttttacgtacctgggtattcaattactacaaaaattactccagccgtagaatatctaatggataaactgaatctaacaaagagcgacgtacaactgttgtaaattattttatgcttcgtaaaatgtaggttttgaaccaaacattctttcaaagaatgagatgcataaaactttattatccaatagattgactatttcggacgtcaatcgtttaaagtaaacttcgtaaaatattctttgatcactgccgagtttaaaacttctatcgataattgtttcatatgttttaatatttacaagttttttggtccatggtccattaggacaaatatatgcaaaataatatcgttctccaagttctatagtctctggattatttttattatattcagtaaccaaatacatattagggttatctgcggatttataatttgagtgatgcattcgactcaacataaataattctagaggagacgatctactatcaaattcggatcgtaaatctgtttctaaagaacggagaatatctatacatacctgattagaattcatccgtccttcagacaacatctcagacagtctggttttgtacatcttaatcatattcttatgaaacttggaaacatctcttctagtttcactagtacctttattaattctctcaggtacagattttgaattcgacgatgctgagtatttcatcgttgtatatttcttcttcgattgcataatcagattcttatataccgcctcaaactctattttaaaattattaaacaatactctattattaatcagtcgttctaactctttcgctatttctatagacttatctacatcttgactgtctatctctgtaaacacggagtcggtatctccatacacgctacgaaaacgaaatctgtaatctataggcaacgatgttttcacaatcggattaatatctctatcgtccatataaaatggattacttaatggattggcaaaccgtaacataccgttagataactctgctccatttagtaccgattctagatacaagatcattctacgtcctatggatgtgcaactcttagccgaagcgtatgagtatagagcactatttctaaatcccatcagaccatatactgagttggctactatcttgtacgtatattgcatggaatcatagatggccttttcagttgaactggtagcctgttttagcatctttttatatctggctctctctgccaaaaatgttcttaatagtctaggaatggttccttctatcgatctatcgaaaattgctatttcagagatgaggttcggtagtctaggttcacaatgaaccgtaatatatctaggaggtggatatttctgaagcaatagctgattatttatttcttcttccaatctattggtactaacaacgacaccgactaatgtttccggagatagatttccaaagatacacacattaggatacagactgttataatcaaagattaatacattattactaaacattttttgttttggagcaaataccttaccgccttcataaggaaacttttgttttgtttctgatctaactaagatagttttagtttccaacaatagctttaacagtggacccttgatgactgtactcgctctatattcgaataccatggattgaggaagcacatatgttgacgcacccgcgtctgtttttgtttctactccataatactcccacaaatactgacacaaacaagcatcatgaatacagtatctagccatatctaaagctatgtttagattataatccttatacatctgagctaaatcaacgtcatcctttccgaaagataatttatatgtatcattaggtaaagtaggacataatagtacgactttaaatccattttcccaaatatctttacgaattactttacatataatatcctcatcaacagtcacataattacctgtggttaaaacctttgcaaatgcagcggctttgcctttcgcgtctgtagtatcgtcaccgatgaacgtcatttctctaactcctctatttaatactttacccatgcaactgaacgcgttcttggatatagaatccaatttgtacgaatccaatttttcaaatttttgaatgaatgaatatagatcgaaaaatatagttccattattgttattaacgtgaaacgtagtattggccatgccgcctactcccttatgactagactgatttctctcataaatacagagatgtacagcttcctttttgtccggagatctaaagataattttctctcctgttaataactctagacgattagtaatatatctcagatcaaagttatgtccgttaaaggtaacgacgtagtcgaacgttagttccaacaattgtttagctattcgtaacaaaactatttcagaacatagaactagttctcgttcgtaatccatttccattagtgactgtatcctcaaacatcctctatcgacggcttcttgtatttcctgttccgttaacatctcttcattaatgagcgtaaacaataatcgtttaccacttaaatcgatataacagtaacttgtatgcgagattgggttaataaatacagaaggaaacttcttatcgaagtgacactctatatctagaaataagtacgatcttgggatatcgaatctaggtatttttttagcgaaacagttacgtggatcgtcacaatgataacatccattgttaatctttgtcaaatattgctcgtccaacgagtaacatccgtctggagatatcccgttagaaatataaaaccaactaatattgagaaattcatccatggtggcattttgtatgctgcgtttctttggctcttctatcaaccacatatctgcgacggagcattttctatctttaatatctagattataacttattgtctcgtcaatgtctatagttctcatctttcccaacggcctcgcattaaatggaggaggagacaatgactgatatatttcgtccgtcactacgtaataaaagtaatgaggaaatcgtataaatacggtctcaccatttcgacatctggatttcagatataaaaatctgttttcaccgtgactttcaaaccaattaatgcaccgaacatccatttatagaatttagaaatatattttcatttaaatgaatcccaaacattggggaagagccgtatggaccattatttttatagtactttcgcaagcgggtttagacggcaacatagaagcgtgtaaacgaaaactatatactatagttagcactcttccatgtcctgcatgtagacggcacgcgactatcgctatagaggacaataatgtcatgtctagcgatgatctgaattatatttattattttttcatcagattatttaacaatttggcatctgatcccaaatacgcgatcgatgtgacaaaggttaaccctttataaacttaacccattataaaacttatgattagtcacaactgaaataaccgcgtgattattttttggtataattctacacggcatggtttctgtgactatgaattcaacccccgttacattagtgaaatctttaacaaacagcaagggttcgtcaaagacataaaactcattgtttacaatcgaaatagaccccctatcacacttaaaataaaaaatatccttatcctttaccaccaaataaaattctgattggtcaatgtgaatgtattcacttaacagttccacaaatttatttattaactccgaggcacatacatcgtcggtattttttatggcaaactttactcttccagcatccgtttctaaaaaaatattaacgagttccatttatatcatccaatattattgaaatgacgttgatggacagatgatacaaataagaaggtacggtacctttgtccaccatctcctccaattcatgctctattttgtcattaactttaatgtatgaaaacagtacgccacatgcttccatgacagtgtgtaacactttggatacaaaatgtttgacattagtataattgttcaagactgtcaatctataatagatagtagctataatatattctatgatggtattgaagaagatgacaaccttggcatattgatcatttaacacagacatggtatcaacagatagcttgaatgaaagagaatcagtaattggaataagcgtcttctcgatagagtgtccgtataccaacatgtctgatattttgatgtattccattaaattatttagttttttctttttattctcgttaaacagcatttctgtcaacggaccccaacatcgttgaccgattaagttttgattgatttttccgtgtaaggcgtatctagtcagatcgtatagcctatccaataatccatcatctgtgcgtagatcacatcgtacactttttaattctctatagaagagcgacagacatctggagcaattacagacagcaatttctttattctctacagatgtaagatacttgaagacattcctatgatgatgcagaattttggataacacggtattgatggtatctgttaccataattcctttgatggctgatagtgtcagagcacaagatttccaatctttgacaatttttagcaccattatctttgttttgatatctatatcagacagcatggtgcgtctgacaacacagggattaagacggaaagatgaaatgattctctcaacatcttcaatagataccttgctattttttctggcattatctatatgtgcgagaatatcctctagagaatcagtatcctttttgatgatagtggatctcaatgacatgggacgtttaaaccttcttattctatcaccagattgcatggtgatttgtcttctttcttttatcataatgtaatctctaaattcatcggcaaattgtctatatctaaaatcataatatgagatgtttacctctacaaatatctgttcgtccaatgttagagtatttacatcagttttgtattccaaattaaacatggcaacggatttaattttatattcctctattaagtcctcgtcgataataacagaatgtagataatcatttaatccatcgtacatggttggaagatgcttgttgacaaaatctttaattgtcttgatgaaggtgggactatatctaacatcttgattaataaaatttataacattgtccataggatactttgtaactagttttatacacatctcttcatcggtaagtttagacagaatatcgtgaacaggtggtatattatattcatcagatatacgaagaacaatgtccaaatctatattgtttaatatattatatagatgtagcgtagctcctacaggaatatctttaactaagtcaatgatttcatcaaccgttagatctattttaaagttaatcatataggcattgatttttaaaaggtatgtagccttgactacattctcattaattaaccattccaagtcactgtgtgtaagaagattatattctatcataagcttgactacatttggtcccgataccattaaagaattcttatgatataaggaaacagcttttaggtactcatctactctacaagaattttggagagccttaacgatatcagtgacgtttattatttcaggaggaaaaaacctaacattgagaatatcggaattaatagcttccagatacagtgattttggcaatagtccgtgtaatccataatccagtaacacgagctggtgcttgctagacaccttttcaatgtttaatttttttgaaataagctttgataaagccttcctcgcaaattccggatacatgaacatgtcggcgacatgattaagtattgttttttcattattttctcaataccccaatagatgatagaatatcacccaatgcgtccatgttgtctatttccaacaggtcgctatatccaccaatagaagtttttccaaaaaagattctaggaacagttctaccaccagtaatttgttcaaaatagtcacgcaattcattttcgggtttaaattctttaatatcgacaatttcatacgctcctcttttgaaactaaacttatttagaatatccagtgcatttctacaaaaaggacatgtatacttgacaaaaattgtcactttgttattggccaacctttgttgtacaaattcctcggccattttaatatttaagtgatataaaactatctcgacttatttaactctttagtcgagatatatggacgcagatagctatatgatagccaactacagaaggcaaacgctataaaaaacataattacgacgagcatatttataaatatttttattcagcattacttgatatagtaatattaggcacagtcaaacattcaaccactctcgatacattaactctctcattttctttaacaaattctgcaatatcttcgtaaaaagattcttgaaactttttagaatatctatcgactctagatgaaatagcgttcgtcaacatactatgttttgtatacataaaggcgcccattttaacagtttctagtgacaaaatgctagcgatcctaggatcctttagaatcacatagattgacgattcgtctctcttagtaactctagtaaaataatcatacaatctagtacgcgaaataatattatccttgacttgaggagatctaaacaatctagttttgagaacatcgataagttcatcgggaatgacatacatactatctttaatagaactcttttcatccagttgaatggattcgtccttaaccaactgattaatgagatcttctattttatcattttccagatgatatgtatgtccattaaagttaaattgtgtagcgcttctttttagtctagcagccaatactttaacatcactaatatcgatatacaaaggagatgatttatctatggtattaagaattcgtttttcgacatccgtcaaaaccaattcctttttgcctgtatcatccagttttccatcctttgtaaagaaattattttctactagactattaataagactgataaggattcctccataattgcacaatccaaactttttcacaaaactagactttacaagatctacaggaatgcgtacttcaggttttttagcttgtgattttttcttttgcggacattttctagtaaccaactcatctaccatttcattgattttagcagtgaaataagctttcaatgcacgggcactgatactattgaaaacgagttgatcttcaaattccgccatttaagttcaccaaacaacttttaaatacaaatatatcaatagtagtagaataagaactataaaaaaaataataattaaccaataccaaccccaacaaccggtattattagttgatgtgactgttttctcatcacttagaacagatttaacaatttctataaagtctgtcaaatcatcttccggagaccccataaatacaccaaatatagcggcgtacaacttatccatttatacattgaatattggcttttctttatcgctatcttcatcatattcatcatcaatatcaacaagtcccagattacgagccagatcttcttctacattttcagtcattgatacacgttcactatctccagagagtccgataacgttagccaccacttctctatcaatgattagtttcttgagcgcgaaagtaatttttgtttccgttccggatctatagaagacgataggtgtgataattgccttagccaattgtctttctcttttactgagtgattctagttcaccttctatagatctgagaatggatgattctccagtcgaaacatattctaccatggatccgtttaatttgttgatgaagatggattcatccttaaatgttttctctgtaatagtttccaccgaaagactatgcaaagaatttggaatgcgttccttgtgcttaatgtttccatagacggcttctagaagttgatacaacataggactagccgcggtaacttttatttttagaaagtatccatcgcttctatcttgtttagatttatttttataaagtttagtctctccttccaacataataaaagtggaagtcatttgactagataaactatcagtaagttttatagagatagacgaacaattagcgtattgagaagcatttagtgtaacgtattcgatacattttgcattagatttactaatcgattttgcatactctataacacccgcacaagtctgtagagaatcgctagatgcagtaggtcttggtgaagtttcaactctcttcttgattaccttactcatgattaaacctaaataattgtactttgtaatataatgatatatattttcactttatctcatttgagaataaaaatgtttttgtttaaccactgcatgatgtacagatttcggaatcgcaaaccaccagtggttttattttatccttgtccaatgtgaattgaatgggagcggatgcgggtttcgtacgtagatagtacattcccgtttttagaccgagactccatccgtaaaaatgcatactcgttagtttggaataactcggatctgctatatggatattcatagattgactttgatcgatgaaggctcccctgtctgcagccatttttatgatcgtcttttgtggaatttcccaaatagttttataaactcgcttaatatcttctggaaggtttgtattctgaatggatccaccatctgccataatcctattcttgatctcatcattccataattttctctcggttaaaactctaaggagatgcggattaactacttgaaattctccagacaatactctccgagtgtaaatattactggtatacggttccaccgactcattatttcccaaaatttgagcagttgatgcagtcggcataggtgccaccaataaactatttctaagaccgtatgttctgattttatcttttagaggttcccaattccaaagatccgacggtacaacattccaaagatcatattgtagaataccgttactggcgtacgatcctacatatgtatcgtatggtccttccttctcagctagttcacaactcgcctctaatgcaccgtaataaatggtttcgaagatcttcttatttagatcttgtgcttccaggctatcaaatggataatttaagagaataaacgcgtccgctaatccttgaacaccaataccgataggtctatgtctcttattagagatttcagcttctggaataggataataattaatatctataattttattgagatttctgacaattactttgaccacatccttcagtttgagaaaatcaaatcgcccatctattacaaacatgttcaaggcaacagatgccagattacaaacggctacctcattagcatccgcatattgtattatctcagtgcaaagattactacacttgatagttcctaaattttgttgattactctttttgttacacgcatccttataaagaatgaatggagtaccagtttcaatctgagattctataatcgctttccagacgactcgagcctttattatagatttgtatctcctttctctttcgtatagtgtatacaatcgttcgaactcgtctccccaaacattgtccaatccaggacattcatccggacacatcaacgaccactctccgtcatccttcactcgtttcataaagagatcaggaatccaaagagctataaatagatctctggttctatgttcctcgtttcctgtattctttttaagatcgaggaacgccataatatcagaatgccacggttccaagtatatggccataactccaggccgtttgtttcctccctgatctatgtatctagcggtgttattataaactctcaacattggaataataccgtttgatataccattggtaccggagatatagcttccactggcacgaatattactaattgatagacctattccccctgccattttagagattaatgcgcatcgttttaacgtgtcatagataccctctatgctatcatcgatcatgttaagtagaaaacagctagacatttggtgacgactagttcccgcattaaataaggtaggagaagcgtgcgtaaaccatttttcagaaagtagattgtacgtctcaatagctgagtctatatcccattgatgaattcctactgcgacacgcattaacatgtgctgaggtctttcaacgatcttgttgtttattttcaacaagtaggatttttccaaagttttaaaaccaaaatagttgtatgaaaagtctcgttcgtaaataataaccgagttgagtttatccttatatttgttaactatatccatggtgatacttgaaataatcggagaatgtttcccatttttaggattaacatagttgaataaatcctccatcacttcactaaatagtttttttgtttccttgtgtagatttgatacggctattctggcggctagaatggcataatccggatgttgtgtagtacaagtggctgctatttcggctgccagagtgtccaattctaccgttgttactccattatatattccttgaataaccttcatagctattttaataggatctatatgatccgtgtttaagccataacataattttctaatacgagacgtgattttatcaaacatgacattttccttgtatccatttcgtttaatgacaaacatttttgttggtgtaataaaaaaattatttaacttttcattaatagggatttgacgtatgtagcgtacaaaatgatcgttcctggtatatagataaagagtcctatatatttgaaaatcgttacggctcgattaaactttaatgattgcatagtgaatatatcattaggatttaactccttgactatcatggcggcgccagaaattaccatcaaaagcattaatacagttatgccgatcgcagttaaaacggttatagcatccaccatttatatctaaaaattagatcaaagaatatgtgacaaagtcctagttgtatactgagaattgacgaaacaatgtttcttacatatttttttcttattagtaactgacttaatagtaggaactggaaagctagacttgattattctataagtatagatacccttccagataatgttctctttgataaaagttccagaaaatgtagaattttttaaaaagttatcttttgctattaccaagattgtgtttagacgcttattattaatatgagtgatgaaatccacaccgcctctagatatcgcctttatttccacattagatggtaaatccaatagtgaaactatctttttaggaatgtatggactcgcgtttagaggagtgaacgtcttgggcgtcggaaaggatgattcgtcaaacgaataaacaatttcacaaatggatgttaatgtattagtaggaaattttttgacgctagtggaattgaagattctaatggatgatgttctacctatttcatccgataacatgttaatttccgacaccaacggttttaatatttcgatgatatacggtagtctctctttcggacttatatagcttattccacaatacgagtcattatatactccaaaaaacaaaataactagtataaaatctgtatcgaatgggaaaaacgaaattatcgacataggtatagaatccggaacattgaacgtattaatacttaattctttttctgtggtaagtaccgataggttattgacattgtatggttttaaatattctataacttgagacttgatagatattagtgatgaattgaaaattatttttatcaccacgtgtgtttcaggatcatcgtcgacgcccgtcaaccaaccgaatggagtaaaataaatatcattaatatatgctctagatattagtatttttattaatcctttgattatcatcttctcgtaggcgaatgattccatgatcaagagtgatttgagaacatcctccggagtattaatgggcttagtaaacagtccatcgttgcaataataaaagttatccaagttaaaggatattatgcattcgtttaaagatatcacctcatctgacggagacaattttttggtaggttttagagactttgaagctacttgtttaacaaagttattcatcgtcgtctactattctatttaattttgtagttaatttatcacatatcacattaattgactttttggtccatttttccatacgtttatattcttttaatcctgcgttatccgtttccgttatatccagggatagatcttgcaagttaaatagaatgctcttaaataatgtcattttcttatccgctaaaaatttaaagaatgtataaacctttttcagagatttgaaactcttaggtggtgtcctagtacacaatatcataaacaaactaataaacattccacattcagattccaacagctgattaacttccacattaatacagcctattttcgctccaaatgtacattcgaaaaatctgaataaaacatcgatgtcacaatttgtattatccaatacagaatgtttgtgattcgtgttaaaaccatcggagaaggaatagaaataaaaattattatagtggtggaattcagttggaatattgcctccggagtcataaaaggatactaaacattgttttttatcataaattacacatttccaatgagacaaataacaaaatccaaacattacaaatctagaggtagaacttttaattttgtctttaagtatatacgataagatatgtttattcataaacgcgtcaaatttttcatgaatcgctaaggagtttaagaatctcatgtcaaattgtcctatataatccacttcggatccataagcaaactgagagactaagttcttaatacttcgattgctcatccaggctcctctctcaggctctattttcatcttgacgacctttggattttcaccagtatgtattcctttacgtgataaatcatcgattttcaaatccatttgtgagaagtctatcgccttagatactttttcccgtagtcgaggtttaaaaaaatacgctaacggtatactagtaggtaactcaaagacatcatatatagaatggtaacgcgtctttaactcgtcggttaactctttcttttgatcgagttcgtcgctactattgggtctgctcaggtgccccgactctactagttccaacatcataccgataggaatacaagacactttgccggcggttgtagatttatcatatttttccactacatatccgttacaatttgttaaaaatttagatacatctatattgctacataatccagctagtgaatatatatgacataataaattggtaaatcctagttctggtattttactaattactaaatctgtatatctttccatttatcatggaaaagaatttaccagatatcttcttttttccaaactgcgttaatgtattctcttacaaatattcacaagatgaattcagtaatatgagtaaaacggaacgtgatagtttctcattggccgtgtttccagttataaaacatagatggcataacgcacacgttgtaaaacataaaggaatatacaaagttagtacagaagcacgtggaaaaaaagtatctcctccatcactaggaaaacccgcacacataaacctaaccgcgaagcaatatatatacagtgaacacacaataagctttgaatgttatagttttctaaaatgtataacaaatacagaaatcaattcgttcgatgagtatatattaagaggactattagaagctggtaatagtttacagatattttccaattccgtaggtaaacgaacagatactataggtgtactagggaataagtatccatttagcaaaattccattggcctcattaactcctaaagcacaacgagagatattttcagcgtggatttctcatagacctgtagttttaactggaggaaccggagtgggtaagacgtcacaggtacccaagttattgctttggtttaattatttatttggtggattctctactctagataaaattactgactttcacgaaagaccagtcattctatctcttcctaggatagctttagttagattgcatagcaataccattttaaaatcattgggatttaaggtactagatggatctcctatttctttacggtacggatctataccggaagaattaataaacaaacaaccaaaaaaatatggaattgtattttctacccataagttatctctaacaaaactatttagttatggcactcttattatagacgaagttcatgagcatgatcaaataggagatattattatagcagtagcgagaaagcatcatacgaaaatagattctatgtttttaatgactgccacattagaggatgaccgagaacggctaaaagtatttttacctaatcccgcatttatacatattcctggagatacactgtttaaaattagcgaggtatttattcataataagataaatccatcttccagaatggcatacatagaagaagaaaagagaaatttagttactgctatacagatgtatactcctcctgatggatcatccggtatagtctttgtggcatccgttgcacagtgtcacgaatataaatcatatttagaaaaaagattaccgtatgatatgtatattattcatggtaaggtcttagatatagacgaaatattagaaaaagtgtattcatcacctaatgtatcgataattatttctactccttatttggaatccagcgttactatacgcaatgttacacacatttatgatatgggtagagtttttgtccccgctccttttggaggatcgcaacaatttatttctaaatctatgagagatcaacgaaaaggaagagtaggaagagttaatcctggtacatacgtctatttctatgatctgtcttatatgaagtctatacagcgaatagattcagaatttctacataattatatattgtacgctaataagtttaatctaacactccccgaagatttgtttataatccctacaaatttggatattctatggcgtacaaaggaatatatagactcgttcgatattagtacagaaacatggaataaattattatccaattattatatgaagatgatagagtatgctaaactttatgtactaagtcctattctcgctgaggagttggataactttgagaggacgggagaattaactagtattgtacgagaagccattttatctctaaatttacgaattaagattttaaattttaaacataaagatgatgatacgtatatacacttttgtaaaatattattcggtgtctataacggaacaaacgctactatatattatcatagacctctaacgggatatatgaatatgatttcagatactatatttgttcctgtagataataactaaaaatcaaactctaatgaccacatctttttttagagatgaaaaattttccacatctccttttgtagacacgactaaacattttgcagaaaaaagtttattagtgtttagataatcgtatacttcatcagtgtagatagtaaatgtgaacagataaaaggtattcttgctcaatagattggtaaattccatagaatatattaatcctttcttcttgagatcccacatcatttcaaccagagacgttttatccaatgatttacctcgtactataccacatacaaaactagattttgcagtgacgtcgtacctggtattcctaccaaacaaaattttacttttagttcttttagaaaattctaaggtagaatctctatttgccaatatgtcatctatggaattaccactagcaaaaaatgatagaaatatatattgatacatcgcagctggttttgatctactatactttaaaaacgaatcagattccataattgcctgtatatcatcagctgaaaaactatgttttacacgtattccttcggcatttctttttaatgatatatcttgtttagacaatgataaagttatcatgtccatgagagacgcgtctccgtatcgtataaatatttcattagatgttagacgcttcattaggggtatacttctataaggtttcttaatcagtccatcattggttgcgtcaagaactactatcggatgttgttgggtatctctagtgttacacatggccttactaaagtttgggtaaataactatgatatctctattaattatagatgcatatatttcattcgtcaaggatattagtatcgacttgctatcgtcattaatacgtgtaatgtaatcatataaatcatgcgatagccaaggaaaatttaaatagatgttcatcatataatcgtcgctataattcatattaatacgttgacattgactaatttgtaatatagcctcgccacgaagaaagctctcgtattcagtttcatcgataaaggataccgttaaatataactggttgccgatagtctcatagtctattaagtggtaagtttcgtacaaatacagaatccctaaaatattatctaatgttggattaatctttaccataactgtataaaatggagacggagtcataactattttaccgtttgtacttactggaatagatgaaggaataatctccggacatgctggtaaagacccaaatgtctgtttgaagaaatccaatgttccaggtcctaatctcttaacaaaaattacgatattcgatcccgatatcctttgcattctatttaccagcatatcacgaactatattaagattatctatcatgtctattctcccaccgttatataaatcgcctccgctaagaaacgttagtatatccatacaatggaatacttcatttctaaaatagtattcgttttctaattctttaatgtgaaatcgtatactagaaagggaaaaattatctttgagttttccgttagaaaagaaccacgaaactaatgttctgattgcgtccgattccgttgctgaattaatggatttacaccaaaaactcatataacttctagatgtagaagcattcgctaaaaaattagtagaatcaaaggatataagtagatgttccaacaagtgagcaattcccaagatttcatctatatcattctcgaatccgaaattagaaattcccaagtagatatcctttttcatccgatcgttgatgaaaatacgaactttattcggtaagacaatcatttactaaggagtaaaataggaagtaatgttcgtatgtcgttatcatcgtataaattaaaggtgtgttttttaccattaagtgacattataattttaccaatattggaattataatataggtgtatttgcgcactcgcgacggttgatgcatcggtaaatatagctgtatctaatgttctagtcggtatttcatcatttcgctgtctaataatagcgttttctctatctgtttccattacagctgcctgaagtttattggtcggataatatgtaaaataataagaaatacatacgaataacaaaaataaaataagatataataaagatgccatttagagatctaattttgtttaacttgtccaaattcctacttacagaagatgaggaatcgttggagatagtgtcttccttatgtagaggatttgaaatatcttataatgacttgataacttactttccagataggaaataccataaatatatttataaagtatttgaacatgtagatttatcggaggaattaagtatggaattccatgatacaactctgagagatttagtctatcttagattgtacaagtattccaagtgtatacggccgtgttataaattaggagataatctaaaaggcatagttgttataaaggacaggaatatttatattagggaagcaaatgatgacttgatagaatatctcctcaaggaatacactcctcagatttatacatattctaatgagcgcgtccccataactggttcaaaattaattctttgtggattttctcaagttacatttatggcgtatacaacgtcgcatataacaacaaataaaaaggtagatgttctcgtttccaaaaaatgtatagatgaactagtcgatccaataaattatcaaatacttcaaaatttatttgataaaggaagcggaacaataaacaaaatactcaggaagatattttattcggtaacaggtggccaaactccataggtagctttttctatttcggattttagaatttccaaattcaccagcgatttatcggttttggtgaaatccaaggatttattaatgtccacaaatgccatttgttttgtctgtggattgtatttgaaaatggaaacgatgtagttagatagatgcgctgcaaagtttcctattagggttccgcgctttacgtcacccagcatacttgaatcaccatcctttaaaaaaaatgataagatatcaacatggagtatatcatactcggattttaattcttctactgcatcactgacattttcacaaatactacaatacggtttaccgaaaataatcagtacgttcttcatttatgggtatcaaaaacttaaaatcgttactgctggaaaataaatcactgacgatattagatgataatttatacaaagtatacaatggaatatttgtggatacaatgagtatttatatagccgtcgccaattgtgtcagaaacttagaagagttaactacggtattcataaaatacgtaaacggatgggtaaaaaagggagggcatgtaaccctttttatcgatagaggaagtataaaaattaaacaagacgttagagacaagagacgtaaatattctaaattaaccaaggacagaaaaatgttagaattagaaaagtgtacatccgaaatacaaaatgttaccggatttatggaagaagaaataaaggcagaaatgcaattaaaaatcgataaactcacatttcaaatatatttatctgattctgataacataaaaatatcattgaatgagatactaacacatttcaacaataatgagaatgttacattattttattgtgatgaacgagacgcagaattcgttatgtgtctcgaggctaaaacacatttctctaccacaggagaatggccgttgataataagtaccgatcaggatactatgctatttgcatctgctgataatcatcctaagatgataaaaaacttaactcaactgtttaaatttgttccctcggcagaggataactatttagcaaaattaacggcgttagtgaatggatgtgatttctttcctggactctatggggcatctataacacccaccaacttaaacaaaatacaattgtttagtgattttacaatcgataatatagtcactagtttggcaattaaaaattattatagaaagactaactctaccgtagacgtgcgtaatattgttacgtttataaacgattacgctaatttagacgatgtctactcgtatattcctccttgtcaatgcactgttcaagaatttatattttccgcattagatgaaaaatggaatgaatttaaatcatcttatttagaaagcgtgccgttaccctgccaattaatgtacgcgttagaaccacgcaaggagattgatgtttcagaagttaaaactttatcatcttatatagatttcgaaaatactaaatcagatatcgatgttataaaatctatatcctcgatcttcggatattctaacgaaaactgtaacacgatagtattcggcatctataaggataatttactactgagtataaataattcattttactttaacgatagtctgttaataaccaatactaaaagtgataatataataaatataggttactagattaaaaatggtgttccaactcgtgtgctctacatgcggtaaagatatttctcacgaacgatataaattgattatacgaaaaaaatcattaaaggatgtactcgtcagtgtaaagaacgaatgttgtaggttaaaattatctacacaaatagaacctcaacgtaacttaacagtgcaacctctattggatataaactaatatggatccggttaattttatcaagacatatgcgcctagaggttctattatttttattaattataccatgtcattaacaagtcatttgaatccatcgatagaaaaacatgtgggtatttattatggtacgttattatcggaacacttggtagttgaatctacctatagaaaaggagttcgaatagtcccattggatagtttttttgaaggatatcttagtgcaaaagtatacatgttagagaatattcaagttatgaaaatagcagctgatacgtcattaactttattgggtattccgtatggatttggtcataatagaatgtattgttttaaattggtagctgactgttataaaaatgccggtattgatacatcgtctaaacgaatattgggcaaagatatttttctgagccaaaacttcacagacgataatagatggataaagatatatgattctaataatttaacattttggcaaattgattaccttaaagggtgagttaatatgcataactactcctccgttgttttttccctcgttctttttcttaacgttgtttgccatcactctcataatgtaaagatattctaaaatggtaaacttttgcatatcggacgcagaaattggtataaatgttgtaattgtattatttcccgtcaatggactagtcacagctccatcagttttatatcctttagagtatttctcactcgtgtctaacattctagagcattccatgatctgtttatcgttgatattggccggaaagatagattttttattttttattatattactattggcaattgtagatataacttctggtaaatatttttctaccttttcaatctcttctattttcaagccggctatatattctgctatattgttgctagtatcaataccttttctggctaagaagtcatatgtggtattcactatatcagttttaactggtagttccattagcctttccacttctgcagaataatcagaaattggttctttaccagaaaatccagctactataataggctcaccgatgatcattggcaaaatcctatattgtaccagattaatgagagcatatttcatttccaataattctgctagttcttgagacattgatttatttgatgaatctagttggttctctagatactctaccatttctgccgcatacaataacttgttagataaaatcagggttatcaaagtgtttagcgtggctagaatagtgggcttgcatgtattaaagaatgcggtagtatgagtaaaccgttttaacgaattatatagtctccagaaatctgtggcgttacatacatgagccgaatgacatcgaagattgtccaatatttttaatagctgctctttgtccattatttctatatttgactcgcaacaattgtagataccattaatcaccgattcctttttcgatgccggacaatagcacaattgtttagctttggactctatgtattcagaattaatagatatatctctcaatacagattgcactatacattttgaaactatgtcaaaaattgtagaacgacgctgttctgcagccatttaactttaaataatttacaaaaatttaaaatgagcatccgtataaaaatcgataaactgcgccaaattgtggcatatttttcagagttcagtgaagaagtgtctataaatgtagactcgacggatgagttaatgtatatttttgccgccttgggcggatctgtaaacatttgggcaattatacctctaagtgcatcagtgttttaccgaggagccgaaaatattgtgtttaatcttcctgtgtccaaggtaaaatcgtgtttgtgtagttttcacaatgatgccatcatagatatagaacctgatctggaaaataatctagtaaaactttctagttatcatgtagtaagtgtcgattgtaacaaggaactgatgcctattaggacagatactactatttgtctaagtatagatcaaaagaaatcttacgtgtttaattttcacaagtatgaagaaaaatgttgtggtagaaccgtcattcatctagaatggttgttgggctttatcaagtgtattagtcagcatcagcatctggctattatgtttaaagatgacaatattattatgaagactcctggtaatactgatgcgttttccagggaatattctatgactgaatgttctcaagaactacaaaagttttctttcaaaatagctatctcgtctctcaacaaactacgaggattcaaaaagagagtcaatgtttttgaaactagaatcgtaatggataatgacgataacattttaggaatgttgttttcggatagagttcaatcctttaagatcaacatctttatggcgtttttagattaatactttcaatgagataaatatgggtggcggagtaagtgttgagctccctaaacgggatccgcctccgggagtacccactgatgagatgttattaaacgtggataaaatgcatgacgtgatagctcccgctaagcttttagaatatgtgcatataggaccactagcaaaagataaagaggataaagtaaagaaaagatatccagagtttagattagtcaacacaggacccggtggtctttcggcattgttaagacaatcgtataatggaaccgcacccaattgctgtcgcacttttaatcgtactcattattggaagaaggatggaaagatatcagataagtatgaagagggtgcagtattagaatcgtgttggccagacgttcacgacactggaaaatgcgatgttgatttattcgactggtgtcagggggatacgttcgatagaaacatatgccatcagtggatcggttcagcctttaataggagtaatagaactgtagagggtcaacaatcgttaataaatctgtataataagatgcaaacattatgtagtaaagatgctagtgtaccaatatgcgaatcatttttgcattatttacgcgcacacaatacagaagatagcaaagagatgatcgattatattctaagacaacagtctgcggactttaaacagaaatatatgagatgtagttatcccactagagataagttagaagagtcattaaaatatgcggaacctcgagaatgttgggatccagagtgttcgaatgccaatgttaatttcttactaacacgtaattataataatttaggactttgcaatattgtacgatgtaataccagcgtgaacaacttacagatggataaaacttcctcattaagattgtcatgtggattaagcaatagtgatagattttctactgttcccgtcaatagagcaaaagtagttcaacataatattaaacactcgttcgacctaaaattgcatttgatcagtttattatctctcttggtaatatggatactaattgtagctatttaaatgggtgccgcggcaagcatacagacgacggtgaatacactcagcgaacgtatctcgtctaaattagaacaagaagcgaacgctagtgctcaaacaaaatgtgatatagaaatcggaaatttttatatccgacaaaaccatggatgtaacctcactgttaaaaatatgtgctctgcggacgcggatgctcagttggatgctgtgttatcagccgctacagaaacatatagtggattaacaccggaacaaaaagcatacgtgccagctatgtttactgctgcgttaaacattcagacgagtgtaaacactgttgttagagattttgaaaattatgtgaaacagacttgtaattctagcgcggtcgtcgataacaaattaaagatacaaaacgtaatcatagatgaatgttacggagccccaggatctccaacaaatttggaatttattaatacaggatctagcaaaggaaattgtgccattaaagcgttgatgcaattgacgactaaggccactactcaaatagcacctagacaagttgctggtacaggagttcagttttatatgattgttatcggtgttataatattggcagcgttgtttatgtactatgccaagcgtatgttgttcacatccaccaatgataaaatcaaacttattttagccaataaggaaaacgtccattggactacttacatggacacattctttagaacttctccgatggttattgctaccacggatatgcaaaactgaaaatatattgataatattttaatagattaacatggaagttatcgctgatcgtctagacgatatagtgaaacaaaatatagcggatgaaaaatttgtagattttgttatacacggtctagagcatcaatgtcctgctatacttcgaccattaattaggttgtttattgatatactattatttgttatagtaatttatatttttacggtacgtctagtaagtagaaattatcaaatgttgttggtggtgctagtcatcacattaactattttttattactttatactataatagtactagactgacttctaacaaacatctcacctgccataaataaatgcttgatattaaagtcttctatttctaacactattccatctgtggaaaataatactctgacattatcgctaattgacacatcggtgagtgatatgcctataaagtaataatcttctttgggcacatataccagtgtaccaggttctaacaacctatttactggtgctcctgtagcatactttttctttaccttgagaatatccatcgtttgcttggtcaatagcgatatgtgattttttatcaaccactcaaaaaagtaattggagtgttcatatcctctacgggctattgtctcatggccgtgtatgaaatttaagtaacacgactgtggtagatttgttctatagagccgattgccgcaaatagatagaactaccaatatgtctgtacaaatgttaaacattaattgattaacagaaaaaacaatgttcgttctgggaatagaaaccagatcaaaacaaaattcgttagaatatatgccacgtttatacatggaatataaaataactacagtttgaaaaataacagtatcatttaaacatttaacttgcggggttaatctcacaactttactgtttttgaactgttcaaaatatagcatcgatccgtgagaaatacgtttagccgcctttaatagaggaaatcccaccgcctttctggatctcaccaacgacgatagttctgaccagcaactcatttcttcatcatccacctgttttaacatataataggcaggagatagatatccgtcattgcaatattccttctcgtaggcacacaatctaatattgataaaatctccattctcttctctgcatttattatcttgtctcggtggctgattaggctgtggtcttggtttaggccttggtctatcgttgttgaatctattttggtcattaaatctttcatttcttcctggtatatttttatcacctcgtttggttggatttttgtctatattatcgtttgtaacatcggtacgggtattcatttatcacaaaaaaaacttctctaaatgagtctactgctagaaaacctcatcgaagaagataccatattttttgcaggaagtatatctgagtatgatgatttacaaatggttattgccggcgcaaaatccaaatttccaagatctatgctttctatttttaatatagtacctagaacgatgtcaaaatatgagttggagttgattcataacgaaaatatcacaggagcaatgtttaccacaatgtataatataagaaacaatttgggtctaggagatgataaactaactattgaagccattgaaaactatttcttggatcctaacaatgaagttatgcctcttattattaataatacggatatgactgccgtcattcctaaaaaaagtggtaggagaaagaataagaacatggttatcttccgtcaaggatcatcacctatcttgtgcattttcgaaactcgtaaaaagattaatatttataaagaaaatatggaatccgcgtcgactgagtatacacctatcggagacaacaaggctttgatatctaaatatgcgggaattaatgtcctgaatgtgtattctccttccacatccataagattgaatgccatttacggattcaccaataaaaataaactagagaaacttagtactaataaggaactagaatcgtatagttctagccctcttcaagaacccattaggttaaatgattttctgggactattggaatgtgttaaaaagaatattcctctaacagatattccgacaaaggattgattactataaatggagaatgttcctaatgtatactttaatcctgtgtttatagagcccacgtttaaacattctttattaagtgtttataaacacagattaatagttttatttgaagtattcgttgtattcattctaatatatgtattttttagatctgaattaaatatgttcttcatgcctaaacgaaaaatacccgatcctattgatagattacgacgtgctaatctagcgtgtgaagacgataaattaatgatctatggattaccatggatgacaactcaaacatctgcgttatcaataaatagtaaaccgatagtgtataaagattgtgcaaagcttttgcgatcaataaatggatcacaaccagtatctcttaacgatgttcttcgcagatgatgattcattttttaagtatttggctagtcaagatgatgaatcttcattatctgatatattgcaaatcactcaatatctagactttctgttattattattgatccaatcaaaaaataaattagaagctgtgggtcattgttatgaatctctttcagaggaatacagacaattgacaaaattcacagactttcaagattttaaaaaactgtttaacaaggtccctattgttacagatggaagggtcaaacttaataaaggatatttgttcgactttgtgattagtttgatgcgattcaaaaaagaatcctctctagctaccaccgcaatagatcctgttagatacatagatcctcgtcgtgatatcgcattttctaacgtgatggatatattaaagtcgaataaagtgaacaataattaattctttattgtcatcatgaacggcggacatattcagttgataatcggccccatgttttcaggtaaaagtacagaattaattagacgagttagacgttatcaaatagctcaatataaatgcgtgactataaaatattctaacgataatagatacggaacgggactatggacgcatgataagaataattttgaagcattggaagcaactaaactatgtgatgtcttggaatcaattacagatttctccgtgataggtatcgatgaaggacagttctttccagacattgtttaattctgtgagcgtatggcaaacggtaccgagctcggtttggaattagtgaaagcttaaaaattgaaattttattttttttttttggaatataaataagctcgaagtcgaccaccatggtgggtgaggatagcgtgctgatcaccgagaacatgcacatgaaactgtacatggagggcaccgtgaacgaccaccacttcaagtgcacatccgagggcgaaggcaagccctacgagggcacccagaccatgaagatcaaggtggtcgagggcggccctctccccttcgccttcgacatcctggctaccagcttcatgtacggcagcaaaacctttatcaaccacacccagggcatccccgacttctttaagcagtccttccctgagggcttcacatgggagaggatcaccacatacgaagacgggggcgtgctgaccgctacccaggacaccagcctccagaacggctgcctcatctacaacgtcaagatcaacggggtgaacttcccatccaacggccctgtgatgcagaagaaaacactcggctgggaggccagcaccgagatgctgtaccccgctgacagcggcctgagaggccatagccagatggccctgaagctcgtgggcgggggctacctgcactgctccctcaagaccacatacagatccaagaaacccgctaagaacctcaagatgcccggcttctacttcgtggacaggagactggaaagaatcaaggaggccgacaaagagacctacgtcgagcagcacgagatggctgtggccaggtactgcgacctgcctagcaaactggggcacagctgattaattaatttttatcgatctaattcaacaatgtctggagagctcggatccttctgtgagcgtatggcaaacgaaggaaaaatagttatagtagccgcactcgatgggacatttcaacgtaaaccgtttaataatattttgaatcttattccattatctgaaatggtggtaaaactaactgctgtgtgtatgaaatgctttaaggaggcttccttttctaaacgattgggtgaggaaaccgagatagagataataggaggtaatgatatgtatcaatcggtgtgtagaaagtgttacgtcggctcataatattatattttttatctaaaaaactaaaaataaacattgattaaattttaatataatacttaaaaatggatgttgtgtcgttagataaaccgtttatgtattttgaggaaattgataatgagttagattacgaaccagaaagtgcaaatgaggtcgcaaaaaaactgccgtatcaaggacagttaaaactattactaggagaattattttttcttagtaagttacagcgacacggtatattagatggtgccaccgtagtgtatataggatcggctcctggtacacatatacgttatttgagagatcatttctataatttaggagtgatcatcaaatggatgctaattgacggccgccatcatgatcctattttaaatggattgcgtgatgtaactctagtgactcggttcgttgatgaggaatatctacgatccatcaaaaaacaactgcatccttctaagattattttaatttctgatgtgagatccaaacgaggaggaaatgaacctagtacggcggatttactaagtaattacgctctacaaaatgtcatgattagtattttaaaccccgtggcgtctagtcttaaatggagatgcccgtttccagatcaatggatcaaggacttttatatcccacacggtaataaaatgttacaaccttttgctccttcatattcagctgaaatgagattattaagtatttataccggtgagaacatgagactgactcgagttaccaaattagacgctgtaaattatgaaaaaaagatgtactaccttaataagatcgtccgtaacaaagtagttgttaactttgattatcctaatcaggaatatgactattttcacatgtactttatgctgaggaccgtgtactgcaataaaacatttcctactactaaagcaaaggtactatttctacaacaatctatatttcgtttcttaaatattccaacaacatcaactgaaaaagttagtcatgaaccaatacaacgtaaaatatctagcaaaaattctatgtctaaaaacagaaatagcaagagatccgtacgcggtaataaatagaaacgtactactgagatatactaccgatatagagtataatgatttagttactttaataaccgttagacataaaattgattctatgaaaactgtgtttcaggtatttaacgaatcatccataaattatactccggttgatgatgattatggagaaccaatcattataacatcgtatcttcaaaaaggtcataacaagtttcctgtaaattttctatacatagatgtggtaatatctgacttatttcctagctttgttagactagatactacagaaactaatatagttaatagtgtactacaaacaggcgatggtaaaaagactcttcgtcttcccaaaatgttagagacggaaatagttgtcaagattctctatcgccctaatataccattaaaaattgttagatttttccgcaataacatggtaactggagtagagatagccgatagatctgttatttcagtcgctgattaatcaattagtagagatgagataagaacattataataatcaataatatatcttatatcttatatcttatatcttatatcttgtttagaaaaatgctaatattaaaatagctaacgctagtaatccaatcggaagccatttgatatctataatagggtatctaatttcctgatttaaatagcggacagctatattctcggtagctactcgtttggaatcacaaacattatttacatctaatttactatctgtaatggaaacgtttcccaatgaaatggtacaatccgatacattgcattttgttatatttttttttaaagaggctggtaacaacgcatcgcttcgtttacatggctcgtaccaacaataatagggtaatcttgtatctattcctatccgtactatgcttttatcaggataaatacatttacatcgtatatcgtctttgttagcatcacagaatgcataaatttgttcgtccgtcatgataaaaatttaaagtgtaaatataactattatttttatagttgtaataaaaagggaaatttaattgtatactttcggttctttaaaagaaactgacttgataaaaatggctgtaatctctaaggttacgtatagtctatatgatcaaaaagagattaatgctacagatattatcattagtcatgttaaaaatgacgacgatatcggtaccgttaaagatggtagactaggtgctatggatggggcattatgtaagacttgtgggaaaacggaattggaatgtttcggtcactggggtaaagtaagtatttataaaactcatatagttaagcctgaatttatttcagaaattattcgtttactgaatcatatatgtattcactgcggattattgcgttcacgagaaccgtattccgacgatattaacctaaaagagttatcgggacacgctcttaggagattaaaggataaaatattatccaagaaaaagtcatgttggaacagtgaatgtatgcaaccgtatcaaaaaattactttttcaaagaaaaaggtttgtttcgtcaacaagttggatgatattaacgttcctaattctctcatctatcaaaagttaatttctattcatgaaaagttttggccattattagaaattcatcaatatccagctaacttattttatacagactactttcccatccctccgttgattattagaccggctattagtttttggatagatagtatacccaaagagaccaatgaattaacttacttattaggtatgatcgttaagaattgtaacttgaatgctgatgaacaggttatccagaaggcggtaatagaatacgatgatattaaaattatttctaataacactaccagtatcaatttatcatatattacatccggcaaaaataatatgattagaagttatatcgtcgcccgacgaaaagatcagaccgctagatctgtaattggtcccagtacatctatcaccgttaatgaggtaggaatgcccgcatatattagaaatacacttacagaaaagatatttgttaatgcctttacagtggataaagttaaacaactattagcgtcaaaccaagttaaattttactttaataaacgattaaaccaattaacaagaatacgccaaggaaagtttattaaaaataaaatacatttattgcctggtgattgggtagaagtagctgttcaagaatatacaagtattatttttggaagacagccgtctctacatagatacaacgtcatcgcttcatctatcagagctaccgaaggagatactatcaaaatatctcccggaattgccaactctcaaaatgctgatttcgacggggatgaggaatggatgatattagaacaaaatcctaaagctgtaattgaacaaagtattcttatgtatccgacgacgttactcaaacacgatattcatggagcccccgtttatggatctattcaagatgaaatcgtagcagcgtattcattgtttaggatacaagatctttgtttagatgaagtattgaacatcttggggaaatatggaagagagttcgatcctaaaggtaaatgtaaattcagcggtaaagatatctatacttacttgataggtgaaaagattaattatccgggtctcttaaaggatggtgaaattattgcaaacgacgtagatagtaattttgttgtggctatgaggcatctgtcattggctggactcttatccgatcataagtcgaacgtggaaggtatcaactttattatcaagtcatcttatgtttttaagagatatctatctatttacggttttggggtgacattcaaagatctgagaccaaattcgacgttcactaataaattggaggccatcaacgtagaaaaaatagaacttatcaaagaagcatacgccaaatatctcaacgatgtaagagacgggaaaatagttccattatctaaagctttagaggcggactatgtggaatccatgttatccaacttgacaaatcttaatatccgagagatagaagaacatatgagacaaacgctgatagatgatccagataataacctcctgaaaatggccaaagcgggttataaagtaaatcccacagaactaatgtatattctaggtacgtatggacaacaaaggattgatggtgaaccagcagagactcgagtattgggtagagttttaccttactatcttccagactctaaggatccagaaggaagaggttatattcttaattctttaacaaaaggattaacgggttctcaatattacttttcgatgctggttgcaagatctcaatctactgatatcgtctgtgaaacatcacgtaccggaacactggctagaaaaatcattaaaaagatggaggatatggtggtcgacggatacggacaagtagttataggtaatacgctcatcaagtacgccgccaattataccaaaattctaggctcagtatgtaaacctgtagatcttatctatccagatgagtccatgacttggtatttggaaattagtgctctgtggaataaaataaaacagggattcgtttactctcagaaacagaaacttgcaaagaagacattggcgccgtttaatttcctagtattcgtcaaacccaccactgaggataatgctattaaggttaaggatctgtacgatatgattcataacgtcattgatgatgtgagagagaaatacttctttacggtatctaatatagattttatggagtatatattcttgacgcatcttaatccttctagaattagaattacaaaagaaacggctatcactatctttgaaaagttctatgaaaaactcaattatactctaggtggtggaactcctattggaattatttctgcacaggtattgtctgagaagtttacacaacaagccctgtccagttttcacactactgaaaaaagtggtgccgtcaaacaaaaacttggtttcaacgagtttaataacttgactaatttgagtaagaataagaccgaaattatcactctggtatccgatgatatctctaaacttcaatctgttaagattaatttcgaatttgtatgtttgggagaattaaatccagacatcactcttcgaaaagaaacagataggtatgtagtagatataatagtcaatagattatacatcaagagagcagaaataaccgaattagtcgtcgaatatatgattgaacgatttatctcctttagcgtcattgtaaaggaatggggtatggaaacattcattgaggatgaggataatattagatttactgtctacctaaatttcgttgaaccggaagaattgaatcttagtaagtttatgatggttcttccgggtgccgccaacaagggaaagattagtaaattcaagattcctatctctgactatacgggttatgacgacttcaatcaaacaaaaaagctcaataagatgactgtagaactcatgaatctaaaagaattgggttctttcgatttggaaaacgtcaacgtgtatcctggagtatggaatacatacgatatcttcggtatcgaggccgctcgtgaatacttgtgcgaagccatgttaaacacctatggagaagggttcgattatctgtatcagccttgtgatcttctcgctagtttactatgtgctagttacgaaccagaatcagtgaataaattcaagttcggcgcagctagtactcttaagagagctacgttcggagacaataaagcattgttaaacgcggctcttcataaaaagtcagaacctattaacgataatagtagctgccacttttttagcaaggtccctaatataggaactggatattacaaatactttatcgacttgggtcttctcatgagaatggaaaggaaactatctgataagatatcttctcaaaagatcaaggaaatggaagaaacagaagacttttaattcttatcaataacatatttttctatgatctgtcttttaaacgatggattttccacaaatgcgcctctcaagtccctcatagaatgatacacgtataaaaaatatagcataggcaatgactccttatttttagacattagatatgccaaaatcatagccccgcttctatttactcccgcagcacaatgaaccaacacgggctcgtttcgttgatcacatttagataaaaaggcggttacgtcgtcaaaatatttactaatatcggtagttgtatcatctaccaacggtatatgaataatattaatattagagttaggtaatgtatatttatccatcgtcaaatttaaaacatatttgaacttaacttcagatgatggtgcatccatagcatttttataatttcccaaatacacattattggttacccttgtcattatagtgggagatttggctttgtgcatatctccagttgaacgtagtagtaagtatttatacaaacttttcttatccatttataacgtacaaatggataaaactactttatcggtaaacgcgtgtaatttagaatacgttagagaaaaggctatagtaggcgtacaagcagccaaaacatcaacacttatattctttgttattatattggcaattagtgcgctattactctggtttcagacgtctgataatccagtctttaatgaattaacgagatatatgcgaattaaaaatacggttaacgattggaaatcattaacggatagcaaaacaaaattagaaagtgatagaggtagacttctagccgctggtaaggatgatatattcgacttcaaatgtgtggatttcggcgcctattttatagctatgcgattggataagaaaacatatctgccgcaagctattaggcgaggtactggagacgcgtggatggttaaaaaggcggcaaaggtcgatccatctgctcaacaattttgtcagtatttgataaaacacaagtctaataatgttattacttgtggtaatgagatgttaaatgaattaggttatagcggttattttatgtcaccgcattggtgttccgattttagtaatatggaatagtgttagataaatgcggtaacgaatgttcctgtaaggaaccataacagcttagatttaacgttaaagatgagcataaacataataaacaaaattacaatcaaacttataacattaatatcaaacaatccaaaaaatgaaatcagtggagtagtaaacgcgtacataactcctggataacgtttagcagctgccgttcctattctagaccaaaaatttggtttcatgttttcgaaacggtattctgcaacaagtcggggatcgtgttctacatatttggcggcattatccagtatctgcctattgatcttcatttcgttttcgattctggctatttcaaaataaaatcccgatgatagacctccagactttataatttcatctacgatgttcagcgccgtagtaactctaataatataggctgataagctaacatcataccctcctgtatatgtgaatatggcatgatttttgtccattacaagctcggttttaactttattgcctgtaataatttctctcatctgtaggatatctatttttttgtcatgcattgccttcaagacgggacgaagaaacgtaatatcctcaataacgttatcgttttctacaataactacatattctacctttttattttctaactcggtaaaaaaattagaatcccatagggctaaatgtctagcgatatttcttttcgtttcctctgtacacatagtgttacaaaaccctgaaaagaagtgagtatacttgtcatcatttctaatgtttcctccagtccactgtataaacgcataatccttgtaatgatctggatcatccttgactaccacaacatttcttttttctggcataacttcgttgtcctttacatcatcgaacttctgatcattaatatgctcatgaacattaggaaatgtttctgatggaggtctatcaataactggcacaacaataacaggagttttcaccgccgccatttagttattgaaattaatcatatacaactctttaatacgagttatattttcgtctatccattgtttcacatttacatatttcgacaaaaagatataaaatgcgtattccaatgcttctctgtttaatgaattactaaaatatacaaacacgtcactgtctggcaataaatgatatcttagaatattgtaacaatttattttgtattgcacatgttcgtgatctatgagttcttcttcgaatggcataggatctccgaatctgaaaacgtataaataggagttagaataataatatttgagagtattggtaatatataaactctttagcggtataattagtttttttctctcaatttctatttttagatgtgatggaaaaatgactaattttgtagcattagtatcatgaactctaatcaaaatcttaatatcttcgtcacacgttagctctttgaagtttttaagagatgcatcagttggttctacagatggagtaggtgcaacaattttttgttctacacatgtatgtactggagccattgttttaactataatggtgcttgtatcgaaaaactttaatgcagatagcggaagctcttcgccgcgactttctacgtcgtaattgggttctaacgccgatctctgaatggatactagttttctaagttctaatgtgattctctgaaaatgtaaatccaattcctccggcattatagatgtgtatacatcggtaaataaaactatagtatccaacgatcccttctcgcaaattctagtcttaaccaaaaaatcgtatataaccacggagatggcgtatttaagagtggattcttctaccgttttgttcttggatgtcatataggaaactataaagtccgcactactgttaagaatgattactaacgcaactatatagttcaaattaagcattttggaaacataaaataactctgtagacgatacttgactttcgaataagtttgcagacaaacgaagaaagaacagacctctcttaatttcagaagaaaactttttttcgtattcctgacgtctagagtttatatcaataagaaagttaagaattagtcggttaatgttgtatttcattacccaagtttgagatttcataatattatcaaaagacatgataatattaaagataaagcgctgactatgaacgaaatagctatatggttcgctcaagaatatagtcttgttaaacgtggaaacgataactgtatttttaatcacgtcagcggcatctaaattaaatataggtatatttattccacacactctacaatatgccacaccatcttcataataaataaattcgttagcaaaattattaattttagtgaaatagttagcgtcaactttcatagcttccttcaatctaatttgatgctcacacggtgcgaattccactctaacatcccttttccatgcctcaggttcatcgatctctataatatctagttttttgcgtttcacaaacacaggctcgtctctcgcgatgagatctgtatagtaactatgtaaatgataactagatagaaagatgtagctatatagatgacgatcctttaagagaggtataataactttaccccaatcagatagactgttgttatggtcttcggaaaaagaatttttataaatttttccagtattttccaaatatacgtacttaacatctaaaaaatccttaatgataataggaatggataatccgtctattttataaagaaatacatatcgcacattatacttttttttggaaatgggaataccgatgtgtctacataaatatgcaaagtctaaatattttttagagaatcttagttggtccaaattcttttccaagtacggtaatagatttttcatattgaacggtatcttcttaatctctggttctagttccgcattaaatgatgaaactaagtcactatttttataactaacgattacatcacctctaacatcatcatttaccagaatactgatcttcttttgtcgtaaatacatgtctaatgtgttaaaaaaaagatcatacaagttatacgtcatttcatctgtggtattcttgtcattgaaggataaactcgtactaatctcttctttaacagcctgttcaaatttatatcctatatacgaaaaaatagcaaccagtgtttgatcatccgcgtcaatattctgttctatcgtagtgtataacaatcgtatatcttcttctgtgatagtcgatacgttataaaggttgataacgaaaatatttttatttcgtgaaataaagtcatcgtaggattttggacttatattcgcgtctagtagatatgcttttatttttggaatgatctcaattagaatagtctctttagagtccatttaaagttacaaacaactaggaaattggtttatgatgtataatttttttagtttttatagattctttattctatacttaaaaaatgaaaataaatacaaaggttcttgagggttgtgttaaattgaaagcgagaaataatcataaattatttcattatcgcgatatccgttaagtttgtatcgtaatggcgtggtcaattacgaataaagcggatactagtagcttcacaaagatggctgaaatcagagctcatctaaaaaatagcgctgaaaataaagataaaaacgaggatattttcccggaagatgtaataattccatctactaagcccaaaaccaaacgagccactactcctcgtaaaccagcggctactaaaagatcaaccaaaaaggaggaagtggaagaagaagtagttatagaggaatatcatcaaacaactgaaaaaaattctccatctcctggagtcagcgacattgtagaaagcgtggccgctgtagagctcgatgatagcgacggggatgatgaacctatggtacaagttgaagctggtaaagtaaatcatagtgctagaagcgatctctctgacctaaaggtggctaccgacaatatcgttaaagatcttaagaaaattattactagaatctctgcagtatcgacggttctagaggatgttcaagcagctggtatctctagacaatttacttctatgactaaagctattacaacactatctgatctagtcaccgagggaaaatctaaagttgttcgtaaaaaagttaaaacttgtaagaagtaaatgcgtgcacttttttataaagatggtaaactctttaccgataataattttttaaatcctgtatcagacgataatccagcgtatgaggttttgcaacatgttaaaattcctactcatttaacagatgtagtagtatatgaacaaacgtgggaggaggcgttaactagattaatttttgtgggaagcgattcaaaaggacgtagacaatacttttacggaaaaatgcatgtacagaatcgcaacgctaaaagagatcgtatttttgttagagtatataacgttatgaaacgaattaattgttttataaacaaaaatataaagaaatcgtccacagattccaattatcagttggcggtttttatgttaatggaaactatgttttttattagatttggtaaaatgaaatatcttaaggagaatgaaacagtagggttattaacactaaaaaataaacacatagaaataagtcccgatgaaatagttatcaagtttgtaggaaaggacaaagtttcacatgaatttgttgttcataagtctaatagactatataaaccgctattgaaactgacggatgattctagtcccgaagaatttctgttcaacaaactaagtgaacgaaaggtatatgaatgtatcaaacagtttggtattagaatcaaggatctccgaacgtatggagtcaattatacgtttttatataatttttggacaaatgtaaagtccatatctcctcttccatcaccaaaaaagttaatagcattaactatcaaacaaactgctgaagtggtaggtcatactccatcaatttcaaaaagagcttatatggcaacgactattttagaaatggtaaaggataaaaattttttagatgtagtatctaaaactacgttcgatgaattcctatctatagtcgtagatcacgttaaatcatctacggatggatgatatagatctttacacaaataattacaagaccgataaatggaaatggataagcgtatgaaatctctcgcaatgacagctttcttcggagagctaagcacattagatattatggcattgataatgtctatatttaaacgccatccaaacaataccattttttcagtggataaggatggtcagtttatgattgatttcgaatacgataattataaggcttctcaatatttggatctgaccctcactccgatatctggagatgaatgcaagactcacgcatcgagtatagccgaacaattggcgtgtgtggatattattaaagaggatattagcgaatatatcaaaactactccccgtcttaaacgatttataaaaaaataccgcaatagatcagatactcgcatcagtcgagatacagaaaagcttaaaatagctctagctaaaggcatagattacgaatatataaaagacgcttgttaataagtaaatgaaaaaaaactagtcgtttataataaaacacgatatggatgccaacgtagtatcatcttctactattgcgacgtatatagacgctttagcgaagaatgcttcagaattagaacagaggtctaccgcatacgaaataaataatgaattggaactagtatttattaagccgccattgattactttgacaaatgtagtgaatatctctacgattcaggaatcgtttattcgatttaccgttactaataaggaaggtgttaaaattagaactaagattccattatctaaggtacatggtctagatgtaaaaaatgtacagttagtagatgctatagataacatagtttgggaaaagaaatcattagtgacggaaaatcgtcttcacaaagaatgcttgttgagactatcgacagaggaacgtcatatatttttggattacaagaaatatggatcctctatccgactagaattagtcaatcttattcaagcaaaaacaaaaaactttacgatagactttaagctaaaatattttctaggatccggtgcccaatctaaaagttctttgttgcacgctattaatcatccaaagtcaaggcctaatacatctctggaaatagaattcacacctagagacaatgaaacagttccatatgatgaactaataaaggaattgacgactctctcgcgtcatatatttatggcttctccagagaatgtaattctttctccgcctattaacgcgcctataaaaacctttatgttgcctaaacaagatatagtaggtttggatctggaaaatctatatgccgtaactaagactgacggcattcctataactatcagagttacatcaaacgggttgtattgttattttacacatcttggttatattattagatatcctgttaagagaataatagattccgaagtagtagtctttggtgaggcagttaaggataagaactggaccgtatatctcattaagctaatagagcctgtgaatgcaatcaatgatagactagaagaaagtaagtatgttgaatctaaactagtggatatttgtgatcggatagtattcaagtcaaagaaatacgaaggtccgtttactacaactagtgaagtcgtcgatatgttatctacatatttaccaaagcaaccagaaggtgttattctgttctattcaaagggacctaaatctaacattgattttaaaattaaaaaggaaaatactatagaccaaactgcaaatgtagtatttaggtacatgtccagtgaaccaattatctttggagaatcgtctatctttgtagagtataagaaatttagcaacgataaaggctttcctaaagaatatggttctggtaagattgtgttatataacggcgttaattatctaaataatatctattgtttggaatatattaatacacataatgaagtgggtattaagtccgtggttgtacctattaagtttatagcagaattcttagttaatggagaaatacttaaacctagaattgataaaaccatgaaatatattaactcagaagattattatggaaatcaacataatatcatagtcgaacatttaagagatcaaagcatcaaaataggagatatctttaacgaggataaactatcggatgtgggacatcaatacgccaataatgataaatttagattaaatccagaagttagttattttacgaataaacgaactagaggaccgttgggaattttatcaaactacgtcaagactcttcttatttctatgtattgttccaaaacatttttagacgattccaacaaacgaaaggtattggcgattgattttggaaacggtgctgacctggaaaaatacttttatggagagattgcgttattggtagcgacggatccggatgctgatgctatagctagaggaaatgaaagatacaacaaattaaactctggaattaaaaccaagtactacaaatttgactacattcaggaaactattcgatccgatacatttgtctctagtgtcagagaagtattctattttggaaagtttaatatcatcgactggcagtttgctatccattattcttttcatccgagacattatgctaccgtcatgaataacttatccgaactaactgcttctggaggcaaggtattaatcactaccatggacggagacaaattatcaaaattaacagataaaaagacttttataattcataagaatttacctagtagcgaaaactatatgtctgtagaaaaaatagctgatgatagaatagtggtatataatccatcaacaatgtctactccaatgactgaatacattatcaaaaagaacgatatagtcagagtgtttaacgaatacggatttgttcttgtagataacgttgatttcgctacaattatagaacgaagtaaaaagtttattaatggcgcatctacaatggaagatagaccgtctacaaaaaactttttcgaactaaatagaggagccattaaatgtgaaggtttagatgtcgaagacttacttagttactatgttgtttatgtcttttctaagcggtaaataataatatggtatgggttctgatatccccgttctaaatgcattaaataattccaatagagcgatttttgttcctataggaccttccaactgtggatactctgtattgttaatagatatattaatacttttgtcgggtaacagaggttctacgtcttctaaaaataaaagttttataacatctggcctgttcataaataaaaacttggcgattctatatatactcttattatcaaatctagccattgtcttatagatgtgagctactgtaggtgtaccatttgattttctttctaatactatatatttctctcgaagaagttcttgcacatcatctgggaataaaatactactgttgagtaaatcagttattttttttatatcgatattgatggacatttttatagttaaggataataagtatcccaaagtcgataacgacgataacgaagtatttatacttttaggaaatcacaatgactttatcagattaaaattaacaaaattaaaggagcatgtatttttttctgaatatattgtgactccagatacatatggatctttatgcgtcgaattaaatgggtctagttttcagcacggtggtagatatatagaggtggaggaatttatagatgctggaagacaagttagatggtgttctacatccaatcatatatctaaagatatacccgaagatatgcacactgataaatttgtcatttatgatatatacacttttgacgctttcaagaataaacgattggtattcgtacaggtacctccgtcgttaggagatgatagtcatttgactaatccgttattgtctccgtattatcgtaattcagtagccagacaaatggtcaataatatgatttttaatcaagattcatttttaaaatatttattagaacatctgattagaagccactatagagtttctaaacatataacaatagttagatacaaggataccgaagaattaaatctaacgagaatatgttataatagagataagtttaaggcgtttgtattcgcttggtttaacggcgtttcggaaaatgaaaaggtactagatacgtataaaaaggtatctaatttgatataatgaattcagtgactgtatcacacgcgccatatactattacttatcacgatgattgggaaccagtaatgagtcaattggtagagttttataacgaagtagccagttggctgctacgagacgagacgtcgcctattcctgataagttctttatacagttgaaacaaccgcttagaaataaacgagtatgtgtgtgcggtatagatccgtatccgaaagatggaactggtgtaccgttcgaatcaccaaattttacaaaaaaatcaattaaggagatagcttcatctatatctagattaaccggagtaattgattataaaggttataaccttaatataatagacggggttataccctggaattattacttaagttgtaaattaggagaaacaaaaagtcacgcgatctactgggataagatttccaagttactgctgcagcatataactaaacacgttagtgttctttattgtttgggtaaaacagatttctcgaatatacgggcaaagttagaatccccggtaactaccatagtcggatatcatccagcggctagagaccgccaattcgagaaagatagatcatttgaaattatcaacgttttactggaattagacaacaaggcacctataaattgggctcaagggtttatttattaatgctttagtgaaattttaacttgtgttctaaatggatgcggctattagaggtaatgatgttatctttgttcttaagactataggtgtcccgtcagcgtgcagacaaaatgaagatccaagatttgtagaagcatttaaatgcgacgagttagaaagatatattgagaataatccagaatgtacactattcgaaagtcttagggatgaggaagcatactctatagtcagaattttcatggatgtagatttagacgcgtgtctagacgaaatagattatttaacggctattcaagattttattatcgaggtgtcaaactgtgtagctagattcgcgtttacagaatgcggtgccattcatgaaaatgtaataaaatccatgagatctaatttttcattgactaagtctacaaatagagataaaacaagttttcatattatctttttagacacgtataccactatggatacattgatagctatgaaacgaacactattagaattaagtagatcatctgaaaatccactaaccagatcgatagacactgccgtatataggagaaaaacaactcttcgggttgtaggtactaggaaaaatccaaattgcgacactattcatgtaatgcaaccaccgcatgataatatagaagattacctattcacttacgtggatatgaacaacaatagttattacttttctctacaacaacgattggaggatttagttcctgataagttatgggaaccagggtttatttcattcgaagacgctataaaaagagtttcaaaaatattcattaattctataataaactttaatgatctcgatgaaaataattttacaacggtaccactggtcatagattacgtaacaccttgtgcattatgtaaaaaacgatcgcataaacatccgcatcaactatcgttggaaaatggtgctattagaatttacaaaactggtaatccacatagttgtaaagttaaaattgttccgttggatggtaataaactgtttaatattgcacaaagaattttagacactaactctgttttattaaccgaacgaggagaccatatagtttggattaataattcatggaaatttaacagcgaagaacccttgataacaaaactaattttgtcaataagacatcaactacctaaggaatattcaagcgaattactctgtccgaggaaacgaaagactgtagaagctaacatacgagacatgttagtagattcagtggagaccgatacctatccggataaacttccgtttaaaaatggtgtattggacctggtagacggaatgttttactctggagatgatgctaaaaaatatacgtgtactgtatcaaccggatttaaatttgacgatacaaagttcgtcgaagacagtccagaaatggaagagttaatgaatatcattaacgatatccaaccattaacggatgaaaataagaaaaatagagagctatatgaaaaaacattatctagttgtttatgcggtgctaccaaaggatgtttaacattcttttttggagaaactgcaactggaaagtcgacaaccaaacgtttgttaaagtctgctatcggtgacctgtttgttgagacgggtcaaacaattttaacagatgtattggataaaggacctaatccatttatcgctaacatgcatttgaaaagatctgtattctgtagcgaactacctgattttgcatgtagtgggtcaaagaaaatcagatctgataatattaaaaagttgacagaaccttgtgtcattggaagaccgtgtttctccaataaaattaataatagaaaccatgcgacaatcattatcgatactaattacaaacctgtttttgataggatagataacgcattaatgagaagaattgccgtcgtgcgattcagaacacacttttctcaaccttctggtagagaggctgctgaaaataatgacgcgtacgataaagtcaaactattagacgaggggttagatggtaaaatacaaaataatagatatagattcgcatttctatacttgttggtgaaatggtacagaaaatatcatgttcctattatgaaactatatcctacacccgaagagattcctgactttgcattctatctcaaaataggtactctgttagtatctagctctgtaaagcatattccattaatgacggacctctccaaaaagggatatatattgtacgataatgtggttactcttccgttgactactttccaacagaaaatatccaagtattttaattctagactatttggacacgatatagagagcttcatcaatagacataagaaatttgccaatgttagtgatgaatatctgcaatatatattcatagaggatatttcatctccgtaaatatatgctcatatatttatagaagatatcacatatctaaatgaataccggaatcatagatttatttgataatcatgttgatagtataccaactatattacctcatcagttagctactctagattatctagttagaactatcatagatgagaacagaagcgtgttattgttccatattatgggatcaggtaaaacaataatcgctttgttgttcgccttggtagcttccagatttaaaaaggtttacattctagtgccgaacatcaacatcttaaaaattttcaattataatatgggtgtagctatgaacttgtttaatgacgaattcatagctgagaatatctttattcattccacaacaagtttttattctcttaattataacgataacgtcattaattataacggattatctcgctacaataactctatttttatcgttgatgaggcacataatatctttgggaataatactggagaacttatgaccgtgataaaaaataaaaacaagattccttttttactattgtctggatctcccattactaacacacctaatactctgggtcatattatagatttaatgtccgaagagacgatagattttggtgaaattattagtcgtggtaagaaagtaattcagacacttcttaacgaacgcggtgtgaatgtacttaaggatttgcttaaaggaagaatatcatattacgaaatgcctgataaagatctaccaacgataagatatcacggacgtaagtttctagatactagagtagtatattgtcacatgtctaaacttcaagagagagattatatgattactagacgacagctatgttatcatgaaatgtttgataaaaatatgtataacgtgtcaatggcagtattgggacaacttaatctgatgaataatttagatactttatttcaggaacaggataaggaattgtacccaaatctgaaaataaataatggcgtgttatacggagaagaattggtaacgttaaacattagttccaaatttaaatactttattaatcggatacagacactcaacggaaaacattttatatacttttctaattctacatatggcggattggtaattaaatatatcatgctcagtaatggatattctgaatataatggttctcagggaactaatccacatatgataaacggcaaaccaaaaacatttgctatcgttactagtaaaatgaaatcgtctttagaggatctattagatgtgtataattctcctgaaaacgatgatggtagtcaattgatgtttttgttttcatcaaacattatgtccgaatcctatactctaaaagaggtaaggcatatttggtttatgactatcccagatactttttctcaatacaaccaaattcttggacgatctattagaaaattctcttacgccgatatttctgaaccagttaatgtatatcttttagccgccgtatattccgatttcaatgacgaagtgacgtcattaaacgattacacacaggatgaattaattaatgttttaccatttgacatcaaaaagctgttgtatctaaaatttaagacgaaagaaacgaatagaatatactctattcttcaagagatgtctgaaacgtattctcttccaccacatccatcaattgtaaaagttttattgggagaattggtcagacaatttttttataataattctcgtattaagtataacgataccaagttacttaaaatggttacatcagttataaaaaataaagaagacgctaggaattacatagatgatattgtaaacggtcacttctttgtatcgaataaagtatttgataaatctcttttatacaaatacgaaaacgatattattacagtaccgtttagactttcctacgaaccatttgtttggggagttaactttcgtaaagaatataacgtggtatcttctccataaaactgatgagatatataaagaaataaatgtcgagctttgttaccaatggatacctttccgttacattggaaccacacgagctgacgttagacataaaaactaatattaggaatgccgtatataagacgtatctccatagagaaattagtggtaaaatggccaagaaaatagaaattcgtgaagacgtggaattacctctcggcgaaatagttaataattctgtagttataaacgttccgtgtgtaataacctacgcgtattatcacgttggggatatagtcagaggaacattaaacatcgaagatgaatcaaatgtaactattcaatgtggagatttaatctgtaaactaagtagagattcgggtactgtatcatttagcgattcaaagtactgcttttttcgaaatggtaatgcgtatgacaatggcagcgaagtcactgccgttctaatggaggctcaacaaggtatcgaatctagttttgtttttctcgcgaatatcgtcgactcataaaaaagagaatagcggtaagtataaacacgaatactatggcaataattgcgaatgttttattctcttcgatatatttttgataatatgaaaaacatgtctctctcaaatcggacaaccatctcataaaatagttctcgcgcgctggagaggtagttgccgctcgtataatctctccagaataatatacttgcgtgtcgtcgttcaatttatacggatttctatagttctctgttatataatgcggtttgccctcatgattagacgacgacaatagtgttctaaatttagatagttgatcagaatgaatgtttattggcgttggaaaaattatccatacagcgtctgcagagtggttgatagttgttcctagatatgtaaaataatccaacttactaggcagcaaattgtctagataaaatactgaatcaaacggtgcagacgtattggcggatctaatggaatccaattgattaactatcttttgaaaatatacatttttatgatccaatacttgtaagaatatagaaataatgataagtccatcatcgtgtttttttgcctcttcataagaactatattttttcttattccaatgaacaagattaatctctccagagtatttgtacacatctatcaagtgattggatccataatcgtcttcctttccccaatatatatgtagtgatgataacacatattcattggggagaaaccctccacttatatatcctcctttaaaattaatccttactagttttccagtgttctggatagtggttggtttcgactcattataatgtatgtctaacggcttcaatcgcgcgttagaaattgcttttttagtttctatattaataggagatagttgttgcggcatagtaaaaatgaaatgataactgtttaaaaatagctcttagtatgggaattacaatggatgaggaagtgatatttgaaactcctagagaattaatatctattaaacgaataaaagatattccaagatcaaaagacacgcatgtgtttgctgcgtgtataacaagtgacggatatccgttaataggagctagaagaacttcattcgcgttccaggcgatattatctcaacaaaattcagattctatctttagagtatccactaaactattacggtttatgtactacaatgaactaagagaaatctttagacggttgagaaaaggttctatcaacaatatcgatcctcactttgaagagttaatattattgggtggtaaactagataaaaaggaatctattaaagattgtttaagaagagaattaaaagaggaaagtgatgaacgtataacagtaaaagaatttggaaatgtaattctaaaacttacaacacgggataaattatttaataaagtatatataagttattgcatggcgtgttttattaatcaatcgttggaggatttatcgcatactagtatttacaatgtagaaattagaaagattaaatcattaaatgattgtattaacgacgataaatacgaatatctgtcttatatttataatatgctagttaatagtaaatgaacttttacagatctagtataattagtcagattattaagtataatagacgactagctaagtctattatttgcgaggatgactctcaaattattacactcacggcattcgttaaccaatgcctatggtgtcataaacgagtatccgtgtccgctattttattaactactgataacaaaatattagtatgtaacagacgagatagttttctctattctgaaataattagaactagaaacatgtttagaaagaaacgattatttctgaattattccaattatttgaacaaacaggaaagaagtatactatcgtcatttttttctctagatccagctactactgataatgatagaatagatgctatttatccgggtggcatacccaaaaggggtgagaatgttccagagtgtttatccagggaaattaaagaagaagttaatatagacaattcttttgtattcatagacactcggttttttattcatggcatcatagaagataccattattaataaattttttgaggtaatcttctttgtcggaagaatatctctaacgagtgatcaaatcattgatacatttaaaagtaatcatgaaatcaaggatctaatatttttagatccgaattcaggtaatggactccaatacgaaattgcaaaatatgctctagatactgcaaaacttaaatgttacggccatagaggatgttattatgaatcattaaaaaaattaactgaggatgattgattagaaaatataaattaatttaccatcgtgtatttttataacgggattgtccggcatatcatgtagatagttaccgtctacatcgtatactcgaccatctacgcctttaaatcctctatttattgacattaatctattagaattggaataccaaatattagtaccctcaattagtttattggtaatattttttttagacgatagatcgatggctcttgaaaccaaggttttccaaccggactcattgtcgatcggtgagaagtctttttcattagcatgaatccattctaatgatgtatgtttaaacactctaaacaattggacaaattcttttgatttgctttgaatgatttcaaataggtcttcgtctacagtaggcataccattagataatctagccattataaagtgcacgtttacatatctacgttctggaggagtaagaacgtgactattgagacgaatggctcttcctactatctgacgaagagacgcctcgttccatgtcatatctaaaatgaagatatcattaattgagaaaaaactaataccctcgcctccactagaagagaatacgcatgttttaatgcattctccgttagtgtttgattcttggttaaactcagccaccgccttgattctagtatcttttgttctagatgagaactctatattagagataccaaagactttgaaatatagtaataagatttctattcctgactgattaacaaatggttcaaagactagacatttaccatgggatgctaatattcccaaacatacatctataaatttgacgcttttctcttttaattcagtaaatagagagatatcagccgcactagcatcccctttcaatagttctccctttttaaaggtatctaatgcggatttagaaaactctctatctcttaatgaatttttaaaatcattatatagtgttgctatctcttgcgcgtattcgcccggatcacgattttgtctttcaggaaagctatcgaacgtaaacgtagtagccatacgtctcagaattctaaatgatgatatacctgtttttatttcagcgagtttagccttttgataaatttcttcttgctttttcgacatattaacgtatcgcattaatactgttttcttagcgaatgatgcagacccttctacgtcatcaaaaatagaaaactcgttattaactatatacgaacatagtcctcctagtttggagactaattctttttcatcgactagacgtttattctcaaatagtgattggtgttgtaaggatcctggtcgtagtaagttaaccaacatggtgaattcttgcacactattgacgataggtgtagccgataaacaaatcatcttatggttttttaacgcaatggtcttagataaaaaattatatactgaacgagtaggacggatcttaccatcttctttgattaatgatttagaaatgaagttatgacattcatcaatgatgacgcatattctactcttggaattaatagttttgatattagtaaaaaatttatttctaaaattttgatcatcgtaattaataaaaatacaatccttcgttatctctggagcgtatctgagtatagtgttcatccaaggatcttctatcaaagcctttttcaccaataagataatagcccaattcgtataaatatccttaagatgtttgagaatatatacagtagtcattgttttaccgacacccgtttcatggaacaataaaagagaatgcatactgtctaatcctaagaaaactcttgctacaaaatgttgataatccttgaggcgtactacgtccgaccccatcatttcaacgggcatattagtagttctgcgtaaggcataatcgatataggccgcgtgtgatttactcatttatgagtgataagtaataactatgttttaaaaatcacagcagtagtttaactagtcttctctgatgtttgttttcgatactttttgaatcagaagtcatactagaataaagcaacgagtgaacgtaatagagagcttcgtatactctattcgaaaactctaagaacttattaatgaattccgtatccactggattgtttaaaatactaaattgaacactgttcacatccttccaagaagaagacttagtgacggacttaacatgagacataaataaatccaaattttttttacaaacatcactagccaccataatggcgctatctttcaaccagctatcgcttacgcattttagcagtctaacatttttaaagagactacaatatattctcatagtatcgattacacctctaccgaataaagttggaagtttaataatacaatatttttcgtttacaaaatcaaataatggtcgaaacacgtcgaaggttaacatcttataatcgctaatgtatagattgttttcagtgagatgattattagatttaatagcatctcgttcacgtttgaacagtttattgcgtgcgctgaggtcggcaactacggcgtccgctttagtactcctcccataatactttacgctattaatctttaaaatttcatagactttatctagatcgctttctggtaacatgatatcatgtgtaaaaagttttaacatgtcggtcggcattctatttagatcattaactctagaaatctgaagaaagtaattagctccgtattccagactaggtaatgggcttttacctagagacagattaagttctggcaatgtttcataaaatggaagaaggacatgcgttccctcccggatattttttacaatttcatccatttacaactctatagtttgttttcattattattagttattatctcccataatcttggtaatacttaccccttgatcgtaagataccttatacaggtcattacatacaactaccaattgtttttgtacataatagattggatggttgacatccatggtggaataaactactcgaacagatagtttatctttccccctagatacattagccgtaatagttgtcggcctaaagaatatctttggtgtaaagttaaaagttagggttcttgttccattattgctttttgtcagtagttcattataaattctcgagatgggtccgttctctgaatatagaacatcatttccaaatctaacttctagtctagaaataatatcggtcttattcttaaaatctattcccttgatgaagggatcgttaatgaacaaatccttggcctttgattcggctgatctattatctccgttatagacgttacgttgactagtccaaagacttacaggaatagatgtatcgatgatgttgatactatgtgatatgtgagcaaagattgttctcttagtggcatcactatatgttccagtaatggcggaaaactttttagaaatgttatatataaaagaattttttcgtgttccaaacattagcagattagtatgaagataaacactcatattatcaggaacattatcaatttttacatacacatcagcatcttgaatagaaacgataccatcttctggaacctctacgatctcggcagactccggataaccagtcggtgggccatcgctaacaataactagatcatccaacaatctactcacatatgcatctatataatctttttcatcttgtgagtaccctggatacgaaataaatttattatccgtatttccataataaggtttagtataaacagagagagatgttgccgcatgaacttcagttacagtcgccgttggttggtttatttgacctattactctcctaggtttctctataaacgatggtttaatttgtacattcttaaccatatatccaataaagctcaattcaggaacataaacaaattctttgttgaacgtttcaaagtcgaacgaagagtcacgaataacgatatcggatactggattgaaggttaccgttacggtaatttttgaatcggatagtttaagactgctgaatgtatcttccacatcaaacggagttttaatataaacgtatactgtagatggttctttaatagtgtcattaggagttaggccaatagaaatatcattaagttcactagaatatccagagtgtttcaaagcaattgtattattgatacaattattatataattcttcgccctcaatttcccaaataacaccgttacacgaagagatagatacgtgattaatacatttatatccaacatatggtacgtaactgaatcttcccatacctttaacttctggaagttccaaactcagaaccaaatgattaagcgcagtaatatactgatccctaatttcgaagctagcgatagcctgattgtctggaccatcgtttgtcataactccggatagagaaatatattgcggcatatataaagttggaatttgactatcgactgcgaagacattagaccgtttaatagagtcatccccaccgatcaaagaattaatgatagtattattcattttctatttaaaatggaaaaagcttacaataaactccgtagagaaatatctataatttgtgagttttccttaaagtaacagcttccgtaaacgccgtctttatctcttagtaggtttattgtatttatgaccttttccttatcttcatagaatactaaaggcaacaaagaaatttttggttcttctctaagagctacgtgagacttaaccatagaagccaacgaatccctacatattttagaacagaaataccctacttcaccacccttgtatgtctcaatactaataggtctaaaaaccaaatcttgattacaaaaccaacacttatcaattacactatttgtcttaatagacacatctgccatagatttataatactttggtagtatacaagcgagtgcttcttctttagcgggcttaaagactgctttaggtgctgaaataaccacatctggaaggcttactcgcttagccatttaattacggaactatttttttatacttctaatgagcaagtagaaaacctctcatctacaaaaacgtactcgtgtccataatcctctaccatagttacacgttttttagatctcatatgtgctaaaaagttttcccatactaattggttactattatttttcgtataatttttaacagtttgaggttttagatttttagttacagaagtgatatcgaatattttatccaaaaagaatgaataattaattgtcttagaaggagtgttttcttggcaaaagaataccaagtgcttaaatatttctactacttcattaatcttttctgtactcagattcagtttctcatcttttacttgattgattatttcaaagactaacttataatcctttttatttattctctcgttagccttaagaaaactagatacaaaatttgcatctacatcatccgtggatatttgatttttttccatgatatccaagagttccgagataatttctccagaacattgatgagacaataatctccgcaatacatttctcaaatgaataagtttattagacacgtggaagtttgactttttttgtacctttgtacatttttgaaataccgactcgcaaaaaatacaatattcatatccttgttcagatactataccgttatgtctacaaccgctacataatcgtagattcatgttaacactctacgtatctcgtcgtccaatattttatataaaaacattttatttctagacgttgccagaaaatcctgtaatatttttagttttttgggctgtgaataaagtatcgccctaatattgttaccgtcttccgccaatatagtagttaaattatccgcacatgcagaagaacaccgcttaggcggattcagtacaatgttatatttttcgtaccaactcatttaaatatcataatctaaaatagttctgtaatatgtctagcgctaatatattgatcataatcctgtgcataaattaagatacaacaatgtctcgaaatcatcgacatggcttcttccatagttagaagatcgtcgtcaaagttagcaacgtgattcatcaacatttgctgttttgaggcagcaaatactgaaccgtcgccattcaaccattcataaaaaccatcgtctgaatccattgataatttcttgtactggtttttgagagctcgcatcaatctagcatttctagctcccggattgaaaacagaaagaggatcgtacatccagggtccattttctgtaaatagaatcgtataatgtcccttcaagaagatatcagacgatccacaatcaaagaattggtctccgagtttgtaacaaactgcggactttaacctatacatgataccgtttagcataatttctggtgatacgtcaatcggagtatcatctattagagatctaaagccggtgtaacattctccaccaaacatattcttattctgacgtcgttctacataaaacatcattgctccattaacgataacaggggaatgaacagcactacccatcacattagttcccaatggatcaatgtgtgtaactccagaacatcttccatagcctatgttaggaggagcgaacaccactcttccactattgccatcgaatgccatagaataaatatccttggaattgatagaaatcggactgtcggatgttgtgatcatcttcataggattaacaactatgtatggtgccgcctgaagtttcatatcgtaactgatgccgtttataggtctagccacagaaaccaacgtaggtctaaatccaactatagacaaaatagaagccaatatctgttcctcatctgtcataacttgagagcatccagtatgaataatcttcattagatggggatctaccgcatcatcatcgttacaataaaaaattcccattctaatgttcataattgcttttctaatcatggtatgcatgtttgctctctgaatctctgtggaaattagatctgatacacctgtaatcactatcggattatcctccgtaagacgattaaccaacaacatataattataagactttacttttctaaattcataaagttgctggattaggctataggtgtctccatgtacatacgcgttctcgagcgcaggaagtttaataccgaatagtgccatcagaataggatgaatatagtaattagtttctggttttctataaataaaagacaaatcttgtgaactagacatatcggtaaaatgcatggattggaatcgtgtagtcgacagaagaatatgatgattagatggagagtatattttatctaactctttgagttggtcaccgattctaggactagctcgagaatgaataagtactaaaggatgagtacatttcacagaaacactagcattgttcaatgtgctctttacatgggtaaggagttgaaatagctcgtttctatttgttctgacaatatttagtttattcataatgttaagcatatcctgaatagtaaagttagatgtgtcatacttgttagtagttagatatttagcaattgcattcccatcatttctcaatctcgtactccaatcatgcgtggatgctacttcgtcgatggaaaccatacaatcctttttgataggctgttgagattgattatttcctgcacgtttaggtttggtacgttgatttctagcccctgcggatataaagtcatcgtctacaatttgggacaatgaattgcatacactacaagacaaagatttatcagaagtgtgaatatgatcttcatctaccaaagaaagagtttgattagtataactagattttagtcctgcgttagatgttaaaaaaacatcgctattgaccacggcttccattatttatattcgtagtttttactcgaaagcgtgattttaatatccaatcttattacttttggaatcgttcaaaacctttgactaattgtagaatttgatctattgccctacgcgtatactcccttgcatcatatacgttcgtcaccagatcgtttgtttcggcctgaagttggtgcatatctctttcaacattcgacatgagatccttaagggccatatcgtctagattttgttgagatgctgctcctggatttggattttgttgtgctgttgtacatactgtaccaccagtaggtgtaggagtacatacagtggccacaataggaggttgaggaggtgtaaccgttggagtagtacaagaaatatttccatccgattgttgtgtacatgtagttgttggtaacgtctgagaaggttgggtagatggcggtgtcgtcgtcttttgatctttattaaatttagagataatatcctgaacagcattgctcggcgtcaacgctggaaggagtgaactcgccggcgcatcagtatctgcagacagccaatcaaaaagattagacatatcagatgatgtattagtttgttgtcgtggttttggtgtaggagcagtactactaggtagaagaataggagccggtgtagctgttggaaccggctgtggagttatatgaatagttggttgtagcggttggataggctgtctgctggcggccatcatattatctctagctagttgttctcgcaactgtctttgataatacgactcttgagactttagtcctatttcaatcgcttcatcctttttcgtatccggatccttttcttcagaataatagattgacgactttggtgtagaggattctgccagcctctgtgagaacttgttaaagaagtccatttaaggctttaaaattgaattgcgattataagattaaatggcagacacagacgatattatcgactatgaatccgatgatctcaccgaatacgaggatgatgaagaagaggaagaagatggagagtcactagaaactagtgatatagatcccaaatcttcttataagattgtagaatcagcatccactcatatagaagatgcgcattccaatcttaaacatatagggaatcatatatctgctcttaaacgacgctatactagacgtataagtctatttgaaatagcgggtataatagcagaaagctataacttgcttcaacgaggaagattacctctagtttcagaattttctgacgaaacgatgaagcaaaatatgctacatgtaattatacaagagatagaggagggttcttgtcctatagtcatcgaaaagaacggagaattgttgtcggtaaacgattttgacaaagatggtctaaaattccatctagactatattatcaaaatttggaaacttcaaaaacgatattagaatttatacgaatatcgttctctaaatgtcacaatcaagtctcgcatgttcagcaatttattgtcgtactttatatcgtgttcattaacgatattttgcaaaatagtaatgattctatcttccttcgatagatattcttcagagattattgtcttatattctttcttgttatccgatatgaatttgataagactttgaacattattgatacccgtctgtttaattttttctacagatattttagttttggcagattctatcgtatctgtcaatagacatccaacatcgacattcgacgtcaattgtctataaatcaacgtataaattttagaaataacattagcgaattgttgtgcattgatgtcgttattctgaaacagtatgattttaggtagcattttcttaacaaagagaacgtatttattgttactcagttgaacagatgatatatccagattactaacgcatctgattccgtataccaaactttcagaagaaatggtatacaattgtttgtattcattcaatgtctctttttcagaaattagtttagagtcgaatactgcaataattttcaagagatagttttcatcagataagattttatttagtgtagatatgataaaactattgttttgttggagaacttgatacgccgcgttctctgtagtcgacgctctcaaatgggaaacaatctccattatttttttggaatcggatactatatcttcggtatcttgacgcagtctagtatacatagagttaagagagattagagtttgtacattaagcaacatgtctctaaatgtggctacaaacttttcctttttcacatcatctagtttattatataccgatttcacaacggcaccagatttaaggaaccagaatgaaaaactctgataactacaatatttcatcatagttacgattttatcatcttctatagttggtgtaatagcgcatacctttttctccaagactggaaccaacgtcataaaaatgtttaaatcaaaatccatatcaacatctgatgcgctaagaccagtctcgcgttcaagattatctttactaatggtgacgaactcatcgtataaaactctaagtttgtccattatttatttacagatttagttgtttaatttatttgtgctcttccagagttgggatagtatttttctaacgtcggtattatattattaggatctacgttcatatgtatcataatattaatcatccacgttttgataaatctatctttagcttctgaaataacgtatttaaacaaaggagaaaaatatttagctacggcatcagacgcaataacattttttgtaaatgtaacgtatttagacgacagatcttcgttaaaaagttttccatctatgtagaatccatcggttgttaacaccattcccgcgtcagattgaataggagtttgaatagtttgttttggaaatagatccttcaataacttatagttgggtgggaaaaaatcgattttatcactagactctttcttttttactatcattacctcatgaactatttcttgaatgagtatatgtattttctttcctatatcggacgcgttcattggaaaatataccatgtcgttaactataagaatatttttatcctcgtttacaaactgaataatatcagatgtagttcgtaaacgaactatatcatcaccagcacaacatctaactatatgatatccactagtttcctttagccgtttattatcttgttccatattagcagtcattccatcatttaagaaggcgtcaaagataatagggagaaatgacattttggattctgttacgactttaccaaaattaaggatatacggacttactatctttttctcaacgtcaatttgatgaacacacgatgaaaatgtgcttctatgagattgatcatgtagaaaacaacaagggatacaatatttccgcatatcatgaaatatattaagaaatcccaccttattatatttccccaaaggatccatgcacgtaaacattatgccgttatcattaataaagacttctttctcatcggatctgtaaaagttgttactgatttttttcattccaggatctagataattaataatgatgggttttctattcttattctttgtattttggcatatcctagaccagtaaacagtttccactttggtaaaatcagcagacttttgaacgctattaaacatggcattaatggcaataactaaaaatgtaaaatatttttctatgttaggaatatggtttttcactttaatagatatatggtttttggccaaaatgatagatatttttttatccgaggatagtaaaatattattagtcgccgtctctataaaaatgaagctagtctcgatatccaattttattctagaattgataggagtcgccaaatgtaccttatacgttatatctcccttgatgcgttccatttgtgtatctatatcggacacaagatctgtaaatagttttacgttattaatcatcacggtatcgccgtcgctagataacgctaatgtaccatccaagtcccaaatggagagatttaactgttcatcgtttagaataaaatgattaccggtcatattaataaagtgttcatcgtatctagataacaacgacttataattaatgtccaagtcttgaactcgctgaatgatcttttttaacccagttagttttagattggtacgaaatatattgttaaactttgattctacagtaatgtccaaatctagttgtggaaatacttccatcaacattgtttcaaacttgataatattattatctacatcttcgtacgatccaaattccggaatagatgtatcgcacgctctggccacccagataaccaaaaagtcacacgctccaggatatacattgtataaaaagctatcgttttttagtagggtttttttctgcgtgtatacgaagggattaaaaatagtattatcaacgtaactatattccaaattattcttatgagaatagataataatatcgtccttaatatctaacaaatttcctaaatatccctttaattgagtcattcgaagcgtcaatagaatatgtctcttaactatttccggctgttgtatatttaaatgacttcgtaaaaaataatatatgggcgacttctcatctatgtaatcatatggagtgagatatagggctcgttctacctcctgccccttacccacctgtaataccaattgcggacttactatatatcgcatatttatatcgtggggtaaagtgaaaatctactaccgatgatgtaagtcttacaatgttcgaaccagtaccagatcttaatttggaggcctccgtagaactaggggaggtaaatatagatcaaacaacacctatgataaaggagaatagcggttttatatcccgcagtagacgtctattcgcccatagatctaaggatgatgagagaaaactagcactacgattctttttacaaagactttattttttagatcatagagagattcattatttgttcagatgcgttgacgctgtaaaagacgtcactattaccaaaaaaaataacattatcgtggcgccttatatagcacttttaactatcgcatcaaaaggatgcaaacttacagaaacaatgattgaagcattctttccagaactatataatgaacatagtaagaaatttaaattcaactctcaagtatccatcatccaagaaaaactcggataccagtttggaaactatcacgtttatgattttgaaccgtattactctacagtagctctggctattcgagatgaacattcatctggcatttttaatatccgtcaagagagttatctggtaagttcattatctgaaataacatatagattttatctaattaatctaaaatctgatcttgttcaatggagtgctagtacgggcgctgtaattaatcaaatggtaaatactgtattgattacagtgtatgaaaagttacaactggtcatagaaaatgattcacaatttacatgttcattggctgtggaatcaaaacttccaataaaattacttaaagatagaaatgaattatttacaaaattcattaacgagttaaaaaagaccagttcattcaagataagcaaacgcgataaggatacgctactaaaatattttacttaggactggagttagaatttatagacgactcatttcgtttatcattgttactattattactattactatcattattagtgttggcattattagtattcttcttgtcatcttgttcagaaatatacagcaatgctatacctaatactaaatacattatcatgctcgcaatggctctaacaacaacgaaccaaaatgaatttggtcgtagcttttgttcacaaaaatacataaagaaatgtctacataaatctatggcgccattggctacttgaaatagcgccagtcctcctacagattttaatatagctgtataacatgacatttattcatcatcaaaagagacagagtcaccatctgtcatatttagattttttttcatgtgttcaaagtatcctctactcatttcattataatagtttatcatacttagaattttaggacggatcaatgagtaagacttgactagatcgtcagtagtaatttgtgcatcgtctattctgcatccgcttcgtcgaataatgtatagcatcgctttgagattctccatagctatcaagtctttatacaatgacatggaaatatctgtgaatactttatacttctccaacatcgatgccttaacatcatcgcctactttagcattgaaaatacgttctattgtgtagatggatgtagcaagatttttaaacaacaatgccatcttacacgatgattgcctcaagtctccaatcgtttgtttagaacgattagctacagagtccaatgcttggctgactagcatattattatctttagaaattgtattcttcaatgaggcgtttatcatatctgtgatttcgttagtcatattacagtctgactgggttgtaatgttatccaacatatcacctatggatacggtacacgtaccagcatttgtaataatcctatctaagatgttgtatggcattgcgcagaaaatatcttctcctgtaatatctccactctcgataaatctactcagattattcttaaatgccttattctctggagaaaagatatcagtgtccatcatttcattaatagtatacgcagaaaagataccacgagtatcaattctatccaagatacttatcggttccgagtcacagataatggtttcctctccttcgggagatcctgcatagaaatatctaggacaatagtttctatactgtctgtaactctgataatctctaaagtcactaactgataccatgaaattgagaagatcaaacgctgaagtaattaatttttctgcctcgtttttactacaactagttttcatcaatgtagtgacgatgtattgtttagttacttttggtctaatactgatgatagagatattattgcttcccataatggatcttctagtagtcaccttaaagcccattgatgcgaatagcagatagataaagtcttggtatgactcctttctaatatagtacggactacctttgtcacccaactttatacccacataagccataacaacctctttaatagccgtttcatgaggtttatcagccatgagcctgagtagttggaagaatctcatgaatcccgtctcagaaagtcctatatgcatgatagatttatctttcctgggaaactctcgtatagtcatagatgaaatactctttaaagtttctgaaataagattagtaacagtcttacctccgactactctaggtaacaaacaaactctaataggtgttttctctgcggagataatatcagaaaggatagagcaataagtagtattattgtgattataaagaccgaatacataacaggtagaatttataaacatcatgtcctgaaggtttttagacttgtattcctcgtaatccataccgtcccaaaacatggatttggtaactttgatagccgtagatctttgttccttcgccaacaggttaaagaaattaataaagaatttgttgtttctatttatgtccacaaattgcacgtttggaagcgccacggttacattcactgcagcattttgaggatcgcgagtatgaagtacgatgttattgtttactggtatatctggaaagaaatctaccagtctaggaataagagattgatatcgcatagaaatagtaaagtttataatctcatcatcgaagagcattttgttaccattgtaataaatatccactctgtcatatgtataaatgaagtactgttcaaacatgatgagatgtttatatgttggcatagtagtgagatcgacgtttggtaatggcaatgtattaagattaactccataatgtctagcagcatctgcgatgttataagcgtcgtcaaagcggggtcgatcttgtattgttatatattgtctaacacctataagattatcaaaatcttgtctgcttaatacaccgttaacaatttttgccttgaattcttttattggtgcattaataacatccttatagaggatgttaaacaaataagtgttatcaaagttaagatctggatatttcttttctgctagaacatccattgagtcggagccatctggtttaatataaccaccgataaatctagctctgtattctgtatccgtcaatctaatattaagaaggtgttgagtgaaaggtggaagatcgtaaaagctgtgagtattaatgataggattagtttccgaactaatgttaattggggtattaataatatctatatttccagcgttaagtgtaacattaaacagttttaattcacgtgacgtggtatcaattaaataattaatgcccaatttggatatagcagcctgaagctcatcttgtttagttacggatcctaatgagttattaagcaatatatcgaacggatgaacgaaggttgttttaagttggtcacatactttgtaatctagacatagatgcggaagaacggtagaaactatacgaaataaatattcagagtcctctaattgatcaagagtaactattgacttaataggcatcatttatttagtattaaatgacgaccgtaccagtgacggatatacaaaacgatttaattacagagttttcagaagataattatccatctaacaaaaattatgaaataactcttcgtcaaatgtctattctaactcacgttaacaacgtggtagatagagaacataatgccgccgtagtgtcatctccagaggaaatatcctcacaacttaatgaagatctatttccagatgatgattcaccggccactattatcgaacgagtacaacctcatactactattattgacgatactccacctcctacgtttcgtagagagttattaatatcggaacaacgtcaacaacgagaaaaaagatttaatattacagtatcgaaaaatgctgaagcaataatggaatctagatctatgataacttctataccaacacaaacaccatccttgggagtagtttatgataaagataaaagaattcagatgttagaggatgaagtggttaatcttagaaatcaacgatctaatacaaaatcatctgataatttagataattttaccaaaatactatttggtaagactccgtacaaatcaacagaagttaataagcgtatagccatcgttaattatgcaaatttgaacgggtcccccttatcagtcgaggacttggatgtttgttcggaggatgaaatagatagaatctataaaacgattaaacaatatcacgaaagtagaaaacgaaaaattatcgtcactaacgtgattattattgtcataaacattatcgagcaggcattgctaaaactcggatttgaagaaatcaaaggactgagtaccgatatcacttcagaaattatcgatgtggagatcggagatgactgcgatgctgtagcatctaaactaggaatcggtaacagtccggttcttaatattgtattgtttatactcaagatattcgttaaacgaattaaaattatttaatttaatacattcccatatccagacaacaatcgtctggattaatctgttcctgtcgtctcataccggacgacatattaatctttttattagtgggcatctttttagatggtttctttttcccagcattaactgagtcgatacctagaagatcgtgattgatctctccgaccattccacgaacttctaattggccgtctctgacggtaccataaactattttaccagcattagtaacagcttggacaatctgaccatccatcgcattgtacgatgtagtagtaactgttgttctacgtctaggagcaccagaagtatttttggagcccttggatgttgatgtagaagaagacgaggattttgattttggtttacatgtaatacattttgaactctttgattttgtatcacatgcgccggcagtcacatctgtttgagaattaagattattgttgcctcctttgacggctgcatctccaccgatttgcgctagtagatttttaagctgtggtgtaatcttattaactgtttcgatataatcatcgtaactgcttctaacggctaaattttttttatccgccatttagaagctaaaaatatttttatttatgcagaagatttaactagattatacaatgaactaatatgatccttttccagattatttacaaacttggtattttttggttctggaggaggcgaatttaaattcggacttggattcggattttgtaagttcttgatcttattatacatcgagtataggatggcgacagtaactgctacacaaataccgatcaaaagaagaataccaatcatttattgacaataacttcactattgatcaagtatgcaatatatcatcttttcactaaataagtagtaataatgattcaacaatgtcgagatatatggacgataataatttagttcatggaaatatcgctatgattggtgtgaatgactccgctaactctgtggggtgcgcagtgctttccccacatagaataaattagcattccgactgtgataataataccaagtataaacgccataatactcaatactttccatgtacgagtgggactggtagacttactaaagtcaataaaggcgaagatacacgaaagaatcaaaagaatgattccagcgattagcacgccggaaaaataatttccaatcataagcatcatgtccatttaactaataaaaattttaaatcgccgaatgaacaaagtggaatataaaccatataaaaacaatagtttgtactgcaaaaataatatctatttttgttttcgaagatatggtaaaattaaatagtagtacacagcatgttataactaacagcagcaacggctcgtaattacttatcatttactagacgaaaaggtggtgggatattttcttgctcaaataatacgaatatatcacccatccattttatgcgatgtttatatactctaatctttaatagatctatagacgacgggtttaccaacaatatagattttatcgattcatctaatttaaacccttccttaaacgtgaatgatctattatctggcataacgatgaccctacctgatgaatcggacaatgtactgggccatgtagaataaattatcaacgaattatcgtctacgaacatttatatcatttgttttaattttaggacgcgaataaatggatataaaatagaaaataacagatattacaaccagtgttatggccgcgcccaaccaggtaggcagttttattttatcttttactacaggttctcctggatgtacgtcaccaacggcggacgtagttctagtacaattagacgtaagttccgcttgggaattttttaacgctaaagagttaacgttaatcgtgcacccaacgtatttacatctagttcgttgaacatcttgattataatataaccattttctatctctagattcgtcagtgcactcatgtaaccaacataccctaggtcctaaatatttatctccggaattagattttggataattcgcgcaccaacaatttctatttcctttatgatcgttacaaaagacgtataatgccgtatccccaaaagtaaaataatcaggacgaataattctaataaactcagaacaatatctcgcatccatatgtttggagcaaatatcggaataagtagacatagccggtttccgttttgcacgtaaccattctaaacaattggggtttccaggatcgtttctacaaaatccagtcatgaaatcgtcacaatgttctgtcttgtaattattattaaatatttttggacagtgtttggtatttgtcttagaacaacattttgccacgctatcactatcgcccaggagataatccttttttataaaatgacatcgttgcccggatgctatataatcagtagcgtgttttaaatccttaatatattcaggagttacctcgttctgataatagattaatgatccaggacgaaatttgaaagaactacatggttctccatgaattaatacatattgtttagcaaattcaggaactataaaactactacaatgatctatcgacataccatctatcaaacaaaacttgggtttaatttctcccggagatgtttcataatagtacgtataactttcttctgcaaacttaacagctctattatattcaggataattaaaacctaattccatatatttgtctcgtatatctgctattcctggtgctattttgattctattaagagtaacagctgcccccattcttaataatcgtcagtatttaaactgttaaatgttggtatatcaacatctaccttatttcccgcagtataaggtttgttgcaggtatactgttcaggaatggttacatttatacttcttctatagtcctgtctttcgatgttcatcacatatgcaaagaacagaataaacaaaataatgtaagaaataatattaaatatctgtgaattcgtaaatacattgattgccataataattacagcagctacaatacatacaatagacattcccacagtgttgccattacctccacgatacatttgagttactaagcaataggtaataactaagctagtaagaggcaatagaaaagatgagataaatatcatcaatatagagattagaggagggctatatagagccaagacgaacaaaatcaaaccgagtaacgttctaacatcattatttttgaagattcccaaataatcattcattcctccataatcgttttgcatcatacctccatctttaggcataaacgattgctgctgttcctctgtaaataaatctttatcaagcactccagcacccgcagagaagtcgtcaagcatattgtaatatcttaaataactcatttatatattaaaaaatgtcactattaaagatggagtataatctttatgccgaactaaaaaaaatgacttgtggtcaacccctaagtctttttaacgaagacggggatttcgtagaagttgaaccgggatcatcctttaagtttctgatacctaagggattttacgcctctccttccgtaaagacgagtctagtattcgagacattaacaacgaccgataataaaatcactagtatcaatccaacaaatgcgccaaagttatatcctcttcaacgcaaagtcgtatctgaagtagtttctaatatgaggaaaatgatcgaatcaaaacgtcctctatacattactcttcacttggcgtgtggatttggtaagactattaccacgtgttatcttatggctacacacggtagaaaaaccgtcatttgcgtacccaataaaatgttaatacatcaatggaagacacaggtagaggcagtcggattggaacataagatatccatagatggagtaagtagtctattaaaggaactaaagactcaaagtccggatgtattaatagtagtcagtagacatctgacaaacgatgccttttgtaaatatatcaataagcattatgatttgttcatcttggatgaatcacatacgtataatctgatgaacaatacagcagttacaagatttttagcgtattatcctccgatgatgtgttattttttaactgctacacctagaccatctaaccgaatttattgtaacagtattattaatattgccaagttatccaatctaaaaaaaactatctatgcagtagatagtttttttgagccatattccacagataatattagacatatggtaaaacgactagatggaccatctaataaatatcatatatataccgagaagttattatctgtagacgagcctagaaatcaacttattcttgataccctggtagaagaattcaagtcaggaactattaatcgcattttagttattactaaactacgtgaacatatggtattattctacaaacgattattagattttttcggaccagaggttgtatttataggagacgcccaaaatagacgtactccagatatggtcaaatcaatcaaggaactaaatagatttatattcgtatccaccttattttattccggtactggtttagatattcctagtttggattcgttgttcatttgctcggcagtaatcaacaatatgcaaatagagcaattactagggagggtatgtcgagaaacagaactattagataggacggtatatgtatttcctaacacatccatcaaagaaataaagtacatgataggaaatttcatgcaacgaattattagtctgtctgtagataaactaggatttaaacaaaaaagttatcggaaacatcaagaatccgatcccacttctgcatgtacaacatcatccagagaagaacgtgtattaaatagaatatttaactcgcaaaatcgttaagaagtttaagcgacgatccgcatgctgcgcaggccagtgtattacccctcatagtattaatataatccaatgatacttttgtgatgtcggaaatcttaaccaatttagactgacaggcagaacacgtcatgcaatcatcatcgtcatcgataactgtagtcttgggcttctttttgcgactcttcattccggaacgcacattggtgctatccatttaggtagtaaaaaataagtcagaatatgccctataacacgatcgtgcaaaacctggtatatcgtctctatctttatcacaatatagtgtatcgacatttttattattattgacctcgtttatcttggaacatggaatgggaacatttttgttatcaacggccatctttgccttaattccagatgttgtaaaattataactaaacagtctatcatcgacacaaatgaaattcttgtttagacgtttgtagtttacgtatgcggctcgttcgcgtctcattttttcagatattgcaggtactataatattaaaaataagaatgaaataacataggattaaaaataaagttatcatgacttctagcgctgatttaactaacttaaaagaattacttagtctgtacaaaagtttgagattttcagattctgcggctatagaaaagtataattctttggtagaatggggaacatctacttactggaaaataggcgtgcaaaaggtagctaatgtcgagacgtcaatatctgattattatgatgaggtaaaaaataaaccgtttaatattgatccgggctattacattttcttaccggtatattttgggagcgtctttatttattcgaagggtaaaaatatggtagaacttggatctggaaactcttttcaaataccagatgatatgcgaagtgcgtgtaacaaagtattagacagcgataacggaatagactttctgagatttgttttgttaaacaatagatggataatggaagatgctatatcaaaatatcagtctccagttaatatatttaaactagctagtgagtacggattaaacatacccaaatatttagaaattgaaatagaggaagacacattatttgacgacgagttatactctattatagaacgctctttcgatgataaatttccaaaaatatccatatcgtatattaagttgggagaacttagacggcaagttgtagactttttcaaattctcattcatgtatattgagtccatcaaggtagatcgtataggagataatatttttattcctagcgttataacaaaatcaggaaaaaagatattagtaaaagatgtagaccatttaatacgatccaaggttagagaacatacatttgtaaaagtaaaaaagaaaaacacattttccattttatacgactatgatggaaacggaacagaaactagaggagaagtaataaaacgaattatagacactataggacgagactattatgttaacggaaagtatttctctaaggttggtagtgcaggcttaaagcaattgactaataaattagatattaatgagtgcgcaactgtcgatgagttagttgatgagattaataaatccggaactgtaaaacgaaaaataaaaaaccaatcagcatttgatttaagcagagaatgtttgggatatccagaagcggattttataacgttagttaataacatgcggttcaaaatagaaaattgtaaggttgtaaatttcaatattgaaaatactaattgtttaaataacccgagtattgaaactatatatggaaactttaaccagttcgtctcaatctttaatgtcgtcaccgatgtcaaaaaaagattattcgagtgaaataatatgcgcctttgatataggtgcaaaaaatcctgccagaactgttttagaagtcaaggataactccgttagggtattggatatatcaaaattagactggagttctgattgggaaaggcgcatagctaaagatttgtcacaatatgaatacactacagttcttctagaacgtcagcctagaaggtcgccgtatgttaaatttatctattttattaaaggctttttatatcatacatcggctgccaaagttatttgcgtctcgcctgtcatgtctggtaattcatatagagatcgaaaaaagagatcggtcgaagcatttcttgattggatggacacattcggattgcgagactccgttccggatagacgcaaattagacgatgtagcggatagtttcaatttggctatgagatacgtattagataaatggaatactaattatacaccttataataggtgtaaatctagaaattacataaaaaaaatgtaataacgttagtaacgccattatggataatctatttacctttctacatgaaatagaagatagatatgccagaactatttttaactttcatctaataagttgcgatgaaataggagatatatatggtcttatgaaagaacgcatttccttagaggatatgtttgataatatagtgtataataaagatatacatcctgccattaagaaactagtgtattgcgacatccaacttactaaacacattattaatcagaatacgtatccggtatttaacgattcttcacaagtgaaatgttgtcattatttcgacataaactcagataatagcaatattagctctcgtacagtagagatatttgagagggaaaagtcatctcttgtatcatatattaaaactaccaataagaagagaaaggtcaattacggcgaaataaagaaaactgttcatggaggcactaatgcaaattacttttccggtaaaaagtctgacgagtatctgagtactacagttagatccaacattaatcaaccttggatcaaaaccatctctaagaggatgagagttgatatcattaatcactctatagtaacgcgtggaaaaagctctatattacaaactatagaaattatttttactaatagaacatgtgtgaaaatattcaaggattctactatgcacattattctatccaaggacaaggatgaaaaggggtgtatacacatgattgacaaattattctatgtctattataatttatttctgttgttcgaagatatcatccaaaacgagtactttaaagaagtagctaatgttgtaaaccacgtactcacggctacggcattagatgagaaattattcctaattaagaaaatggctgaacacgatgtttatggagttagcaatttcaaaatagggatgtttaacctgacatttattaagtcgttggatcataccgttttcccctctctgttagatgaggatagcaaaataaagttttttaaggggaaaaagctcaatattgtagcattacgatctctggaggattgtataaattacgtgactaaatccgagaatatgatagaaatgatgaaggaaagatcgactattttaaatagcatagatatagaaacggaatcggtagatcgtctaaaagaattgcttctaaaatgaaaaaaaacactgattcagaaatggatcaacgactcggatataagtttttggtgcctgatcctaaagccggagttttttatagaccgttacatttccaatatgtatcgtattctaattttatattgcatcgattgcatgaaatcttgaccgtcaagcggccactcttatcgtttaagaataatacagaacgaattatgatagaaattagcaatgttaaagtgactcctccagattactcacctataatcgcgagtattaaaggtaagagttatgacgcattagccacgttcactgtaaatatctttaaagaggtaatgaccaaagagggtatatccatcactaaaataagtagttatgagggaaaagattctcatttgataaaaattccgctactaataggatacgggaataaaaatccacttgatacagccaagtatcttgttcctaatgtcataggtggagtctttatcaataaacaatctgtcgaaaaagtaggaattaatctagtagaaaagattacaacatggccaaaatttagggttgttaagccaaactcattcactttctcgttttcctccgtatcccctcctaatgtattaccgacaagatatcgccattacaagatatctctggatatatcacaattggaagcgttgaatatatcatcgacaaagacatttataacggtcaatattgttttgctgtctcaatatttatctagagtgagtctagaattcattagacgtagtttatcatacgatatgcctccagaagttgtctatctagtaaacgcgataatagatagtgctaaacgaattactgaatctattactgactttaatattgatacatacattaatgacctggtggaagctgaacacattaaacaaaaatctcagttaacgattaacgagttcaaatatgaaatgctgcataactttttacctcatatgaactatacacccgatcaactaaagggattttatatgatatctttactaagaaagtttctctactgtatcttccacacttctagatatccagatagagattcgatggtttgtcatcgcatcctaacgtacggcaaatattttgagacgttggcacatgatgaattagagaattacataggcaacatccgaaacgatatcatgaacaatcacaagaacagaggcacttacgcggtaaacattcatgtactaacaactcccggacttaatcacgcgttttctagcttattgagtggaaagttcaaaaagtcagacggtagttatcgaacacatcctcactattcatggatgcagaatatttctattcctaggagtgttggattttatccggatcaagtaaagatttcaaagatgttttctgtcagaaaataccatccaagtcaatatctttacttttgttcatcagacgttccggaaagaggtcctcaggtaggtttagtatctcaattgtctgtcttgagttccattacaaatatactaacgtctgagtatttggatttggaaaagaaaatttgtgagtatatcagatcatattataaagatgatataagttactttgaaacaggatttccaatcactatagaaaatgctctagtcgcatctcttaatccaaatatgatatgtgattttgtaactgactttagacgtagaaaacggatgggattcttcggtaacttggaggtaggtattactttagttagggatcacatgaatgaaattcgcattaatattggagcgggaagattagtcagaccattcttggttgtggataacggagagctcatgatggatgtgtgtccggagttagaaagcagattagacgacatgacattctctgacattcagaaagagtttccgcatgtcatcgaaatggtagatatagaacaatttacttttagtaacgtatgtgaatcggttcaaaaatttagaatgatgtcaaaggatgaaagaaagcaatacgatttatgtgactttcctgccgaatttagagatggatatgtagcatcttcactagtgggaatcaatcacaattctggacccagagctattcttggatgtgctcaagctaaacaagctatctcttgtctgagttcggatatacgaaataaaatagacaatggaattcatttgatgtatccagagaggccaatcgtgattagtaaggctttagaaacttcaaagattgcggctaattgcttcggccaacatgttactatagcattaatgtcgtacaaaggtatcaatcaagaggatggaattatcatcaaaaaacaatttattcagagaggcggtctcgatatagttaccgcaaagaaacatcaagtagaaattccattggaaaactttaataacaaagaaagagataggtctaacgcctattcaaaattagaaagtaatggattagttagactgaatgctttcttggaatccggagacgctatggcacgaaatatctcatcaagaactcttgaagatgattttgctagagataatcagattagcttcgatgtttccgagaaatataccgatatgtacaaatctcgcgttgaacgagtacaagtagaacttactgacaaagttaaggtacgagtattaaccatgaaagaaagaagacccattctaggagacaaatttaccactagaacgagtcaaaagggaacagtcgcgtatgtcgcggatgaaacggaacttccatacgacgaaaatggtatcacaccagatgtcattattaattctacatccatcttctctagaaaaactatatctatgttgatagaagttattttaacagccgcatattctgctaagccgtacaacaataagggagaaaaccgacctgtctgttttcctagtagtaacgaaacatccatcgatacatatatgcaattcgctaaacaatgttatgagcattcaaatccgaaattgtccgatgaagaattatcggataaaatcttttgtgaaaagattctctatgatcctgaaacggataagccttatgcatccaaagtattttttggaccaatttattacttgcgtctgaggcatttaactcaggacaaggcaaccgttagatgtagaggtaaaaagacgaagctcattagacaggcgaatgagggacgaaaacgtggaggaggtatcaagttcggagaaatggagagagactgtttaatagcgcatggtgcagccaatactattacagaagttttgaaagattcggaagaagattatcaagatgtgtatgtttgtgaaaattgtggagacatagcagcacaaatcaagggtattaatacatgtcttagatgttcaaaacttaatctctctcctctcttaacaaaaattgataccacgcacgtatctaaagtatttcttactcaaatgaacgccagaggcgtaaaagtcaaattagatttcgaacgaaggcctccttcgttttataaaccattagataaagttgatctcaagccgtcttttctggtgtaatattctagtttggtagtagatacatatcaatatcatcaaattcgagatccgaattataaaatgggcgtggattgttaactatagaatcggacgtctgatattcgaaaatctgtggagtttcaggttttggtggaggtgtaactgctacttgggatactgaagtctgatattcagaaagctgtggatgttctggttcggcatccaccgatggtgtcacatcactaatcggttcggtaacgtctgtggatggaggtgctacttctacagaacctgtagcctcagttgtcaacggagatacatttttaatgcgagaaaatgtataatttggtaatggtttcttatgtggatctgaagaagaggtaagatatctactagaaagataccgatcacgttctagttctcttttgtagaacttaactttttctttctccgcatctagttgatattccaacctcttcacgttactacgttcagattccaattcacgttcgcatgggttacctccgcagtttttacgagcgatttcacgttcagccttcatgcgtctctccctctctctatcgagtttatcagagcagtctttctgaaggcgatcgaactccataaatttctccaacgctttgattgtttccatagatttccgaagttcagcttttaggactgtgattctttttctttcgaattcacagctggatgtacaaccgtttccattaccgccatctctaagtttcttttctagatcggcaacatttcatccccatgccttttacattcctcgagtctactgtcgtcgaaatatcgttccagctccttttcgacatcaataactttagcacgttgtctctcaagctctcttttgtagttatctgattccctggcacgtttaagatcttcatgcaattgagtcagctcttaacttcctctcttgcttcttcgtcatagtacgcgcaatcactgtgagatccattgttaccacgtctacactcggcgagctcgcgtttaagagattcaatttcccgtttgtattggtccatgtttccattgctaccaccattagatttacaggctgctagttgtcgttcgagatcagaaatacgggttttcttggaattgatttcgtcgatgtacttggcatcgaaacacttattaagttctttttccaattctacgattttatttctttcgcgagtcaattccctcctgtagtaactatctgttttgtcagattcacgctctctacgtagactttcttgcaagttactaatttgttccctagcacgtccgagtttagttttatatgctgaatagagttctgattcatcctttgagcagatctctagcgatcgtttaagattcctaattctagtctttagcctatttacctcctcagaagatgttccgttaccgttgcgtttacactcgttaagctgtctatcaagatccatgattctatctctaagacgttgcatctctctttccatatcagcattgctttcattattacgtctgcagtcactcaactgtctttcaatatctgagattctatctctaagacgtcgcatctctctctgtttcggcattggtttcattattacgtctacagtcgttcaactgtctttcaagatctgatattctagattggagtctgctaatctctgtagcattttcacggcattcactcagttgtctttcaagatctgaaattttagattggagtctgctaatctctgtaagatttcctcctccgctctcgatgcagtcggtcaacttattctctagttctctaatacgcgaacgcagtgcatcaacttcttgcgtgtcttcctggttgcgtgtacattcatcgagtctagattcgagatctctaacgcgtcgtcgttcttcctcaagttctctgcgtactacagaaagcgtgtccctatcttgttgatatttagcaatttctgattctagagtactgattttgcttacgtagttactaatatttgtcttggccttatcaagatcctccttgtatttgtcgcattccttgatatccctacgaagtctggacagttcccattcgacattacgacgtttatcgatttcagctcggagatcgtcatcgcgttgttttagccacatacgactgagttcaagttctcgttgacaagatccatctacttttccattcctaatagtatccagttccttttctagttctgaacgcatttctcgttccctatcaagcgattctctcaattctcggatagtcttcttatcaatttctaataaatctgaaccatcatctgtcccattttgaatatccctgtgttctttgatctcttttgtaagtcggtcgattctttcggttttataaacagaatccctttccaaagtcctaatcttactgagtttatcactaagttctgcattcaattcggtgagttttctcttggcttcttccaactctgttttaaactctccactatttccgcattcttcctcgcatttatctaaccattcaattagtttattaataactagttggtaatcagcgattcctatagccgttcttgtaattgtgggaacataattaggatcttctaatggattgtatggcttgatagcatcatctttatcattattagggggatggacaaccttaattggttggtcctcatctcctccagtagcgtgtggttcttcaataccagtgttagtaataggcttaggcaaatgcttgtcgtacgcgggcacttcctcatccatcaagtatttataatcgggttctacttcagaatattcttttctaagagacgcgacttcgggagttagtagaagaactctgtttctgtatctatcaacgctggaatcaatactcaagttaaggatagcgaatacctcatcgtcatcatccgtatcttctgaaacaccatcatatgacatttcatgaagtctaacgtattgataaatagaatcagatttagtattaaacagatccttaacctttttagtaaacgcatatgtatattttagatctccagatttcataatatgatcacatgccttaaatgtcagtgcttccatgatataatctggaacactaatgggtgacgaaaaagatacagcaccatatgctacgttgataaataaatctgaaccactaagtagataatgattaatgttaagaaagaggaaatattcagtgtataggtatgtcttggcgtcatatcttgtactaaacacgctaaacagtttgttaatgtgatcaatttccaatagattaattagagcagcgggaataccaacaaacatattaccacatccgtattttctatgaatatcacatatcatgttaaaaaatcttgatagaagagcgaatatctcgtctgacttaatgagtcgtagttcagcagcaacataagtcataactgtaaatagaacatactttcctgtagtgttgattctagactccacatcaacaccattattaaaaatagttttatatacatctttaatctgctctccgttaatcgtcgaacgttctagtatacggaaacactttgatttcttatctgtagttaatgacttagtgatatcacgaagaatattacgaattacatttcttgtttttcttgagagacctgattcagaactcaactcatcgttccatagtttttctacctcagtggcgaaatctttggagtgcttggtacatttttcaataaggttcgtgacctccatttattataaaaaatttattcaaaacttaactacaatcgggtaattataaaatcgtagatctcccatgtggcggaatactaccatctatcgcatgtggatggacagtaggtaatggccatgggaacagtaatgtttgcatatttatctttcttgccagtattactgcatattgtcccaatgtttcgatgtgatgttctaacctatcaactgccgctgtatcacaacaatagtgtccgatgaaattaagattatgatccaatgtgtttaatatatgattatcaagtcttatacgatccgcgtcttttttgacaggatcaggttcttctacaggaagaagtttcggcctcttatgatattcatgtctgggaaacggtggtctagggtgaggctccggtatcggagtgggttttggattataatcatcatcgtctatgacatcatcttcgacttcgatatttattttgctatcttgatgatgtcctgtatcagttgcattttcagcactcgactgaatattagcgcattcattgtctattattaccatatttctaaacccaaaatgtatgtgttgaacatcagtactatcgttgatgagtcttatagcatgaattcgcttatcgttatcgggtttatcttctgtcaccttagcaattccttttttattaaactctacataatcatatccatttctattgtttgttctaatataaacgagtatagcatcattgctaaatttttcaatagtatcaaaaacagaatatcctaaaccatataatatatattcaggaacactcaaactaaatgtccaggattctcctaaatacgtaaactttaatagtgcgaaatcattcaaaaatctaccacttatagatagatagtacataaatgcgtatagtagtctacctatctctttattatgaaaaccggcattacgatcatatatgtcgtgatatacctgtgatccgtttacgttaaaccataaatacatgggtgatcctataaacatgaatttatttctaattctcagagctatagttaattgaccgtgtaatatttgcttacatgcatacttgatacgcttattaataagatttttatcattgctcgttatttcagaatcgtatatataaggagtaccatcgtgattcttaccagatattatacaaaatactatatataaaatatattgaccaacgttagtaatcatataaatgtttaacgttttaaattttgtattcaatgatccattatcatacgctagcatggtcttatgatattcattctttaaaatataatattgtgttagccattgcattggggctcctaatggagattttttattctcatccattttaggataggctttcataaagtccctaataacttcgtgaataatgtttctatgttttctactgatgcatgtatttgcttcgatttttttatcccatgtttcatctatcatagatttaaacgcagtaatgctcgcaacattaacatcttgaaccgttggtacaattccgttccataaatttataatgttcgccatttatataactcattttttgaatatacttttaattaacaaaagagttaagttactcatatggacgccgtccagtctgaacatcaatctttttagccagagatatcatagccgctcttagagtttcagcgtgattttccaacctaaatagaacttcatcgttgcgtttacaacacttttctatttgttcaaactttgttgttacattagtaatctttttttccaaattagttagccgttgtttgagagtttcctcattgtcgtctccatcggctttaacaattgcttcgcgtttagcctctggctttttagcagcctttgtagaaaaaaattcagttgctggaattgcaagatcgtcatctccggggaaaagagttccgtccatttaaagtacagattttagaaactgacactctgcgttatttatatttggtacaacacatggattataaatattgatgttaataacatcagaaaatgtaaagtctatacattgttgcatcgtgttaaattttctaatggatctagtattattgggtccaacttctgcctgaaatccaaatatggaagcggatacaaaaccgtttcctggataaaccacacatctccacttttgctttacatcagaaattgtgtcgttgacatcttgaactctcctatctaatgccggtgttccacctatagattttgaatattcgaatgctgcatgagtagcattaaattccttaatattgccataattttcatatattgagtaaccctggataaaaagtaaacacaccgcagccgtcgctaccacaataaaaaaaattgatagagagttcatttataatctattagaagctgacaaaatttttttacacgcatcagacaatgctttaataaatagttcaacatctacttttgtcatatcgaaccgatggtatgattctaacctagaattacatccgaaaaagttgactatgttcatagtcattaagtcattaacaaacaacattccagactctggattataagacgatactgtttcgtcacaattacctaccttaatcatgtgattatgaatattggctattagagcaccttctaagaaatctataatatctttgaaacacgatttaaaatcaaaccacgaatatacttctacgaagaaagttagtttacccataggagaaataactataaatggagatctaaatacaaaatccggatctatgatagttttaacattattatattctctattaaatacctccacatctaaaaatgttaattttgaaactatgtcttcgtttattaccgtacctgaactaaacgctataagctctattgtttgagaactctttaaacgatattcttgaaatacatgtaacaaagtttcctttaactcggtcggtttatctaccatagttacagaatttgtatccttatctataatataataatcaaaatcgtataaagttatataattatcgcgttcagattgggatcttttcaaatagactaaaaaccccatttctctagtaagtatcttatgtatatgtttgtaaaatatcttcatggtgggaatatgctctaccgcagttagccattcctcattgacagcggtagatgtattagacaaaactattccaatgtttaacaagggccattttacgagattattaaatccttgtttgataaatgtagccaatgagggttcgagttcaacgacgattgaattctcttcccgcggatgctgcatgatgaacgacgggatgttgttcgattgatttggaattctttttcgactttttgtttatattaaatattttaaaatttatagcggatagcaattcatgtaccacggataatgtagacgcgtattgcgcatcgatatctttattattagataaatttatcaataaatgtgagaagtttgcctcgttaaggtcttccatttaaatattatataaacatttgtgtttgtaacttattcgtcttttatggaatagttttttactagtaaagctgcaattacacactttgtccgtaaaacataaatataaacaccagcttttatcaatcgttccaaaaagtcgacggcggacatttttaacatggcatctattttaaatacacttaggtttttggaaaaaacatcattttataattgtaacgattcaataactaaagaaaagattaagattaaacataagggaatgtcatttgtattttataagccaaagcattctaccgttgttaaatacttgtctggaggaggtatatatcatgatgatttggttgtattggggaaggtaacaattaataatctaaagatgatgctattttacatggatttatcatatcatggagtgacaagtagtggagcaatttacaaattgggatcgtctatcgatagactttctctaaataggactattgttacaaaagttaataattatgatgatacattttttgacgacgatgattgatcgctattgcacaattttgtttttgtactttctaatatagtgtttaggttctttttcatatgagaatattgatttactaaaatatctatgtttaacttttgttctatgacgtccttatcggcggtatcggtacatatacgtaattcaccttcacaaaatacggagtcttcgataataatagccaatcgattattggatctagctgtctgtatcatattcaacatgtttaatatatcctttcgtttcccctttacaggcatcgatcgtagcatattttccgcgtctgatatggaaatgttaaaactacaaaaatgcgtaatgttagcccgtcctaatattggtacgtgtctataagtttggcatagtagaataatagacgtgtttaaatgccttccaaagtttaagaattctattagagtattgcattttgatagtttatcgcctacatcatcaaaaataagtaaaaagtgtgctgattttttatgattttgtgcgacagcaatacatttttctatgttacttttagttcgtatcagattatattctagagattcctgactactaacgaaattaatatgatttggccaaatgtatccatcataatctgggttataaacgggtgtaaacaagaatatatgtttatattttttaactagtgtagaaaacagagatagtaaatagatagtttttccagatccagatcctcctgttaaaaccattctaaacggcatttttaataaattttctcttgaaaattgtttttcttggaaacaattcataattatatttacagttactaaattaatttgataataaatcaaaatatggaaaactaaggttgttagtagggaggagaacaaagaaggcacatcgtgatataaataacatttattatcatgatgacaccagaaaacgacgaagagcagacatctgtgttctccgctactgtttacggagacaaaattcagggaaagaataaacgcaaacgcgtgattggtctatgtattagaatatctatggttatttcactactatctatgattaccatgtccgcgtttctcatagtgcgcctaaatcaatgcatgtctgctaacgaggctgctattactgacgccgctgttgccgttgctgctgcatcatctactcatagaaaggttgcgtctagcactacgcaatatgatcacaaagaaagctgtaatggtttatattaccagggttcttgttatatattacattcagactaccagttattctcggatgctaaagcaaattgcactgcggaatcatcaacactacccaataaatccgatgtcttgactacctggctcattgattatgttgaggatacatggggatctgatggtaatccaattacaaaaactacatccgattatcaagattctgatgtatcacaagaagttagaaagtatttttgtgttaaaacaatgaactaatatttatttttgtacattaataaatgaaatcgcttaatagacaaactgtaagtaggtttaagaagttgtcggtgccggccgctataatgatgatactctcaaccattattagtggcataggaacatttctgcattacaaagaagaactgatgcctagtgcttgcgccaatggatggatacaatacgataaacattgttatttagatactaacattaaaatgtctacagataatgcggtttatcagtgtcgtaaattacgagctagattgcctagacctgatactagacatctgagagtattgtttagtattttttataaagattattgggtaagtttaaaaaagaccaatgataaatggttagatattaataatgataaagatatagatattagtaaattaacaaattttaaacaactaaacagtacgacggatgctgaagcgtgttatatatacaagtctggaaaactggttaaaacagtatgtaaaagtactcaatctgtactatgtgttaaaaaattctacaagtgacaacaaaaaatgaattaataataagtcgttaacgtacgccgccatggacgccgcgtttgttattactccaatgggtgtgttgactataacagatacattgtatgatgatctcgatatctcaatcatggactttataggaccatacattataggtaacataaaaactgtccaaatagatgtacgggatataaaatattccgacatgcaaaaatgctactttagctataagggtaaaatagttcctcaggattctaatgatttggctagattcaacatttatagcatttgtgccgcatacagatcaaaaaataccatcatcatagcatgcgactatgatatcatgttagatatagaagataaacatcagccattttatctattcccatctattgatgtttttaacgctacaatcatagaagcgtataacctgtatacagctggagattatcatctaatcatcaatccttcagataatctgaaaatgaaattgtcgtttaattcttcattctgcatatcagacggcaatggatggatcataattgatgggaaatgcaatagtaattttttatcataaaagttgtaaagtaaataataaaacaataaatattgaactagtagtacgtatattgagcaatcagaaatgatgctggtacctcttatcacggtgaccgtagttgcgggaacaatattagtatgttatatattatatatttgtaggaaaaagatacgtactgtctataatgacaataaaattatcatgacaaaattaaaaaagataaagagttctaattccagcaaatctagtaaatcaactgatagcgaatcagactgggaggatcactgtagtgctatggaacaaaacaatgacgtagataatatttctaggaatgagatattggacgatgatagcttcgctggtagtttaatatgggataacgaatccaatgttatggcgcctagcacagaacacatttacgatagtgttgctggaagcacgctgctaataaataatgatcgtaatgaacagactatttatcagaacactacagtagtaattaatgaaacggagactgttgaagtacttaatgaagataccaaacagaatcctaactattcatccaatcctttcgtaaattataataaaaccagtatttgtagcaagtcaaatccgtttattacagaacttaacaataaatttagtgagaataatccgtttagacgagcacatagcgatgattatcttaataagcaagaacaagatcatgaacacgatgatatagaatcatcggtcgtatcattggtgtgattagtttcctttttataaaattgaagtaatatttagtattattgctgccgtcacgttgtacaaatggagatattccctgtattcggcatttctaaaattagcaattttattgctaataatgactgtagatattatatagatacagaacatcaaaaaattatatctgatgagatcaatagacagatggatgaaacggtacttcttaccaacatcttaagcgtagaagttgtaaatgacaatgagatgtaccatcttattcctcatagattatcgacgattatactctgtattagttctgtcggaggatgtgttatctctatagataatgacgtcaatggcaaaaatattctaacctttcccattgatcatgctgtaatcatatccccactgagtaaatgtgtcgtagttagcaagggtcctacaaccatattggttgttaaagcggatatacctagcaaacgattggtaacatcgtttacaaacgacatactatatgtaaacaatctgtcactgattaattatttgccgttgtctgtattcattattagacgagtcaccgactatttggatagacacatatgcgatcagatatttgctaataataagtggtattcccttataaccatcgacgataagcaatatcctattccatcaaactgtataggtatgtcctctgccaagtacataaattctagcatcgagcaagatactttaatccatgtttgtaacctcgagcatccgttcgactcagtatacaaaaaaatgcagtcgtacaattctctacctatcaaggaacaaatattgtacggtagaattgataatataaatatgagcattagtatttctgtggattaatagatttctagtatggggatcattaatcatctctaatctctaaatacctcataaaacgaaaaaaaagctattatcaaatactgtacggaatggattcattctcttctctttttatgaaactctgttgtatatctactgataaaactggaagcaaaaaatctgatagaaagaataagaataagatcaaggattatatggaacacgattattataaaataacaatagttcctggttcctcttccacgtctactagctcgtggtattatacacatgcctagtaatagtctctttgcgttgacggaaagcagactagaaataacaggctaaaatgttcagacaccataatagttcccaacccagataataacagagttccatcaacacattcctttaaactcaatcccaaacccaaaaccgttaaaatgtatccggccaattgatagtagataatgaggtgtacagcgcatgataatttacacagtaaccaaaatgaaaacactttagtaattataagaaatatagacggtaatgtcatcatcaacaatccgataatatgcctgagagtaaacattgatggataaaacaaaaatgctccgcataactctatcatggcaataacacaaccaaacacttgtaaaattcctaaattagtagaaaatacaacgaatatcgatgtataagtgatctcgagaaataataagaataaagtaatgcccgtaaagataaacatcaacattgtttggtaatcattaaaccaattagtatgaagttgaactaatttcacagtagattttattccagtgttatcctcgcatgtataagtacctggtaagatatctttatattccataatcaatgagacatcactatctgataacgaatgaagtctagcactagtatgccatttacttaatattgtcgtcttggaagttttattataagttaaaatatcatggttatccaatttccatctaatatactttgtcggattatctatagtacacggaataatgatggtatcattacatgctgtatactctatggtctttgtagttgttataacaaccaacgtatagaggtatatcaacgatattctaactcttgacattttttatttatttaaaatgatacctttgttatttattttattctattttgctaacggtattgaatggcataagtttgaaacgagtgaagaaataatttctacttacttattagacgacgtattatacacgggtgttaatggggcggtatacacattttcaaataataaactaaacaaaactggtttaactaataataattatataacaacatctataaaagtagaggatgcggataaggatacattagtatgcggaaccaataacggaaatcccaaatgttggaaaatagacggttcagacgacccaaaacatagaggtagaggatacgctccttatcaaaatagcaaagtaacgataatcagtcacaacggatgtgtactatctgacataaacatatcaaaagaaggaattaaacgatggagaagatttgacggaccatgtggttatgatttattcacggcggataacgtaattccaaaagatggtttacgaggagcattcgtcgataaagacggtacttatgacaaagtttacattcttttcactgatactatcggctcaaagagaattgtcaaaattccgtatatagcacaaatgtgcctaaacgacgaaggtggtccatcatcattgtctagtcatagatggtcgacgtttctcaaagtcgaattagaatgtgatatcgacggaagaagttatagacaaattattcattctagaactataaaaacagataatgatacgatactatatgtattcttcgatagtccttattccaagtccgcattatgtacctattctatgaataccattaaacaatctttttctacgtcaaaattggaaggatatacaaagcaattgccgtctccagctcctggtatatgtttaccagctggaaaagttgttccacataccacgtttgaagtcatagaacaatataatgtactagatgatattataaagcctttatctaaccaacctatcttcgaaggaccgtctggtgttaaatggttcgatataaaggagaaggaaaatgaacatcgggaatatagaatatacttcataaaagaaaattctatatattcgttcgatacaaaatctaaacaaactcgtagctcgcaagtcgatgcgcgactattttcagtaatggtaactgcgaaaccgttatttatagcagatatagggataggagtaggaatgccacaaatgaaaaaaatacttaaaatgtaatcttaatcgagtacaccacacgacaatgaacaaacataagacagattatgctggttatgcttgctgcgtaatatgcggtctaattgtcggaattatttttacagcgacactattaaaagttgtagaacgtaaattagttcatacaccattaatagataaaacgataaaagatgcatatattagagaagattgtcctactgactggataagctataataataaatgtatccatttatctactgatcgaaaaacctgggaggaaggacgtaatgcatgcaaagctctaaattcaaattcggatctaattaagatagagactccaaacgagttaagttttttaagaagccttagacgaggctattgggtaggagaatccgaaatattaaaccagacaaccccatataattttatagctaagaatgccacgaagaatggaactaaaaaacggaaatatatttgtagcacaacgaatactcccaaactgcattcgtgttacactatataacaattacactacatttttatcataccactacttcggttagatgttttagaaaaaaataaatatcgccgtaccgttcttgtttttataaaaataacaattaacaattatcaaattttttctttaatattttacgtggttgaccattcttggtggtaaaataatctcttagtgttggaatggaatgctgtttaatgtttccacactcatcgtatattttgacgtatgtagtcacatcgtttacgcaatagtcagactgtagttctatcatgcttcctacatcagaaggaggaacagttttaaagtctcttggttttaatctattaccgttagttttcatgaaatcctttgttttatccacttcacattttaaataaatgtccactatacattcttttgttaattttactagatcgtcatgggtcatagaatttataggttccgtagtccatggatccaaactagcaaacttcgcgtatacggtatcgcgattagtgtatacaccaactgtatgaaaattaagaaaacagtttaataaatcaacagaaatatttaatcctccgtttgatacagatgcgccatatttatggatttcggattcacacgttgtttgtctgaggtgttcgtctagtgttgcttctacgtaaacttcgattcccatatattctttattgtcagaatcgcataccgatttatcatcatacactgtttgaaaactaaatggtatacacatcaaaataataaataataacgagtacattctgcaatattgttatcgtaattggaaaaatagtgttcgagtgagttggattatgtgagtattggattgtatattttattttatattttgtaataagaataaaatgctaatgtcaagtttattccaatagatgtcttattaaaaacatatataataaataacaatggctgaatggcataaaattatcgaggatatctcaaaaaataataagttcgaggatgccgccatcgttgattacaagactacaaagaatgttctagctgctattcctaacagaacatttgccaagattaatccgggtgaaattattcctctcatcactaatcgtaatattctaaaacctcttattggtcagaaatattgtattgtatatactaactctctaatggatgagaacacgtatgctatggagttgcttactgggtacgcccctgtatctccgatcgttatagcgagaactcataccgcacttatatttttgatgggtaagccaacaacatccagacgtgacgtgtatagaacgtgtagagatcacgctacccgtgtacgtgcaactggtaattaaaataaaaagtaatattcatatgtagtgtcaattttaaatgatgatgatgaaatggataatatccatattgacgatgtcaataatgccggtattggcatacagttcatcgatttttagatttcattcagaggatgtggaattatgttatgggcatttgtattttgataggatctataatgtagtaaatataaaatataatccgcatattccatatagatataattttattaatcgcacgttaaccgtagatgaactagacgataatgtcttttttacacatggttattttttaaaacacaaatatggttcacttaatcctagtttgattgtctcattatcaggaaacttaaaatataatgatatacaatgctcagtaaatgtatcgtgtctcattaaaaatttggcaacgagtacatctactatattaacatctaaacataagacttattctctacatcggtccacgtgtattactataataggatacgattctattatatggtataaagatataaatgacaagtataatgacatctatgattttactgcaatatgtatgctaatagcgtctacattgatagtgaccatatacgtgtttaaaaaaataaaaatgaactcttaattatgctatgctattagaaatggataaaatcaaaattacggttgattcaaaaattggtaatgttgttaccatatcgtataacttggaaaagataactattgatgtcacacctaaaaagaaaaaagaaaaggatgtattattagcgcaatcagttgctgtcgaagaggcaaaagatgtcaaggtagaagaaaaaaatattatcgatattgaagatgacgatgatatggatgtagaaagcgcgtaatacgatctataaaaataagtatataaatactttttatttactgtactcttactgtgtagtggtgataccctactcgattatttttttaaaaaaaaaatacttattctgattcttctagccatttccgtgttcgtttgaatgccacatcgacgtcaaagataggggagtagttgaaatctagttctgcattgttggtacgcacctcaaatgtagtgttggatatcttcaacgtatagttgttgagtagtgatggttttctaaatagaattctcttcatatcattcttgcacgcgtacatttttagcatccatcttggaatcctagatccttgttctattcccaatggtttcatcaatagaagattaaacatatcgtacgaacacgatggagagtaatcgtagcaaaagtaagcatttcctttaatctcagatcccggatactggatatattttgcagccaacacgtgcatccatgcaacatttcctacatatacccggctatgcaccgcgtcatcatcgactgtacgatacataatgttaccgtgttgcttacattgctcgtaaaagactttcatcaatttgtctccttctccgtaaattccagtgggtcttaggcaacaagtatacaattttgctccattcatgattacggaattattggctttcataaccagttgctcggccatacgtttactttttgcgtatacatgtcctggtgatatatcataaagggtatgctcatggccgatgaatggatcaccgtgtttattgggtcctattgcttccatgctactagtatagatcaaatacttgattcctaggtccacacaagctgccaaaatagtctgtgttccataatagtttactttcatgatttcattatcggtgtattttccaaatacatccactagagcagccgtatgaataatcagatttaccccatctagcgcttctctcaccttatcaaagtcgtttatatcacattgtatatagtttataaccttaactttcgaggttattggttgtggatcttctacaatatctatgactctgatttcttgaacatcatctgcactaattaacagttttactatatacctgcctagaaatccggcaccaccagtaaccgcgtacacggccattgctgccactcataatatcagactacttattctattttactaaataatggctgtttgtataatagaccacgataatatcagaggagttatttactttgaaccagtccatggaaaagataaagttttaggatcagttattggattaaaatccggaacgtatagtttgataattcatcgttacggagatattagtcaaggatgtgattccataggcagtccagaaatatttatcggtaacatctttgtaaacagatatggtgtagcatatgtttatttagatacagatgtaaatatatttacaattattggaaaggcgttatctatttcaaaaaatgatcagagattagcgtgtggagttattggtatttcttacataaatgaaaagataatacattttcttacaattaacgagaatggcgtttgatatatcagttaatgcgtctaaaacaataaatgcattagtttacttttctactcagcaaaataaattagtcatacgtaatgaagttaatgatacacactacactgtcgaatttgatagggacaaagtagttgacacgtttatttcatataatagacataatgacaccatagaaataagaggggtgcttccagaggaaactaatattggttgcgcggttaatacgccggttagtatgacttacttgtataataagtatagttttaaactgattttagcagaatatataagacacagaaatactatatccggcaatatttattcggcattgatgacactagatgatttggctattaaacagtatggagacattgatctattatttaatgagaaacttaaagtagactccgattcgggactatttgactttgtcaactttgtaaaggatatgatatgttgtgattctagaatagtagtagctctatctagtctagtatctaaacattgggaattgacaaataaaaaatataggtgtatggcattagccgaacatatatctgatagtattccaatatctgagctatctagactacgatacaatctatgtaagtatctacgcgggcacactgagagcatagaggatgaatttgattattttgaagacgatgattcgtctacatgttctgccgtaaccgacagggaaacggatgtataatttttttttatagcgtgaaggatatgataaaaaatataattgttgtatttatcccattccaatcaccttatatgattctgtaacacaataaaggagtcttatagatgtatagaggtcagatactggtttgataaactgtttattccacataagtatgtttgactttatggttagacccgcatactttaacaaatcactgaaaattggagttaggtattgacctctcagaatcagttgccgttctggaacattaaatgtattttttatgatatactccaacgcatttatgtgggcatacaacaagtcattactaatggagtattccaagagttttagttgtctagtatttaacaagagaagagatttcaacagactgtttatgaactcgaatgccgcctcattgtcgcttatattgatgatgtcgaattctcccaatatcatcaccgatgagtagctcatcttgttatcgggatccaagttttctaaagatgtcattaaaccctcgatcatgaatggatttatcatcatcgtttttatgttggacatgagcttagtccgtttgtccacatctatagacgacgatttctgaattatttcatatatccctctctttaactccaggaacttgtcaggatggtctactttaatatgttctcgtctaagagatgaaaatctttggatggttgtacgcgacttttctctaaaggatgacgttgcccaagatcctctcttaaatgaatccatcttatccttggacaagatggacagtctattttccttagatggtttaatatttttgttacccatgatctataaaggtagacctaatcgtctcggatgacctatatatttattttcagttttattatacgcataaattgtaaaaaatatgttaggtttacaaaaatgtctcgtggggcattaatcgtttttgaaggattggacaaatctggaaaaacaacacaatgtatgaacatcatggaatctataccggcaaacacgataaaatatcttaactttcctcagagatccactgtcactggaaagatgatagatgactatctaactcgtaaaaaaacctataatgatcatatagttaatctattattttgtgcaaatagatgggagtttgcatcttttatacaagaacaactagaacagggaattactttaatagttgatagatacgcattttctggagtagcgtatgccgccgctaaaggcgcgtcaatgactctcagtaagagttatgaatctggattgcctaaacccgacttagttatattcttggaatctggtagcaaagaaattaatagaaacgtcggcgaggaaatttatgaagatgttacattccaacaaaaggtattacaagaatataaaaaaatgattgaagaaggagatattcattggcaaattatttcttctgaattcgaggaagatgtaaagaaggagttgattaagaatatagttatagaggctatacacacggttactggaccagtggggcaactgtggatgtaatagtgaaattacattttttataaatagatgttagtacagtgttataaatggatgaagcatattactctggcaacttggaatcagtactcggatacgtgtccgatatgcataccgaactcgcatcaatatctcaattagttattgccaagatagaaactatagataatgatatattaaacaaggacattgtaaattttatcatgtgtagatcaaacttggataatccatttatctctttcctagatactgtatatactattatagatcaagagaactatcagactgagttgattaattcattagacgacaatgaaattatcgattgtatagttaataagtttatgagcttttataaggataacctagaaaatatagtagatgctatcattactctaaaatatataatgaataatccagattttaaaactacgtatgcagaagtactcggttccagaatagccgatatagatattaaacaagtgatacgtaagaatatactacaattgtctaatgatatccgcgaacgatatttgtgaaaatattaaaaaaaaatactttttttattaaatgacgtcgcttcgcgaatttagaaaattatgctgtgatatatatcacgcatcaggatataaagaaaaatctaaattaattagagactttataacagatagggatgataaatatttgatcattaagctattgcttcccggattagacgatagaatttataacatgaacgataaacaaattataaaattatatagtataatatttaaacaatctcaggaagatatgctacaagatttaggatacggatatataggagacactattaggactttcttcaaagagaacacagaaatccgtccacgagataaaagcattttaactttagaagaagtggatagttttttaactacgttatcatccgtaactaaagaatcgcatcaaataaaattattgactgatatcgcatccgtttgtacatgtaatgatttaaaatgtgtagtcatgcttattgataaagatctaaaaattaaagcgggtcctcggtacgtacttaacgctattagtcctaatgcctatgatgtgtttagaaaatctaataacttgaaagagataatagaaaatgcatctaaacaaaatctagactctatatctatttctgttatgactccaattaatcccatgttagcggaatcgtgtgattctgtcaataaggcgtttaaaaaatttccatcaggaatgtttgcggaagtcaaatacgatggtgaaagagtacaagttcataaaaataataacgagtttgccttctttagtagaaacatgaaaccagtactctctcataaagtggattatctcaaagaatacataccgaaagcatttaaaaaagctacgtctatcgtattggattctgaaattgttcttgtagacgaacataatgtaccgctcccgtttggaagtttaggaatacacaaaaagaaagaatataaaaactctaacatgtgtttgttcgtgtttgactgtttgtactttgatggattcgatatgacggacattccattgtacgaacgaagatcttttctcaaagatgttatggttgaaatacccaatagaatagtattctcagagttgacgaatattagtaacgagtctcagttaactgacgtattggatgatgcactaacgagaaaattagaaggattggtcttaaaagatattaatggagtatacgaaccgggaaagagaagatggttaaaaataaagcgagactatttgaacgagggttccatggcagattctgccgatttagtagtactaggtgcttactatggtaaaggagcaaagggtggtatcatggcagtctttctaatgggttgttacgacgatgaatccggtaaatggaagacggttaccaagtgttcaggacacgatgataatacgttaagggagttgcaagaccaattaaagatgattaaaattaacaaggatcccaaaaaaattccagagtggttagtagttaataaaatctatattcccgattttgtagtagaggatccgaaacaatctcagatatgggaaatttcaggagcagagtttacatcttccaagtcccataccgcaaatggaatatccattagatttcctagatttactaggataagagaggataaaacgtggaaagaatctactcatctaaacgatttagtaaacttgactaaatcttaatagttacatacaaactgaaaattaaaataacactatttagttggtggtcgccatggatggtgttattgtatactgtctaaacgcgctagtaaaacatggcgaggaaataaatcatataaaaaatgatttcatgattaaaccatgttgtgaaagagtttgtgaaaaagtcaagaacgttcacattggcggacaatctaaaaacaatacagtgattgcagatttgccatatctggataatgcggtatccgatgtatgcaattcactgtataaaaagaatgtatcaagaatatccagatttgctaatttgataaagatagatgacgatgacaagactcctactggtgtatataattattttaaacctaaagatgccattcctgttattatatccataggaaaggatagagatgtttgtgaactattaatctcatcagacatatcgtgtgcatgcgtggagttaaattcatatcacgtagccattcttcccatggatgtttccttttttaccaaaggaaatgcatcattgattattctcctgtttgatttctctatcgatgcggcacctctcttaagaagtgtaaccgataataatgttattatatctagacaccagcgtatacatgacgagcttccgagttccaattggttcaagttttacataagtataaagtccgactattgttctatattatatatggttgttgatggatctgtgatgcatgcgatagctgataatagaactcacgcaattattagcaaaaatatattagacaatactacgattaacgatgagtgtagatgctgttattttgaaccacagattaggattcttgatagagatgagatgctcaatggatcatcgtgtgatatgaacagacattgtattatgatgaatttacctgatgtaggcgaatttggatctagtatgttggggaaatatgaacctgacatgattaagattgctctttcggtggctggtaatttaataagaaatcgagactacattcccgggagacgaggatatagctactacgtttacggtatagcctctagataatttttttaagcacgaaataaaaaacataattttaaaccaatctatttcatactattttgtgtgatcaccatggacataaagatagatattagtatttctggtgataaatttacggtgactactaggagggaaaatgaagaaagaaaaaaatatctacctctccaaaaagaaaaaactactgatgttatcaaacctgattatcttgagtacgatgacttgttagatagagatgagatgtttactattctagaggaatattttatgtacagaggtctattaggcctcagaataaaatatggacgactctttaacgaaattagaaaattcgacaatgatgcggaagaacaattcggtactatagaagaactcaagcagaaacttagattaaattctgaagagggagcagataactttatagattatataaaggtacaaaaacaggatatcgtcaaacttactgtatacgattgcatatctatgataggattgtgtgcatgcgtggtagatgtttggagaaatgagaaactgttttctagatggaaatattgtttacgagcgattaaactgtttattgatgatcacatgcttgataagataaaatctatactgcagaatagactagtatatgtggaaatgtcatagaaagttaaaagttaatgagagcaaaaatatataaggttgtattccatatttgttatttttttctgtaatagttagaaaaatacattcgatggtctatctatcagattattatgtgttataaggtactttttctcataataaactagagtatgagtaagatagtgtttttcaaaacatataaatctaaaattgatggatgagatatacagctattaatttcgaaaatatattttaatctgataactttaaacatggatttttgatggtggtttaacgttttaaaaaaagattttgttattgtagtatatgataatattaaaagatggatataaagaatttgctgactgcatgtactattttttacattactacattggctacggcagatatacctacttcgtcactgccacacgctccggtaaacggggcatgtgacgagggagaatatcttgataagaggcataatcaatgttgtaatcagtgtccacctggagaatttgccaaggtcagatgtagtggtagtgataacacaaaatgtgaacgctgcccacctcatacatataccgcaatccccaattactctaatggatgtcatcaatgtagaaaatgcccaacaggatcatttgataaggtaaagtgtaccggaacacagaacagtaaatgttcgtgtcttcctggttggtattgcgctactgattcttcacagactgaagattgtcgagattgtataccaaaaaggagatgtccatgcggatactttggtggaatagatgaacaaggaaatcctatttgtaaatcgtgttgtgttggtgaatattgcgactacctacgtaattatagacttgatccatttcctccatgcaaactatctaaatgtaattaattatgattttgatgataatgttaccatacattatatcgctacttggttagtgtattattcagtatgaagacctattaataattacttatcttttgacgatcttgttataattataatataaaaatacttatggcatagtaactcataattgctgacgcgataaattcgtaataatctgttttgttcaaaggaatctacaggcataaaaataaaaatataatttataatatactcttacagcgcgccatcatgaataacagcagtaaattaattgctgttattaatggatttagaaatagtggacgattttgtgatattaatatagttattaatgatgaaaggataaacgctcacagactcatcctatctggagcctccgaatatttttccattctgttttccaataattttatcgattctaatgaatacgaagttaatctaagtcatttagattatcaaagcgtaaacgatttgatcgattacatttatgggatacctttgagcctaactaacgataacgtgaaatatattctttcaaccgctgattttttacaaattggatctgctattacggagtgtgaaaattacatacttaaaaatctttgttctagaaactgtatcgatttctacatatacgctgataaatataataacaagaaaatagaatcagcgtcgtttaacacaatattacaaaatattttgagactcatcaacgatgaaaactttaaatacttaacagaggaatcaatgataaaaattttaagcgatgatatgttaaatataaaaaatgaggatttcgccccactaattctcattaaatggttagagagtactcaacaaccatgcaccgtcgagttacttaaatgcctcagaatatcattgctttccccacaagttataaaatcactttatagtcatcgactggttagttcaatctacgaatgtataacattcttaaacaatatagcattcttggatgaatcatttcctagataccatagcatcgagttgatatctatcggtataagtaattcgcatgataagatttccataaactgctacaatcataaaaaaaatacatgggaaatgatatcttcacgtagatataggtgtagtttcgcagtggccgtcctggataatattatttatatgatgggtggatatgatcagtccccgtatagaagttcaaaggttatagcgtacaatacatgtacaaattcttggatatatgatataccagagctaaaatatcctcgttctaattgtgggggactggctgatgacgaatacatttattgtataggcggcatacgcgatcaggattcatcgttgacatctagtattgatagatggaagccatcaaaaccatattggcagaagtatgctaaaatgcgcgaaccaaaatgtgatatgggggttgcgatgttaaacggattaatatatgttataggtggaatcgttaaaggtgacacgtgtaccgacgcactagagagtttatcagaagatggatggatgaagcatcaacgtcttccaataaaaatgtccaatatgtcgacgattgttcatgatggcaagatttatatatctggaggttacaacaatagtagtgtagttaatgtaatatcgaatttagtccttagctataattcgatatatgatgaatggaccaaattatcatcattaaacattcctagaattaatcccgctctatggtcagcgcataataaattatatgtaggaggaggaatatctgatgatgttcgaactaatacatctgaaacatacgacaaagaaaaagattgttggacattggataatggtcacgtgttaccacgcaattatataatgtataaatgcgaaccgattaaacataaatatccattggaaaaaacacagtacacgaatgattttctaaagtatttggaaagttttataggtagttgatagaacaaaatacataattttgtaaaaataaatcactttttatactaatatgacacgattaccaatacttttgttactaatatcattagtatacgctacaccttttcctcagacatctaaaaaaataggtgatgatgcaactctatcatgtaatcgaaataatacaaatgactacgttgttatgagtgcttggtataaggagcccaattccattattcttttagctgctaaaagcgacgtcttgtattttgataattataccaaggataaaatatcttacgactctccatacgatgatctagttacaactatcacaattaaatcattgactgctagagatgccggtacttatgtatgtgcattctttatgacatcgcctacaaatgacactgataaagtagattatgaagaatactccacagagttgattgtaaatacagatagtgaatcgactatagacataatactatctggatctacacattcaccggaaactagttctgagaaacctgattatatagataattctaattgctcgtcggtattcgaaatcgcgactccggaaccaattactgataatgtagaagatcatacagacaccgtcacatacactagtgatagcattaatacagtaagtgcatcatctggagaatccacaacagacgagactccggaaccaattactgataaagaagatcatacagttacagacactgtctcatacactacagtaagtacatcatctggaattgtcactactaaatcaaccaccgatgatacgtacaatgataatgatacagtaccaccaactactgtaggcggtagtacaacctctattagcaattataaaaccaaggactttgtagaaatatttggtattaccgcattaattatattgtcggccgtggcaatattctgtattacgtattatatatgtaataaacgttcacgtaaatacaaaacagagaacaaagtctagatttttgacttacataaatgtctgggatagtaaaatctatcatattgagcgggccatctggtttaggaaagacagccatagccaaaagactatgggaatatatttggatttgtggtgtcccataccactagatttcctcgtcctatggaacgagaaggtgtcgattaccattacgttaacagagaggccatctggaagggaatagccgccggaaactttctagaacatactgagtttttaggaaatatttacggaacttctaaaactgctgtgaatacagcggctattaataatcgtatttgtgtgatggatctaaacatcgatggcgttagaagtcttaaaaatacgtacctaatgccttactcggtgtatataagacctacctctcttaaaatggttgagaccaagcttcgttgtagaaacactgaagcggatgatgagattcatcgtcgtgtgatgttggcaaaaactgacatggatgaggcaggtgaagccggtctattcgacactattatcattgaagatgatgtgaatttagcatatagtaagttaattcagatactacaggaccgtattagaatgtattttaacactaattagagacttaagacttaaaacttgataattaataatataactcgtttttatatgtggctatttcaacgtctaatgtattagttaaatattaaaacttaccacgtaaaacttaaaatttaaaatgatatttcattgacagatagatcacacattatgaactttcaaggacttgtgttaactgacaattgcaaaaatcaatgggtcgttggaccattaataggaaaaggtggatttggtagtatttatactactaatgacaataattatgtagtaaaaatagagcccaaagctaacggatcattatttaccgaacaggcattttatactagagtacttaaaccatccgttatcgaagaatggaaaaaatctcacaatataaagcacgtaggtcttatcacgtgcaaggcatttggtctatacaaatccattaatgtggaatatcgattcttggtaattaatagattaggtgcagatctagatgcggtgatcagagccaataataatagattaccaaaaaggtcggtgatgttgatcggaatcgaaatcttaaataccatacaatttatgcacgagcaaggatattctcacggagatattaaagcgagtaatatagtcttggatcaaatagataagaataaattatatctagtggattacggattggtttctaaattcatgtctaatggcgaacatgttccatttataagaaatccaaataaaatggataacggtactctagaatttacacctatagattcgcataaaggatacgttgtatctagacgtggagatctagaaacacttggatattgtatgattagatggttgggaggtatcttgccatggactaagatatctgaaacaaagaattgtgcattagtaagtgccacaaaacagaaatatgttaacaatactgcgactttgttaatgaccagtttgcaatatgcacctagagaattgctgcaatatattaccatggtaaactctttgacatattttgaggaacccaattacgacaagtttcggcacatattaatgcagggtgtatattattaagtgtggtgtttggtcgataaaaattaaaaaataacttaatttattattgatctcgtgtgtacaaccgaaatcatggcgatgttttacgcacacgctctcggtgggtacgacgagaatcttcatgcctttcctggaatatcatcgactgttgccaatgatgtcaggaaatattctgttgtgttagtttataataacaagtatgacattgtaaaagacaaatatatgtggtgttacagtcaggtgaacaagagatatattggagcactgctgcctatgtttgagtgcaatgaatatctacaaattggagatccgatccatgatcaagaaggaaatcaaatctctatcatcacatatcgccacaaaaactactatgctctaagcggaatcgggtacgagagtctagacttgtgtttggaaggagtagggattcatcatcacgtacttgaaacaggaaacgctgtatatggaaaagttcaacatgattattctactatcaaagagaaggccaaagaaatgagtacacttagtccaggacctatcatcgattaccacgtctggataggagattgtatctgtcaagttactgctgtggacgtacatggaaaggaaattatgaaaatgagattcaaaaagggtgcggtgcttccgatcccaaatctggtaaaagttaaacttggggagaatgatacagaaaatctttcttctactatatcggcgacaccatcgaggtaaccacctctctggaagacagcgtgaataatgtactcatgaaacgtttggaaactatacgccatatgtggtctgttgtatatgatcattttgatattgtgaatggtaaagaatgctgttatgtgcatacgcatttgtctaatcaaaatcttataccgagtactgtaaaaacaaatttgtacatgaagactatgggatcatgcattcaaatggattccatggaagctctagagtatcttagcgaactgaaggaatcaggtggatggagtcccagaccagaaatgcaggaatttgaatatccagatggagtggaagacactgaatcaattgagagattggtagaggagttcttcaatagatcagaacttcaggctggtgaatcagtcaaatttggtaattctattaatgttaaacatacatctgtttcagctaagcaactaagaacacgtatacggcagcagcttccttctatactctcatcttttaccaacacaaagggtggatatttgttcattggagttgataataatacacacaaagtatttggattcacggtgggttacgactacctcagactgatagagaatgatatagaaaagcatatcaaaagactttgtgttgtgtatttctgtgagaagaaagaggacatcaagtacgcgtgtcgattcatcaaggtatataaacctggggatgaggctacctcgacatacgtgtgcgctatcaaagtggaaagatgctgttgtgctgtgtttgcagattggccagaatcatggtatatggatactaatggtatcaagaagtattctccagatgaatgggtgtcacatataaaattttaattaatgtaatagagaacaaataataaggttgtaatatcatatagacaataactaacaattaattagtaactgttatctcttttttaactaaccaactaactatatacctattaatacatcgtaattatagttcttaacatctattaatcattgattcgcttctttaattttttataaactaacattgttaattgaaaagggataacatgttacagaatataaattatatatggatttttttaaaaaggaaatacttgactggagtatatatttatctcttcattatatagcacgcgtgttttccaatttttccacatcccatataatacaggattataatctcgttcgaacatacgagaaagtggataaaacaatagttgattttttatctaggttgccaaatttattccatattttagaatatggggaaaatattctacatatttattctatggatgatgctaatacgaatattataattttttttctagatagagtattaaatattaataagaacgggtcatttatacacaatctcgggttatcatcatccattaatataaaagaatatgtatatcaattagttaataatgatcatccagataataggataagactaatgcttgaaaatggacgtagaacaagacattttttgtcctatatatcagatacagttaatatctatatatgtattttaataaatcatggattttatatagatgccgaagacagttacggttgtacattattacatagatgtatatatcactataagaaatcagaatcagaatcatacaatgaattaattaagatattgttaaataatggatcagatgtagataaaaaagatacgtacggaaacacaccttttatcctattatgtaaacacgatatcaacaacgtggaattgtttgagatatgtttagagaatgctaatatagactctgtagactttaatagatatacacctcttcattatgtctcatgtcgtaataaatatgattttgtaaagttattaatttctaaaggagcaaatgttaatgcgcgtaataaattcggaactactccattttattgtggaattatacacggtatctcgcttataaaactatatttggaatcagacacagagttagaaatagataatgaacatatagttcgtcatttaataatttttgatgctgttgaatctttagattatctattatccagaggagttattgatattaactatcgtactatatacaacgaaacatctatttacgacgctgtcagttataatgcgtataatacgttggtctatctattaaacaaaaatggtgattttgagacgattactactagtggatgtacatgtatttcggaagcagtcgcaaacaacaacaaaataataatggaagtactattgtctaaacgaccatctttgaaaattatgatacagtctatgatagcaattactaaacataaacagcataatgcagatttattgaaaatgtgtataaaatatactgcgtgtatgaccgattatgatactcttatagatgtacagtcgctacagcaatataaatggtatattttaagatgtttcgatgaaatagatatcatgaagagatgttatataaaaaataaaactgtattccaattagttttttgtatcaaagacattaatactttaatgagatacggtaaacatccttctttcgtgaaatgcactagtctcgacgtatacggaagtcgtgtacgtaatatcatagcatctattagatatcgtcagagattaattagtctattatccaagaagctggatcctggagataaatggtcgtgttttcctaacgaaataaaatataaaatattggaaaactttaacgataacgaactatccacatatctaaaaatcttataaacattattaaaatataaaatctaagtaggataaaatcacactacatcattgtttccttttagtgctcgacagtgtatactatttttaacgctcataaataaaaatgaaaacgatttccgttgttacgttgttatgcgtactacctgctgttgtttattcaacatgtactgtacccactatgaataacgctaaattaacgtctaccgaaacatcgtttaatgataaccagaaagttacgtttacatgtgatcagggatatcattctttggatccaaatgctgtctgtgaaacagataaatggaaatacgaaaatccatgcaaaaaaatgtgcacagtttctgattatgtctctgaactatataataaaccgctatacgaagtgaattccaccatgacactaagttgcaacggcgaaacaaaatattttcgttgcgaagaaaaaaatggaaatacttcttggaatgatactgttacgtgtcctaatgcggaatgtcaacctcttcaattagaacacggatcgtgtcaaccagttaaagaaaaatactcatttggggaatatatgactatcaactgtgatgttggatatgaggttattggtgcttcgtacataagttgtacagctaattcttggaatgttattccatcatgtcaacaaaaatgtgatatgccgtctctatctaacggattaatttccggatctacattttctatcggtggcgttatacatcttagttgtaaaagtggttttacactaacggggtctccatcatccacatgtatcgacggtaaatggaatcccatactcccaatatgtgtacgaactaacgaaaaatttgatccagtggatgatggtcccgacgatgagacagatttgagcaaactctcgaaagacgttgtacaatatgaacaagaaatagaatcgttagaagcaacttatcatataatcatagtggcgttgacaattatgggcgtcatatttttaatctccgttatagtattagtttgttcctgtgacaaaaataatgaccaatataagttccataaattgctaccgtaaatataaatccgttaaaataattaataatttaataacaaacaagtatcaaaagattaaagacttatagctagaatcaattgagatgtcttcttcagtggatgttgatatctacgatgccgttagagcatttttactcaggcactattataacaagagatttattgtgtatggaagaagtaacgccatattacataatatatacaggctatttacaagatgcgccgttataccgttcgatgatatagtacgtactatgccaaatgaatcacgtgttaaacaatgggtgatggatacacttaatggtataatgatgaatgaacgcgatattactgtaagcgttggcaccggaatactattcatggaaatgtttttcgattacaataaaaatagtatcaacaatcaactaatgtatgatataattaatagcgtatctataattctagctaatgagagatatagaagcgcttttaacgacgatggtatatacatccgtagaaatatgattaacaagttgtacggatacgcatctctaactactattggcacgatcgctggaggtgtttgttattatctgttgatgcatctagttagtttgtataaataattatttcaatatactagttaaaattttaagattttaaatgtataaaaaactaataacgtttttatttgtaataggtgcattagcatcctattcgaataatgagtacactccgtttaataaactgagtgtaaaactctatatagatggagtagataatatagaaaattcatatactgatgataataatgaattggtgttaaattttaaagagtacacaatttctattattacagagtcatgcgacgtcggatttgattccatagatatagatgttataaacgactataaaattattgatatgtataccattgactcgtctactattcaacgcagaggtcacacgtgtagaatatctaccaaattatcatgccattatgataagtacccttatattcacaaatatgatggtgatgagcgacaatattctattactgcagagggaaaatgctataaaggaataaaatatgaaataagtatgatcaacgatgatactctattgagaaaacatactcttaaaattggatctacttatatatttgatcgtcatggacatagtaatacatattattcaaaatatgatttttaaaaatttaaaatatattatcacttcagtgacagtagtcaaataacaaacaacaccatgagatatattataattctcgcagttttgttcattaatagtatacatgctaaaataactagttataagtttgaatccgtcaattttgattccaaaattgaatggactggggatggtctatacaatatatcccttaaaaattatggcatcaagacgtggcaaacaatgtatacaaatgtaccagaaggaacatacgacatatccgcatttccaaagaatgatttcgtatctttctgggttaaatttgaacaaggcgattataaagtggaagagtattgtacgggactatgcgtcgaagtaaaaattggaccaccgactgtaacattgactgaatacgacgaccatatcaatttgtacatcgagcatccgtatgctactagaggtagcaaaaagattcctatttacaaacgcggtgacatgtgtgatatctacttgttgtatacggctaacttcacattcggagattctaaagaaccagtaccatatgatatcgatgactacgattgcacgtctacaggttgcagcatagactttgtcacaacagaaaaagtgtgcgtgacagcacagggagccacagaagggtttctcgaaaaaattactccatggagttcgaaagtatgtctgacacctaaaaagagtgtatatacatgcgcaattagatccaaagaagatgttcccaatttcaaggacaaaatggccagagttatcaagagaaaatttaatacacagtctcaatcttatttaactaaatttctcggtagcacatcaaatgatgttaccacttttcttagcatgcttaacttgactaaatattcataactaatttttattaatgatacaaaaacgaaataaaactgcatattatacactggttaacgcccttataggctctaaccattttcaagatgaggtccctgattatagtccttctgttcccctctatcatctactccatgtctattagacgatgtgagaagactgaagaggaaacatggggattgaaaatagggttgtgtataattgccaaagatttctatcccgaaagaactgattgcagtgttcatctcccaactgcaagtgaaggattgataactgaaggcaatggattcagggatatacgaaacaccgataaattataaaaaaagcaatgtgtccgctgtttccgttaataatactattttcgtaactggcggattattcataaataactctaatagcacgatcgtggttaacaatatggaaaaacttgacatttataaagacaaacaatggtcgattatagaaatgcctatggctagggtatatcacggcatcgactcgacatttggaatgttatattttgccggaggtctatccgttaccgaacaatatggtaatttagagaaaaacaacgagatatcttgttacaatcctagaacgaataagtggtttgatatttcatatactatttataagatatccatatcatcattgtgtaaactaaataacgtcttctatgtatttagtaaggacattggatatgtggaaaagtatgatggtgcatggaagttagtacatgatcgtctccccgctataaaggcattatcaacttctccttattgattgaaaatgaaaatataaatagtttttatgtatagcagtattaccctatagttttattgcttactactaacatggatacagatgttacaaatgtagaagatatcataaatgaaatagatagagagaaagaagaaatactaaaaaatgtagaaattgaaaataataaaaacattaacaagaatcatccaagtggatatattagagaagcactcgttattaatactagtagtaatagtgattccattgataaagaagttatagaatgtatctgtcacgatgtaggaatatagatcatatctactaatttttataatcgatacaaaacataaaaaacaactcgttattacatagcaggcatggaatccttcaagtattgttttgataacgatggcaagaaatggattatcggaaatactttatattctggtaattcaatactctataaggtcagaaaaaatttcactagttcgttctacaattacgtaatgaagatagatcacaaatcacacaagccattgttgtctgaaatacgattctatatatctgtattggatcctttgactatcgacaactggacacgggaacgtggtataaagtatttggctattccagatctgtatggaattggagaaaccgatgattatatgttcttcgttataaagaattcgggaagagtattcgccccaaaggatactgaatcagtcttcgaagcatgcgtcactatgataaacacgttagagtttatacactctcaaggatttacccatggaaaaatagaaccgaggaatatactgattagaaataaacgtctttcactaattgactattctagaactaacaaactatacaagagtggaaactcacatatagattacaacgaggacatgataacttcaggaaatatcaattatatgtgtgtagacaatcatcttggagcaacagtttcaagacgaggagatttagaaatgttgggatattgcatgatagaatggttcggtggcaaacttccatggaaaaacgaaagtagtataaaagtaataaaacaaaaaaaagaatataaaaaatttatagctactttctttgaggactgttttcctgaaggaaatgaacctctggaattagttagatatatagaattagtatacacgttagattattctcaaactcctaattatgacagactacgtaaactgtttatacaagattgaaattatattcttttttttatagagtgtggtagtgttacggatatctaatattaatattagactatctctatcgcgctacacgaccaatatcgattactatggatatcttctatgaaaggagagaatgtatttatttctccagcgtcaatctcgtcagtattgacaatactgtattatggagctaatggatccactgctgaacagctatcaaaatatgtagaaacggaggagaacacggataaggttagcgctcagaatatctcattcaaatccatgaataaagtatatgggcgatattctgccgtgtttaaagattcctttttgagaaaaattggcgataagtttcaaactgttgacttcactgattgtcgcactatagatgcaatcaacaagtgtgtagatatctttactgaggggaaaatcaatccactattggatgaaccattgtctcctagcaattagtgccgtatactttaaagcaaaatggttgacgccattcgaaaaggaatttaccagtgattatcccttttacgtatctccgacggaaatggtagacgtaagtatgatgtctatgtacggcaaggcatttaatcacgcatctgtaaaagaatcattcggcaacttttcaatcatagaactgccatatgttggagatactagtatgatggtcattcttccagacaagattgatggattagaatccatagaacaaaatctaacagatacaaattttaagaaatggtgtgactttatggatgctatgtttatagatgttcacattcccaagtttaaggtaacaggctcgtataatctggtggatactctagtaaagtcaggactgacagaggtgttcggttcaactggagattatagcaatatgtgtaatttagatgtgagtgtcgacgctatgatccacaaaacgtatatagatgtcaatgaagagtatacagaagcagctgcagcaacttctgtactagtggcagactgtgcatcaacaattacaaatgagttctgtgcagatcatccgttcatctatgtgattaggcatgttgatggaaaaattcttttcgttggtagatattgctctccgacaactaattgttaaccattttttttaaaaaaaatagaaaaaacatgtggtattagtgcaggtcgttgttcttccaattgcaattggtaagatgacggccaactttagtacccacgtcttttcaccacagcactgtggatgtgacagactgaccagtattgatgacgtcaaacaatgtttgactgaatatatttattggtcgtcctatgcataccgcaacaggcaatgcgctggacaattgtattccacactcctctcttttagagatgatgcggaattagtgttcatcgacattcgcgagctggtaaaaaatatgccgtgggatgatgtcaaagattgtacagaaatcatccgttgttatataccggatgagcaaaaaaccatcagagagatttcggccatcatcggactttgtgcatatgctgctacttactggggaggtgaagaccatcccactagtaacagtctgaacgcattgtttgtgatgcttgagatgctaaattacgtggattataacatcatattccggcgtatgaattgatgagttgtacatcttgacattttctttcttctcttctccctttcttctcttctcccttcctccctcttctccctttcccagaaacaaacttttttacccactataaaataaaatgagtatactacctgttatatttctttctatatttttttattcttcattcgttcagacttttaacgcgtctgaatgtatcgacaaagggcaatattttgcatcattcatggagttagaaaacgagccagtaatcttaccatgtcctcaaataaatacgctatcatccggatataatatattagatattttatgggaaaaacgaggagcggataatgatagaattataccgatagataatggtagcaatatgctaattctgaacccgacacaatcagactctggtatttatatatgcattaccacgaacgaaacctactgtgacatgatgtcgttaaatttgacaatcgtgtctgtctcagaatcaaatatagattttatctcgtatccacaaatagtaaatgagagatctactggcgaaatggtatgtcccaatattaatgcatttattgctagtaacgtaaacgcagatattatatggagcggacatcgacgccttagaaataagagacttaaacaacggacacctggaattattaccatagaagatgttagaaaaaatgatgctggttattatacatgtgttttagaatatatatacggtggcaaaacatataacgtaaccagaattgtaaaattagaggtacgggataaaataataccttctactatgcaattaccagatggcattgtaacttcaataggtagtaatttgactattgcatcgttgagacctcccacaacggatgcagacgtcttttggataagtaatggtatgtattacgaagaagatgatggggacggaaacggtagaataagtgtagcaaataaaatctatatgaccgataagagacgtgttattacatcccggttaaacattaatcctgtcaaggaagaagatgctacaacgtttacgtgtatggcgtttactattcctagcatcagcaaaacagttactgttagtataacgtgaatgtatgttgttacatttccatgtcaattgagtttataagaatttttatacattatcttccaacaaacaattgacgaacgtattgctatgattaactcccacgatactatgcatattattaatcattaacttgcagactatacctagtgctattttgacatactcatgttcttgtgtaattgcggtatctatattattaaagtacgtaaatctagctatagttttattatttaattttagataatataccgtctccttatttttaaaaattgccacatcctttattaaatcatgaatgggaatttctatgtcatcgttagtatattgtgaacaacaagagcagatatctataggaaagggtggaatgcgatacattgatctatgtagttttaaaacacacgcgaactttgaagaatttatataaatcattccatcgatacatccttctatgttgagatgtatatatccaggaattcgtttattaatatcgggaaatgtataaactaaaacattgcccgaaagcggtgcctctatctgcgttatatccgttcttaacttacaaaatgtaaccaatacctttgcatgacttgttttgttcggcaacgttagtttaaacttgacgaatggattaattacaatagcatgatccgcgcatctattaagtttttttactttaacgcccttgtatgtttttacagagactttatctaaatttctagtgcttgtatgtgttataaatataacgggatatagaaccgaatcacctaccttagatacccaattacattttatcagatccagataataaacaaattttgtcgccctaactaattctatattgttatatattttacaattggttatgatatcatgtaataacttggagtctaacgcgcatcgtcgtacgtttatacaattgtgatttagtgtagtatatctacacatgtatttttccgcactatagtattctggactagtgataaaactatcgttatatctatcttcaatgaactcatcgagatattgctctctgtcatattcatacacctgcataaactttctagacatcttacaatccgtgttattttaggatcatatttacatatttacgggtatatcaaagatgttagattagttaatgggaatcgtctataataatgaatattaaacaattatatgaggacttttaccacaaagcatcataaaaatgagtcgtcgtctgatttatgttttaaatatcaaccgcaaatcaactcataaaatacaagagaatgaaatatatacatattttagtcattgcaatatagaccatacttctacagaacttgattttgtagttaaaaactatgatctaaacagacgacaacctgtaactgggtatactgcactacactgctatttgtataataattactttacaaacgatgtactgaagatattattaaatcatggagtggatgtaacgatgaaaaccagtagcggacgtatgcctgtttatatattgcttactagatgttgtaatatttcacatgatgtagtgatagatatgatagacaaagataaaaaccacttattacatagagactattccaacctattactagagtatataaaatctcgttacatgttattaaaggaagaggatatcgatgagaacatagtatccactttattagataagggaatcgatcctaactttaaacaagacggatatacagcgttacattattattatttgtgtctcgcacacgtttataaaccaggtgagtgtagaaaaccgataacgataaaaaaggccaagcgaattatttctttgtttatacaacatggagctaatctaaacgcgttagataattgtggtaatacaccattccatttgtatcttagtattgaaatgtgtaataatattcatatgactaaaatgctgttgacttttaatccgaatttcgaaatatgtaataatcatggattaacgcctatactatgttatataacttccgactacatacaacacgatattcttgttatgttaatacatcactatgaaacaaatgttggagaaatgccgatagatgagcgtcgtatgatcgtattcgagtttatcaaaacatattctacacgtccggcagattcgataacttatttgatgaataggtttaaaaatataaatatttatacccgctatgaaggaaagacattattacacgtagcatgtgaatataataatacacacgtaatagattatcttatacgtatcaacggagatataaatgcgttaaccgacaataacaaacacgctacacaactcattatagataacaaagaaaattccccatataccattaattgtttactgtatatacttagatatattgtagataagaatgtgataagatcgttggtggatcaacttccatctctacctatctttcgtcgcttatcatactagtcatatcctaaatgttgatcatattccaccaaatgattgtgaaagagattgagattaaatcgtctaacaaacaattagtttttatgacattaacatataataaataaattaatcattattgacttaacgatgacgaaagttatcatcatcttaggattcttgattattaatacaaattcattgtctatgaaatgtgaacaaggtgtctcatattataattcacaagaattaaagtgttgtaaactatgtaagccaggaacatattcagatcatcgatgtgataaatacagcgataccatttgtggacattgtccgagtgacacattcacgtcaatatataatcgttctccttggtgtcatagttgtagaggtccatgtggtactaatcgagtagaggtcacaccttgtacacctaccacaaatagaatctgtcattgtgactcgaatagttattgtctccttaaagcttctgatggtaactgtgttacatgtgctcctaaaacaaaatgtggtcgtgggtatggaaagaaaggagaagatgaaatgggtaataccatttgtaagaaatgtcggaagggtacttattcagatattgtatctgactctgatcaatgtaaaccaatgacaagataagacttactcgcatctactggatagacataaaatatcctcctcgtaataatgaaatataaatatacactaattattaatatcaataacaatcgagtattaatatataggtcatttttaaatcccttttgggttccgtcccaaacggcgtttcggtctgcgtcgccgccatggccatgccgagcctctccgcgtgctcctccatcgaggacgacttcaactatggcagctcggtggcgtctgccagcgtgcacatacgaatggcatttctaagaaaagtctacggtatcctttgtctacaatttcttttaacaacggcaacaactgcagtatttttatactttgactgcatgcggacatttatacaagggagtcctgttctaatattggcatcaatgttcggatctataggcttgattttcgcattgactttacacagacataaacatcccctgaatctgtacctgctttgtggatttacactgtcggaatctctaacgctggcctctgttgttactttctatgatgtgcatgtcgttatgcaagctttcatgctgactactgcagcgtttcttgctctgactacatatactctacaatcaaagagagatttcagtaaacttggagcaggattgtttgctgctttgtggattttaattttgtcaggactcttggggatatttgtgcaaaatgagacagtggagctggtcctgtctgcttttggggcccttgtattctgtggattcattatctatgacacgcactcactaatacataagctctcgcctgaagagtatgtgttagcctctatcaatctctacttggatatcatcaatctgttcttgcatctgttgcagcttttggaagtatctaataagaaataaagtttaaaatagaattaataaaaacatataggtcattttttaaacatggattggaaaccaaggtagttagttaatacacacaagatatatttttttcacatcatccacccatgggtaacaccaaggttgttagttaataatatacaagatattttttctcactctgatccatgtaaaccaaggacgagataagacactctcattcctcatccacaacccattaaaaaaatggaaattaaagccctctattagcataaacggctacaggtctaccatcaggttaaccttcgtctaccttcacaatggcctttccttgtgcccagttcagaccctgtcattgccacgctactaaggactccctgaataccgtggccgacgtcagacattgtctgactgaatacatcctgtgggtttctcatagatggacccatagagaaagcgctcatctgttctccgtgtggtctcggaacatattctcacaccgtctcttccgcagataaatgcgaacccgtacccagaaatacctttaactatatcgatgtggaaattaatctgtatcccgtcaacgacacatcgtgtactcggacgaccactaccggtctcagcgaatccatctcaacgtcggaactaactattactatgaatcataaagactgtaatcccgtctttcgtgatggatacttctccgttcttaataaggtagcgacttcaggtttctttacaggagaaaggtgtgcactctgaatttcgagattaaatgcaataacaaagattcttcctccaaacagttaacgaaagcaaagaatgatactatcatgccgcattcggagacagtaactctagtgggcgacatctatatactatatagtaataccaatactcaagactacgaaactgatacaatctcttatcatgtgggtaatgttctcgatgtcgatagccatatgcccggtagttgcgatatacataaactgatcactaattccaaacccacccactttttatagtaagtttttcacccataaataataaatacaataattaatttctcgtaaaagtagaaaatatattctaatttattgcacggtaaggaagtagaatcataaagaacagtactcaatcaatagcaattatgaaacaatatatcgtcctggcatgcatgtgcctggcggcagctgctatgcctgccagtcttcagcaatcatcctcatcctcctcctcgtgtacggaagaagaaaacaaacatcatatgggaatcgatgttattatcaaagtcacaaagcaagaccaaacaccgaccaatgataagatttgccaatccgtaacggaaattacagagtccgagtcagatccagatcccgaggtggaatcagaagatgattccacatcagtcgaggatgtagatcctcctaccacttattactccatcatcggtggaggtctgagaatgaactttggattcaccaaatgtcctcagattaaatccatctcagaatccgctgatggaaacacagtgaatgctagattgtccagcgtgtccccaggacaaggtaaggactcatgaagaagctcttgctatgatcaaagactgtgaggtgtctatcgacatcagatgtagcgaagaagagaaagacagcgacatccagtactcgggtctaacatctctcataagaaagtgagttacgaagatatcatcggttcaacgatcgtcgatacaaaatgtgtcaagaatctagagtttagcgttcgtatcggagacatgtgcaaggaatcatctgaacttgaggtcaaggatggattcaagtatgtcgacggatcggcatctgaaggtgcaaccgatgatacttcactcatcgattcaacaaaactcaaagcgtgtgtctgaatcgataactctattcatctgaaattggatgagtagggttaatcgaacgattcaggcacaccacgaattaaaaaagtgtaccggacactatattccggtttgcaaaacaaaaatgttcttaactacattcacaaaaagttacctctcgcgacttcttctttttctgtctcaatagtgtgatacgattatgacactattcctattcctattcctatttcctttcagagtatcacaaaaatattaaacctctttctgatggtctcataaaaaaagttttacaaaaatatttttattctctttctctctttgatggtctcataaaaaaagttttacaaaaatatttttattctctttctctctttgatggtctcataaaaaaagttttacaaaaatatttttattctctttctctctttgatggtctcataaaaaaagttttacaaaaatatttttattctctttctctctttgatggtctcataaaaaaagttttacaaaaatatttttattctctttctctctttgatggtctcataaaaaaagttttacaaaaatatttttattctctttctctctttgatggtctcataaaaaaagttttacaaaaatatttttattctctttctctctttgatggtctcataaaaaaagttttacaaaaatatttttattctctttctctctttgatggtctcataaaaaaagttttacaaaaatatttttattctctttctctctttgatggtctcataaaaaaagttttacaaaaatatttttattctctttctctctttgatggtctcataaaaaaa

SEQ ID NO: 195 - protein, 193 aa, Homo sapiens
  Erythropoietin protein
  SIGNAL (1)...(27)
MGVHECPAWLWLLLSLLSLPLGLPVLGAPPRLICDSRVLERYLLEAKEAENITTGCAEHCSLNENITVPDTKVNFYAWKRMEVGQQAVEVWQGLALLSEAVLRGQALLVNSSQPWEPLQLHVDKAVSGLRSLTTLLRALGAQKEAISPPDAASAAPLRTITADTFRKLFRVYSNFLRGKLKLYTGEACRTGDR

SEQ ID NO: 196 - protein, 272 aa, Artificial Sequence
  anti-VEGF single chain antibody
  SIGNAL (1)...(20): signal sequence
METDTLLLWVLLLWVPGSTGDEVQLVESGGGLVQPGGSLRLSCAASGFTISDYWIHWVRQAPGKGLEWVAGITPAGGYTYYADSVKGRFTISADTSKNTAYLQMNSLRAEDTAVYYCARFVFFLPYAMDYWGQGTLVTVSSGGGGSGGGGSGGGGSDIQMTQSPSSLSASVGDRVTITCRASQDVSTAVAWYQQKPGKAPKLLIYSASFLYSGVPSRFSGSGSGTDFTLTISSLQPEDFATYYCQQGYGNPFTFGQGTKVEIKRDYKDDDDK

SEQ ID NO: 197 - protein, 121 aa, Homo sapiens
  plasminogen K5 domain
  SIGNAL (1)...(15): signal sequence
MYRMQLLSCIALSLALVTNSPVVLLPDVETPSEEDCMFGNGKGYRGKRATTVTGTPCQDWAAQEPHRHSIFTPETNPRAGLEKNYCRNPDGDVGGPWCYTTNPRKLYDYCDVPQCAAPSFD

SEQ ID NO: 198 - DNA, 186874 bp, Artificial Sequence
  GLV-2b452
tttttttatgagaccatcaaagagagaaagagaataaaaatatttttgtaaaactttttttatgagaccatcaaagagagaaagagaataaaaatatttttgtaaaactttttttatgagaccatcaaagagagaaagagaataaaaatatttttgtaaaactttttttatgagaccatcaaagagagaaagagaataaaaatatttttgtaaaactttttttatgagaccatcaaagagagaaagagaataaaaatatttttgtaaaactttttttatgagaccatcaaagagagaaagagaataaaaatatttttgtaaaactttttttatgagaccatcaaagagagaaagagaataaaaatatttttgtaaaactttttttatgagaccatcaaagagagaaagagaataaaaatatttttgtaaaactttttttatgagaccatcaaagagagaaagagaataaaaatatttttgtaaaactttttttatgagaccatcaaagagagaaagagaataaaaatatttttgtaaaactttttttatgagaccatcagaaagaggtttaatatttttgtgatactctgaaaggaaataggaataggaataggaatagtgtcataatcgtatcacactattgagacagaaaaagaagaagtcgcgagaggtaactttttgtgaatgtagttaagaacatttttgttttgcaaaccggaatatagtgtccggtacacttttttaattcgtggtgtgcctgaatcgttcgattaaccctactcatccaatttcagatgaatagagttatcgattcagacacacgctttgagttttgttgaatcgatgagtgaagtatcatcggttgcaccttcagatgccgatccgtcgacatacttgaatccatccttgacctcaagttcagatgattccttgcacatgtctccgatacgaacgctaaactctagattcttgacacattttgtatcgacgatcgttgaaccgatgatatcttcgtaactcactttcttatgagagatgttagacccgagtactggatgtcgctgtctttctcttcttcgctacatctgatgtcgatagacacctcacagtctttgatcatagcaagagcttcttcatgagtccttaccttgtcctggggacacgctggacaatctagcattcactgtgtttccatcagcggattctgagatggatttaatctgaggacatttggtgaatccaaagttcattctcagacctccaccgatgatggagtaataagtggtaggaggatctacatcctcgactgatgtggaatcatcttctgattccacctcgggatctggatctgactcggactctgtaatttccgttacggattggcaaatcttatcattggtcggtgtttggtcttgctttgtgactttgataataacatcgattcccatatgatgtttgttttcttcttccgtacacgaggaggaggatgaggatgattgctgaagactggcaggcatagcagctgccgccaggcacatgcatgccaggacgatatattgtttcataattgctattgattgagtactgttctttatgattctacttccttaccgtgcaataaattagaatatattttctacttttacgagaaattaattattgtatttattatttatgggtgaaaaacttactataaaaagtgggtgggtttggaattagtgatcagtttatgtatatcgcaactaccgggcatatggctatcgacatcgagaacattacccacatgataagagattgtatcagtttcgtagtcttgagtattggtattactatatagtatatagatgtcgcccactagagttactgtctccgaatgcggcatgatagtatcattctttgctttcgttaactgtttggaggaagaatctttgttattgcatttaatctcgaaattcagagtgcacacctttctcctgtaaagaaacctgaagtcgctaccttattaagaacggagaagtatccatcacgaaagacgggattacagtctttatgattcatagtaatagttagttccgacgttgagatggattcgctgagaccggtagtggtcgtccgagtacacgacgtgtcgttgacgggatacaggttaatttccacatcgatatagttaaaggtatttctgggtacgggttcgcatttatctgcggaagagacggtgtgagaatatgttccgagaccacacggagaacagatgacgtctccggatactccgtatcctattccacattttgtttgggaaacacatgccttgcatccggatgatcctttgagaagacaataatatccgggagagcattcacagattctattgtgagtcgtgttacacgatcgcgtcttccgttacaacttagacaagcgggtaaatgattattgcgagatgtgaaggtacccgaaccacacggcgtacattgtgtgttagtcttgctatcgcataatctggaagcgtatgttcccggacacaaattatggcgtttgtattcgttgtctttacactttccatcggatggtgcatgcggtgctatatctcttccgtttattattatacatgagagaaacaatatatacgagtataatacggacttcatgatttaataatgtagtaatcgtcgtcttgttcctgtttcctacttctccaatcatatagatattttctttctatcatggataatatttgtaatggttctttccgtacaacatactgtttagatgatattgcgcataatttccggaggcaaatacgatagtctagattgaccgatggtagactctaatttattgagtgctttgtcgacgagtttacttttacgctccatcgatagatggcactgttctatgagatcgtcgtacatgggaaatgaaatgtgtctgtctgaatgtatggctttaagatagctgtgataccgtatacaggtcggtgtcggagattcgaatctctttaaggcgacttatgtcacgatgatggaatctatcttatcgaatgatatatttttcataaatacacttttatagtcctcgtttaaacagaatttactatgtagttccgcgaatgactcgtcccttaataggcagtaggctagtatcttttttacgtagtaatcgtcgtagggagagacatcttgtagaacaacgatttaatcataggtagagatactttcagtctgtggtggatgatgtcattcacaacatccgccttgtatatgatgtttctgttttcaaacaccaagtcgaataccgtctttagtcggaaggttgatgtcgtatccgatgtatgaggcaacattgttgttacaattttgaaaggcggtattatagtattcgtctttctgaatgtcgaacctatctaatagataccgtagtatattgagagtgtatccttgattatgttttatgaatagataaagtagatgttgtccttcttccttttgttcgtgccaattgagtaacattatgagaatatgacctgttgcacaatcgttccatgatgggtgtacaatcaagattattacgtatcctcgtatcggctcctcgagataaaagagcatacaccacacgaggactatgtttggtatactgttgaaggtaagtgtgtaaccgcgttaatgtttgctccataatctattatcgcgtagatgaatcgcttctcggctcgcatcttagtgtgacttaacttgtaataattgctttcgtagaacgtggatatgtgtttacagtagtaatgaagagaagtgagttcatcctcgtcggcgcaattagggtcggatcctttgtacagaacgtaatagtttaagctcccattgaatttatatctaagataacacagcaatagatcggatgatttactaaagtcatcaatggtgtccgttagtatatcaaagatcttgttatcgattgatagtggtcatccttgctatcaaagttacgcatgccgtggtgtaacaatatctttaatacagatggattaaatcgtgtattcatcgtatagcaatgtaatggagagttacctcgtttattcagatcgcagtgtttaataactagcttaaacagatgagacgatgtatccacatcaaagaacgtaaaatacatatgacagacattgttgacagaaacgtgaccttcattcttaccgtcgtccataaatacgttaggtatgtaccacatactgtcgcgaacgatgcgtacaatctcgtccatctcataatgatttactttttcataattaaagatgtgaaagaaaaccgaacaatatatttttttagtaatgtttatgcgagacatataaaataaactccgtgtttatgatgccggtaaatgtttttatcatcttggacggaatcgattttgtaatatgtcatggaaacaaatgaaacaggacattatcgctccatgataaattatttaatggagtaataaagtatctccatgggtaatttcgaaatcaagttatcgtctgtattaatgttgtccactatggagtcgatcctctcattgttctttacagtttctgtaatgatggacgttagttcttttttgtaccatttgatgtcggattctttgcgtatctcaatttgtggcgtttgcttcgtttaaataatatatcaaacatggagacgcctgatatgtagacattcttcattctattaatgtctactctatagcgctttagttccttatgacgaccggcgatatcatactttactttagaaggaaaatcatcatctaggattaaggcgtatctgatacaggcgaataatggttcaggatatagatagcgtatatctctattaaatgcgtcaatcatagtctctagagtgggatggtaactcagtaataaatcaactagcttcgttttgttttctctttggtaactgcttttctggatggccgtattgattatcgagcgtgacactcgctccatattccaataaccgctttgcaaattgtatattattgacatcgaccgcgtaatatagtagagttatcgatcatatctatatcatccatgtacttgcttagtatatcaaatacatctatcagtatggtttcataacagtgatacccgcaattattaaatctcgataatatcagaccgtacatacatagacggccattgttcgatacgtgatttacagccgcgtgtccatattttccacgataaaccttacgacgtttacatcgacgagattattattaacaaagtagtcgtgcagaggatagttgttgtccgttatctaacatgcatcgaacgaccatatcgccgtaatgtaagtagtttatcaacatggcttgtacatcctgttgtctaaatctctttagaatgttatcgatgatgtagtggttatattctctggaatcgtacgaagtaatactacgcattacgtcgacaagagtatgacgtctctcaataagaagattaacgatttccatgtctacattatatggggttactctaaatcgcttgtttagataatatagggctgacgtcgtatactctacacgtgtccacatcctttattaataataatttaacaatctctatatctatggttgagaaagaccagtagtattggatgggtaaagatcctccttcgtctctgccatggatggaaacattgttatcgatcaaacatttaattacatccttggatagagattgagattctctatgagacgatatatagtaatgaagagagttcttacacatatcactgtcgtacatacaggtacgaaatacgtaaccggtgctgtaacattctgatttaagaagccatagcaatacttctggtctcggattaggcgtcgttacgtatatatccaccaatccgagaccattgattgcataattcgtattcttggacggacgtatccgtttatccacaattaggtattttagcagacgtaagtcgatattatccgaatacagatcgaaatcatttatattcgacttgagttcgttagaggaatttgaatagctggatatcagtagatgcacaatctgagattttacgtatctatgcttactgtatactcctagcggagttaatccttcgttgtttctacaaagtctctcgactccgcgagagaacaatcttaatgtctgtatcgcatttattggagacgtaacaatgtagcgcattgtttcctcgtctatctatatgttttgataagttgtgacacgtttcaatttctagttttatttttttgtacgtcacatcttcatccagtagacgacatagaatagtgcactctctaccacaataatccatagctattctggtgctaattattcctatttcacgaaggcaatcattcctcataagatgataaaaagtgtagtggagatttagtatttagcagtgcggatatgatccaagagggtgagatagtcgttctcgttcagaatctttcgcagcataagtagtatgtcgatatacttatcgttgaagactctttataaaagtctatttgtttatatttattgcggatagcagtatttccctataaaaagtatacgtcctgtggtgtctttaatcatgtacatgaatggatggtttatgtagaccttcgtacgatataccatcgaaaagttaatcgtaaatactcctgtaacggccgatgcttctgtatactcctcattaacatctataaacgtcgtatgtagaaatttttctacagtgatagtttcattacacatcttgctaaaatctgcataatatccgaatatattagtaagtcctaaattttctaaaatcggtaccagattatacggttctgtcatttccactttaaactttggcatatacaagtctatacttttagtagataacataccacaccattttttaaatttttcatctgttatatttttttctatgttatatataccttctatgtcgtccggtagtataattaccatactagagtttccctcgtatggaatatcgataatagagaatcctccgaataattcattaatatgtacatattgcaagttattctcggtacccaccatcatatcaacgctggtaactatattcttagaaatataaaacttgtctgtatatgtaagatgtttagaaaatggatatttccacattgctttaaaatggacggcgctaacaactgtcatacgagtattaatggatagcggactagtcaataaggaattaattttaccatttgtcattgtcttaacccattcgttgattagttcctttgtttggttagcattattaaagtttacagtttgaaaatcgtcttttattttttgtaggaaggaggcgtggaactcgatactatcgctaccgtatattttatttgcggtagctagtgtcgcacaatacggaatatctacctccatgtcatcattattgtcatcgggtgtattctcattcatattctctatatattttgatagttgttcagctgtagaaccagctgctccatgatttagaatagataaagtagataaaatagaaactggagaaatcaaaacattttcatccgtgtgttttaagattagttctttaaagatatccatggtatagaccaaacaataacgataacgatatatatcataaataaataatgttaaatttcagtttatgtttgtaccccgtattcatacttaacaaattggtattgcgtacacaatcaatcatattacataccattaataatgcaagcataaaaaattgttagtagatgtttctaaatataggttccgtaagcaaagaatataagaatgaagcggtaatgataaaatcaatcgttatctaaaatgatcatactcatttattttattctattatattaacacatacatttttaacagcaacacattcaatattgtattgttatttttatattatttacacaattaacaatatattattagtttatattactgaattaataatataaaattcccaatcttgtcataaacacacactgagaaacagcataaacacagaatccatcaaaaatgttgataaattatctgatgttgttgttcgctgctatgataatcagatcattcgccgatagtggtaacgctatcgaaacgacattgccagaaattacaaacgctacaacagatattccagctatcagattatgcggtccagagggagatggatattgtttacacggtgactgtatccacgctagagatattgacggtatgtattgtagatgctctcatggttatacaggcattagatgtcagcatgtagtattagtagactatcaacgttcagaaaacccaaacactacaacgtcatatatcccatctcccggtattatgcttgtattagtaggcattattatgtgttgtctattatctgtttataggttcactcgacgaactaaactacctatacaagatatggttgtgccataatttttataaatttttttatgagtatttttacaaaaatgtataaagtgtatgtcttatgtatatttataaaaatgctaagtatgcgatgtatctatgttatttgtatttatctaaacaatacctctacctctagatattatacaaaaattttttatttcggcatattaaagtaaaatctagttaccttgaaaatgaatacagtgggtggttccgtatcaccagtaagaacataatagtcaaatacagtatccgattgagattttgcatacaatactagtctagaaagaaatttgtaatcatcttctgtgacgggagtccatatatctgtatcatcgtctagtttatcagtgtcccatgctatattcctgttatcatcattagttaatgaaaataactctcgtgcttcagaaaagtcaaatattgtatccatacatacatctccaaaactatcgcttatacgtttatctttaacgatacctatacctagatggttatttactaacagacattttccagatctattgactataactcctatagtttccacatcaaccaagtaatgatcatctattgttatataacaataacataactcttttccatttttatcagtatgtatatctatatcaacgtcgtcgttgtagtgaatagtagtcattgatctattatatgaaacggatatgtctagaacggcaattgttttacgtccagttaacactttcgttgatttaaagtctagagtctttgcaaacataatatccttatccgactttatatttcctgtagggtggtataattttattttgcctccacatatcggtgtttccaaatatattactagacaatattccatatagttattagttaagggtacccaattagaacacgtacgcttattatcatcatttggatcgtatttcataaaagttattgtgttatcgatgtcaacacattctacattttttaatcgtctatatagtatttttctgatattttctataatatcagaattgtcttccatcggaagttgtatactatcggaatcagttacatgtttaaataattctctgatgtcattccttatacaatcaaattcattattaaacagtttaatagtctgtagacctttatcgtcgtaaatatccattgtcttattagttacgcttatttttatgtgtttttacgttgctttattatattttataagaatgattgtttgacgaatcacgagaactattaagacacattattaggtatatattataaaaaagtttttgattacgatgttataagaggaaagaggacacattaacatcatacatcaattaactacattcttataacatcgtaatcaaaagaattgcaattttgatgtataacaactgtcaatgggttatggaattgtatattacatattatacggtatgttggtaacgacaaataccggtcggtaattgtctgccggtgtaatagaattatatatatctatctattacaccggccttgtatacataataataagttgtggtagtatgatctccatatttataatttaggactttgtattcagtatttttggaatcataaaaaataaaaaaaagttttactaatttaaaatttaaaaagtatttacatttttttcactgtttagtcgcggatatggaattcgatcctgccaaaatcaatacatcatctatagatcatgtaacaatattacaatacatagatgaaccaaatgatataagactaacagtatgcattatccgaaatattatatcaatatcacaaaaataaatacacatttggctaatcaatttcgggcttggaaaaaacgtatcgccggaagggactatatgactaacttatctagagatacaggaatacaacaatcaaaacttactgaaactatacgtaactgtcaaaaaaatagaaacatatatggtctatatatacactacaatttagttattaattggataaccgatgtgattatcaatcaatattaagagggttggtaaattggtacatagctaataatacctatactccaaatacacccaataatacaacaaccatttctgagttggatatcatcaaaatactggataaatacgaggacgtgtatagagtaagtaaagaaaaagaatgtggaatttgctatgaagttgtttactcaaaacgatagatactttggtttattggattcgtgtactcatatattttgcataacatgcatcaatatatggcatagaacacgaagagaaaccggtgcgtcggataattgtcctatatgccgtacccgttttagaaacataacaatgagcaagttctataagctagttaactaataaataaaaagtttaatttgttgacgacgtatgtcgttattttttctcgtataaaagattaatttgattctaatataatctttagtattggataaatatcaattcaaattaattccattagattatatcataaataaaaatagtagcacgcactacttcagccaaatattcttttttgaaacgccatctatcgtagtgaggacacaagtgaacctataattatcaaatttattagtatcggttacatgaaggactttacgtagagtgacgattccactatctgtggtacgaacggtttcatcttctttgatgccatcacccagatgttctataaacttggtatcctcgtccgatctcatatcctttgccaaccaatacatgtagctaaaattaggcataaatttcacacatcctgaacaatgaaattctccagaagatgttacaatgtctagatttggacatttggtttcaaccgcgttaacatatgagtgaacacacccatacatgaaagcgatgagaaataggattctcatcttgccaaaatatcactagaaaaaatttatttatcagttttaaaggtataaaaaatacttattgttgctcgaatattttgtatttgatggtatacggaagattagaaatgtaggtattatcatcaactgattctatggttttatgtattctatcatgtttcactattgcgttggaaataatatcatatgcttccacatatattttattttgttttaactcataatactcacgtaattctggattattggcatatctatgaataattttagctccatgatcagtaaatattaatgagaacatagtattaccacctaccattatttttttcatctcattcaattcttaattgcaaagatctatataatcattatagcgttgacttatggactctggaatcttagacgatgtacagtcatctataatcatggcatatttaatacattgttttatagcatagtcgttatctacgatgttagatatttctctcaatgaatcaatcacacaatctaatgtaggtttatgacataatagcattttcagcagttcaatgtttttagattcgttgatggcaatggctatacatgtatatccgttatttgatctaatgttgacatctgaaccggattctagcagtaaagatactagagattgtttattatatctaacagccttgtgaagaagtgtttctcctcgtttgtcaatcatgttaatgtctttaagataaggtaggcaaatgtttatagtactaagaattgggcaagcataagacatgtcacaaagacccttttttgtatgtataagtgtaaaaattataacatccatagttggatttacataggtgtccaatcgggatctctccatcatcgagataattgatggcatctcccttccttttttagtagatatttcatcgtgtaagaatcaatattaatatttctaaagtatccgtgtatagcctctttatttaccacagctccatattccactagagggatatcgccgaatgtcatatactcaattagtatatgttggaggacatccgagttcattgttttcaatatcaaagagatggtttccttatcatttctccatagtggtacaatactacacattattccgtgcggctttccattttccaaaaacaatttgaccaaatctaaatctacatctttattgtatctataatcactatttagataatcagccataattcctcgagtgcaacatgttagatcgtctatatatgaataagcagtgttatctattcctttcattaacaatttaacgatgtctatatctatatgagatgacttaatataatattgaagagctgtacaatagtttttatctataaaagacggcttgattccgtgattaattagacatttaacaacttccggacgcacatatgctctcgtatccgactttgaatacagatgagagatgatatacagatgcaatacggtaccgcaatttcgtagttgataatcatcatacgcgtatcagtactcgtcctcataaagaacactgcagccattttctatgaacaaatcaataattttagaaacaggatcattgtcattacataattttctataactgaacgatggttttcacatttaacactcaagtcaaatccatgttctaccaacacctttatcaagtcaacgtctacatttttggatttcatatagctgaatatattaaagttatttatgttgctaaatccagtggcttctagtagagccatcgctatatccttattaactttaacatgtctactatttgtgtattcttctaatggggtaagctgtctccaatttttgcgtaatggattagtgccactgtctagtagtagtttgacgacctcgacattattacaatgctcattaaaaaggtatgcgtgtaaagcattattcttgaattggttcctggtatcattaggatctctgtctttcaacatctgtttaagttcatcaagagccacctcctcattttccaaatagtcaaacattttgactgaatgagctactgtgaactctatacacccacacaactaatgtcattaaatatcatgtcaaaaacttgtacaattattaataaaaataatttagtgtttaaattttaccagttccagattttacacctccgttaatacctccattaaccccactggacgatcctcctccccacattccaccgccaccagatgtataagttttagatcctttattactaccatcatgtccatggataaagacactccacatgccgccactaccccctttagaagacatattaataagacttaaggacaagtttaacaataaaattaatcacgagtaccctactaccaacctacactattatatgattatagtttctatttttacagtaccttgactaaagtttctagtcacaagagcaatactaccaacctacactattatatgattatagtttctatttttataggaacgcgtacgagaaaatcaaatgtctaatttctaacggtagtgttgataaacgattgttatccgcggatacctcctctatcatgtcgtctattttcttactttgttctattaacttattagcattatatattatttgattataaaacttatattgcttattagcccaatctgtaaatatcggattattaacatatcgtttctttgtaggtttatttaacatgtacatcactgtaagcatgtccttaccatttattttaatttgacgcatatccgcaatttctttttcgcagtcggttataaattctatatatgatggatacatgctacatgtgtacttataatcgactaatatgaagtacttgatacatattttcagtaacgatttattattaccacctatgaataagtacctgtgatcgtctaggtaatcaactgttttcttaatacattcgatggttggtaatttactcagaataatttccaatatcttaatatataattctgctatttctgggatatatttatctgccagtataacacaaatagtaatacatgtaaacccatattttgttattatattaatgtctgcgccattatctattaaccattctactaggctgacactatgcgactcaatacaatgataaagtatactacatccatgtttatctattttgtttatatcatcaatatacggcttacaaagttttagtatcgataacacatccaactcacgcatagagaaggtagggaataatggcataatatttattaggttatcatcattgtcattatctacaactaagtttccattttttaaaatatactcgacaactttaggatctctattgccaaatttttgaaaatatttatttatatgcttaaatctatataatgtagctccttcatcaatcatacatttaataacattgatgtatactgtatgataagatacatattctaacaatagatcttgtatagaatctgtatatcttttaagaattgtggatattaggatattattacataaactattacacaattctaaaatataaaacgtatcacggtcgaataatagttgatcaactatataattatcgattttgtgatttttcttcctaaactgtttacgtaaatagttagatagaatattcattagttcatgaccactatagttactatcgaataacgcgtcaaatatttcccgtttaatatcgcatttgtcaagataataatagagtgtggtatgttcacgataagtataataacgcatctctttttcgtgtgaaattaaatagtttattacgtccaaagatgtagcataaccatcttgtgacctagtaataatataataatagagaactgttttacccattctatcatcataatcagtggtgtagtcgtaatcgtaatcgtctaattcatcatcccaattataatattcaccagcacgtctaatctgttctattttgatcttgtatccatactgtatgttgctacatgtaggtattcctttatccaataatagtttaaacacatctacattgggatttgatgttgtagcgtatttttctacaatattaataccatttttgatactatttatttctatacctttcgaaattagtaatttcaataagtctatattgatgttatcagaacatagatattcgaatatatcaaaatcattgatatttttatagtcgactgacgacaataacaaaatcacaacatcgtttttgatattattatttttcttggtaacgtatgcctttaatggagtttcaccatcatactcatataatggatttgcaccactttctatcaatgattgtgcactgctggcatcgatgttaaatgttttacaactatcatagagtatcttatcgttaaccatgattggttgttgatgctatcgcattttttggtttctttcatttcagttatgtatggatttagcacgtttgggaagcatgagctcatatgatttcagtactgtagtgtcagtactattagtttcaataagatcaatctctagatctatagaatcaaaacacgataggtcagaagataatgaatatctgtacgcttcttgttgtactgtaacttctggttttgttagatggttgcatcgtgctttaacgtcaatggtacaaattttatcctcgctttgtgtatcatattcgtccctactataaaattctatattcagattatcatgcgatgtgtatacgctaacggtatcaataaacggagcacaccatttagtcataaccgtaatccaaaaatttttaaagtatatcttaacgaaagaagttgtatcattgtctacggtgtatggtactagatcctcataagtgtatatatctagagtaatgtttaatttattaaatggttgataatatggatcgtcgtggcaatttcctaagatggaaatgagatatagacacgcaataaatctaatcgaagacatggttactccttaaaaaaatacgaataatcaccttggctatttagtaagtgtcatttaacactatactcatattaatccatggactcataatctctatacgggattaacggatgttctatatacggggatgagtagttctcttctttaactttatactttttactaatcatatttagactgatgtatgggtaatagtgtttgaagagctcgttctcatcatcagaataaatcaatatctctgtttttttgttatacagatgtattacagcctcatatattacgtaatagaacgtgtcatctaccttattaactttcaccgcatagttgtttgcaaatacggttaatcctttgacctcgttgatttccgaccaatctgggcgtataatgaatctaaactttaatttcttgtaatcattcgaaataatttttagtttgcatccgtagttatcccctttatgtaactgtaaatttctcaacgcgatatctccattaataatgatgtcgaattcgtgctgtatacccatactgaatggatgaacgaataccgacggcgttaatagtaatttactttttcatctttacatattgggtactagttttactatcataagtttataaattccacaagctactatggaataagccaaccatcttagtataccacacatgtcttaaagtttattaattaattacatgttgttttatatatatcgctacgaatttaaacagagaaatcagtttaggaaaaaaaaaattatctatctacatcatcacgtctctgtattctacgatagagtgctactttaagatgagacatatccgtgtcatcaaaaatatactccattaaaatgattattccggcagcgaacttgatattggatatatcacaacctttgttaatatctacgacaatagacagcagtcccatggttccataaacagtgagtttatctttctttgaagagatattttgtagagatcttataaaactgtcgaatgacatcgcatttatatctttagctaaatcgtatatgttaccatcgtaatatctaaccgcgtctatcttaaacgtttccatcgctttaaagacgtttccgatagatggtctcatttcatcagtcatactgagccaacaaatataatcgtgtataacatctttgatagaatcagactctaaagaaaacgaatcggctttattatacgcattcatgataaacttaatgaaaaatgtttttcgttgtttaagttggatgaatagtatgtcttaataattgttattatttcattaattaatatttagtaacgagtacactctataaaaacgagaatgacataactaatcataactagttatcaaagtgtctaggacgcgtaattttcatatggtatagatcctgtaagcattgtctgtattctggagctattttctctatcgcattagtgagttcagaatatgttataaatttaaatcgaataacgaacataactttagtaaagtcgtctatattaactcttttattttctagccatcgtaataccatgtttaagatagtatattctctagttactacgatctcatcgttgtctagaatatcacatactgaatctacatccaattttagaaattggtctgtgttacatatctcttctatattattgttgatgtattgtcgtagaaaactattacgtagaccattttctttataaaacgaatatatagtactccaattatctttaccgatatatttgcacacataatccattctctcaatcactacatctttaagattttcgttgttaagatatttggctaaactatataattctattagatcatcaacagaatcagtatatatttttctagatccaaagacgaactctttggcgtcctctataatattcccagaaaagatattttcgtgttttagtttatcgagatctgatctgttcatatacgccatgattgtacggtacgttatgataaccgcataaaataaaaatccattttcatttttaaccaatactattcataattgagattgatgtaatactttgttactttgaacgtaaagacagtacacggatccgtatctccaacaagcacgtagtaatcaaatttggtgttgttaaacttcgcaatattcatcaatttagatagaaacttatactcatcatctgttttaggaatccatgtattattaccactttccaacttatcattatcccaggctatgtttcgtccatcatcgttgcgcagagtgaataattcttttgtattcggtagttcaaatatatgatccatgcatagatcggcaaagctattgtagatgtgatttttcctaaatctaatataaaactcgtttactagcaaacactttcctgatttatcgaccaagacacatatggtttctaaatctatcaagtggtggggatccatagttatgacgcagtaacatatattattacattcttgactgtcgctaatatctaaatatttattgttatcgtattggattctgcatatagatggcttgtatgtcaaagatatagaacacataaccaatttatagtcgcgctttacattctcgaatctaaagttaagagatttagaaaacattatatcctcggatgatgttatcactgtttctggagtaggatatattaaagtctttacagatttcgtccgattcaaataaatcactaaataatatcccacattatcatctgttagagtagtatcattaaatctattatattttatgaaagatatatcactgctcacctctatatttcgtacatttttaaactgtttgtataatatctctctgatacaatcagatatatctattgtgtcggtagacgataccgttacatttgaattaatggtgttccattttacaacttttaacaagttgaccaattcatttctaatagtatcaaactctccatgattaaatattttaatagtatccattttatatcactacggacacaaagtagctgacataaaccattgtataatttttatgttttatgtttattagcgtacacattttggaagttccggcttccatgtatttcctggagagcaagtagatgatgaggaaccagatagtttatatccgtacttgcacttaaagtctacattgtcgttgtatgagtatgatcttttaaacccgctagacaagtatccgtttgatattgtaggatgtggacatttaacaatctgacacgtgggtggatcggaccattctcctcctgaacacaggacactagagttaccaatcaacgaatatccactattgcaactataagttacaacgctcccatcggtataaaaatcctcgtatccgttatgtcttccgttggatatagatggaggggattggcatttaacagattcacaaataggtgcctcgggattccataccatagatccagtagatcctaattcacaatacgatttagattcaccgatcaactgatatccgctattacaagagtacgttatactagagccaaagtctactccaccaatatcaagttggccattatcgatatctcgaggcgatgggcatctccgtttaatacattgattaaagagtgtccatccagtacctgtacatttagcatatataggtcccattttttgctttctgtatccaggtagacatagatattctatagtgtctcctatgttgtaattagcattagcatcagtctccacactattcttaaatttcatattaatgggtcgtgacggaatagtacagcatgatagaacgcatcctattcccaacaatgtcaggaacgtcacgctctccaccttcatatttatttatccgtaaaaatgttatcctggacatcgtacaaataataaaaagcccatatatgttcgctattgtagaaattgtttttcacagttgctcaaaaacgatggcagtgacttatgagttacgttacactttggagtctcatctttagtaaacatatcataatattcgatattacgagttgacatatcgaacaaattccaagtatttgattttggataatattcgtattttgcatctgctataattaagatataatcaccgcaagaacacacgaacatctttcctacatggttaaagtacatgtacaattctatccatttgtcttccttaactatatatttgtatagataattacgagtctcgtgagtaattccagtaattacatagatgtcgccgtcgtactctacagcataaactatactatgatgtctaggcatgggagacttttttatccaacgatttttagtgaaacattccacatcgtttaatactacatatttctcatacgtggtataaactccacccattacatatatatcatcgtttacgaataccgacgcgcctgaatatctaggagtaattaagtttggaagtcttatccatttcgaagtgccgtgtttcaaatattctgccacacccgttgaaatagaaaattctaatcctcctattacatataactttccatcgttaacacaagtactaacttctgattttaacgacgacatattagtaaccgttttccattttttcgttttaagatctacccgcgatacggaataaacatgtctattgttaatcatgccgccaataatgtatagacaattatgtaaaacatttgcattatagaattgtctatctgtattaccgactatcgtccaatattctgttctaggagagtaatgggttattgtggatatataatcagagtttttaatgactactatattatgttttataccatttcgtgtcactggctttgtagatttggatatagttaatcccaacaatgatatagcattgcgcatagtattagtcataaacttgggatgtaaaatgttgatgatatctacatcgtttggatttttatgtatccactttaataatatcatagctgtaacatcctcatgatttacgttaacgtcttcgtgggataagatagttgtcagttcatcctttgataattttccaaattctggatcggatgtcaccgcagtaatattgttgattatttctgacatcgacgcattatatagttttttaattccatatcttttagaaaagttaaacatccttatacaatttgtgaaattaatattatgaatcatagtttttacacatagatctactacaggcggaacatcaattattatggcagcaactagtatcatttctacattgtttatggtgatgtttatcttcttccagcgcatatagtctaatagcgattcaaacgcgtgatagtttataccattcaatataatcgcttcatcctttagatggtgatcctgaatgcgtttaaaaaaattatacggagacgccgtaataatttccttattcacttgtataatttccccattgatagaaaatattacgctttccattcttaaagtactataagtaattatagtataatgtaaacgtttatatattcaatatttttataaaaatcattttgacattaattcctttttaaatttccgtctatcatctatagaaacgtattctatgaatttataaaatgcttttacgtgtcctatcgtaggcgatagaaccgctaaaaagcctatcgaatttctacaaaagaatctgttatatggtatagggagagtataaaacattaaatgtccgtacttattaaagtattcagtagccaatcctaactctttcgaatacttattaatggctcttgttctgtacgaatctatttttttgaacaacggacctagtggtatatcttgttctatgtatctaaaataatgtctgactagatccgttagtttaatatccgcagtcatcttgtctagaatggcaaatctaactgcgggtttaggctttagtttagtttctatatctacatctatgtctttatctaacaccaaaaatataatagctaatattttattacaatcatccggatattcttctacgatctcactaactaatgtttctttggttatactagtatagtcactatcggacaaataaagaaaatcagatgatcgatgaataatacatttaaattcatcatctgtaagatttttgagatgtctcattagaatattattagggttagtactcattatcattcggcagctattacttattttattatttttcaccatatagatcaatcattagatcatcaaaatatgtttcaatcatcctaaagagtatggtgaatgactcttcccatctaatttctgaacgttcaccaatgtctctagccactttggcactaatagcgatcattcgcttagcgtcttctatattattaactggttgatttaatctatctagcaatggaccgtcggacagcgtcattctcatgttcttaatcaatgtacatacatcgccgtcatctaccaattcatccaacaacataagctttttaaaatcatcattataataggtttgatcgttgtcatttctccaaagaatatatctaataagtagagtcctcatgcttagttaacaactattttttatgttaaatcaattagtacaccgctatgtttaatacttattcatattttagtttttaggattgagaatcaatacaaaaaattaatgcatcattaattttagaaatacttagtttccacgtagtcaatgaaacatttgaactcatcgtacaggacgttctcgtacaggacgtaactataaaccggtttatatttgttcaagatagatacaaatccgataactttttttacgaattctacgggatccactttaaaagtgtcataccgggttctttttatttttttaaacagatcaatggtgtgatgttgattaggtcttttacgaatttgatatagaatagcgtttacatatcctccataatggtcaatcgccatttgttcgtatgtcataaattctttaattatatgacactgtgtattatttagttcatccttgttcattgttaggaatctatccaaaatggcaattatactagaactataggtgcgttgtatacacatattgatgtgtctgtttatacaatcaatgctactaccttcgggtaaaattgtagcatcatataccatttctagtactttaggttcattattatccattgcagaggacgtcatgatcgaatcataaaaaaatatattatttttatgttattttgttaaaaataatcatcgaatacttcgtaagatactccttcatgaacataatcagttacaaaacgtttatatgaagtaaagtatctacgatttttacaaaagtccggatgcataagtacaaagtacgcgataaacggaataataatagatttatctagtctatctttttctatagctttcatagttagatacatggtctcagaagtaggattatgtaacatcagcttcgataaaatgactgggttatttagtcttacacattcgctcatacatgtatgaccgttaactacagagtctacactaaaatgattgaacaatagatagtctaccattgtttcgtattcagatagtacagcgtagtacatggcatcttcacaaattatatcattgtctaatagatatttgacgcatcttatggatcccacttcaacagccatcttaaaatcggtagaatcatattgctttcctttatcattaataatttctagaacatcatctctatcataaaagatacaaatattaactgtttgatccgtaataacattgctagtcgatagcaatttgttaataagatgcgctgggctcaatgtcttaataagaagtgtaagaggactatctccgaatttgttttgtttattaacatccgttgatggaagtaaaagatctataatgtctacattcttgactgttttagagcatacaatatggagaggtgtatttccatcatgatctggttttgagggactaattcctagtttcatcatccatgagattgtagaagcttttggattgtctgacataagatgtctatgaatatgatttttgccaaatttatccactatcctggcttcgaatccgatggacattatttttttaaacactctttctgaaggatctgtacacgccaacaacggaccacatccttcttcatcaaccgagttgttaatcttggctccatactgtaccaataaatttattctctctatgacttcatcatctgttcccgagagataatatagaggcgttttatgctgtttatcacacgcgtttggatctgcgccgtgcgtcagcagcatcgcgactattctattattattaattttagaagctatatgcaatggataatttccatcatcatccgtctcatttggagagtatcctctatgaagaagttcttcgacaaatcgttcatctagtcctttaattccacaatacgcatgtagaatgtgataattatttccagaaggttcgatagcttgtagcatattcctaaatacatctaaatttttactattatatttggcataaagagatagataatactcggccgacataatgttgtccattgtagtataaaaattaatatttctatttctgtatatttgcaacaatttactctctataacaaatatcataacttagttcttttatgtcaagaaggcactggtttagttcatctataaatgtcacgccataactaccacgcatgccatactcagaattatgataaagatatttatccttggggtgtaggtaatggggattaatctttgttggatcagtctctaagttaacacatgtcacacatgatccatttatagttatatcacacgatgatgatttatgaattgattccggaagatcgctatcgtattttgtggttccacaattcatttccatacatgttattgtcacactaatattatgatgaactttatctagccgctgagtggtaaacaacagaacagatagtttattatctttaccaacaccctcagccgctgccacaaatctctgatccgtatccatgatggtcatgtttatttctagtccgtatccagtcaacactatgttagcatttctgtcgatatagctttcactcatatgacactcaccaataatagtagaattaatgtcgtaatttacaccaatagtgagttcggcggcaaagtaccaataccggtaatcttgtcgaggaggacatatagtattcttgtattctaccgaatacccgagagatgcgatacaaaagagcaagactaatttgtaaaccatcttactcaaaatatgtaacaatagtacgatgcaatgagtaagacaataggaaatctatcttatatacacataattattctatcaattttaccaattagttagtgtaatgttaacaaaaatgtgggagaatctaattagtttttctttacacaattgacgtacatgagtctgagttccttgtttttgctaattatttcatccaatttattattcttgacgatatcgagatcttttgtataggagtcaaacttgtattcaacatgcttttctataatcattttagctatttcggcatcatccaatagtacattttccagattagcagaatagatattaatgtcgtatttgaacagagcctgtaacatctcaatgtctttattatctatagccaatttaatgtccggaatgaagagaagggaattattggtgtttgtcgacgtcatatagtcgagcaagagaatcatcatatccacgtgtccattttttatagtgatgtgaatacaactaaggagaatagccagatcaaaagtagatggtatctctgaaagaaagtaggaaacaatacttacatcattaagcatgacggcatgataaaatgaagttttccatccagttttcccatagaacatcagtctccaatttttcttaacaaacagttttaccgtttgcatgttaccactatcaaccgcataatacaatgcggtgtttcccttgtcatcaaattgtgaatcatccagtccactgaatagcaaaatctttactattttggtatcttccaatgtggctgcctgatgtaatggaaattcattctctagaagatttttcaatgctccagcgttcaacaacgtacatactagacgcacgttattatcagctattgcataatacaaggcactatgtccatggacatccgccttaaatgtatctttactagagagaaagcttttcagctgcttagacttccaagtattaattcgtgacagatccatgtctgaaacgagacgctaattagtgtatattttttcattttttataattttgtcatattgcaccagaattaataatatctttaatagatctgattagtagatacatggctatcgcaaaacaacatatacacatttaataaaaataatatttattaagaaaattcagatttcacgtacccatcaatataaataaaataatgattccttacaccgtacccatattaaggagattccaccttacccataaacaatataaatccagtaatatcatgtctgatgatgaacacaaatggtgtattaaattccagtttttcaggagatgatctcgccgtagctaccataatagtagatgcctctgctacagttccttgttcgtcgacatctatctttgcattctgaaacattttataaatatataatgggtccctagtcatatgtttaaacgacgcattatctggattaaacatactaggagccatcatttcggctatcgacttaatatccctcttattttcgatagaaaatttagggagtttaagattgtacactttattccctaattgagacgaccaatagtctaattttgcagccgtgatagaatctgtgaaatgggtcatattatcacctattgccaggtacatactaatattagcatccttatacggaaggcgtaccatgtcatattctttgtcatcgattgtgattgtatttccttgcaatttagtaactacgttcatcatgggaaccgttttcgtaccgtacttattagtaaaactagcattgcgtgttttagtgatatcaaacggatattgccatatacctttaaaatatatagtattaatgattgcccatagagtattattgtcgagcatattagaatctactacattagacataccggatctacgttctactatagaattaattttattaaccgcatctcgtctaaagtttaatctatataggccgaatctatgatattgttgataatacgacggtttaatgcacacagtattatctacgaaactttgataagttagatcagtgtacgtatatttagatgttttcagcttagctaatcctgatattaattctgtaaatgctggacccagatctctttttctcaaatccatagtcttcaataattctattctagtattacctgatgcaggcaatagcgacataaacatagaaaacgaataaccaaacggtgagaagacaatattatcatcttgaatatttttatacgctactataccggcattggtaaatccttgtagacgataggcggacgctgaacacgctaacgatagtatcaataacgcaatcatgattttatggtattaataattaaccttatttttatgttcggtataaaaaaattattgatgtctacacatccttttgtaattgacatctatatatccttttgtataatcaactctaatcactttaacttttacagttttccctaccagtttatccctatattcaacatatctatccatatgcatcttaacactctctgccaagatagcttcagagtgaggatagtcaaaaagataaatatatagagcataatcattctcgtatactctgccctttattacatcacccgcattgggcaacgaataacaaaatgcaagcatcttgttaacgggctcgtaaattgggataaaaattatgtttttattgtcttatatctattttattcaagagaatattcaggaatttctttttccggttgtatctcgtcgcagtatatatcatttgtacattgtttcatattttttaatagtttacaccttttagtaggactagtatcgtacaattcatagctgtattttgaattccaatcacgcataaaaatatcttccaattgttgacgaagacctaatccatcatccggtgtaatattaatagatgctccacatgtatccgtaaagtaatttcctgtccaatttgaggtacctatataggccgttttatcggttaccatatatttggcatggtttaccctagaatacggaatgggaggatcagcatctggtacaataaatagctttacttctatatttatgtttttagattttagcatagcgatagatcttaaaaagtttctcatgataaacgaagatcgttgccagcaactaatcaatagcttaacggatacttgtctgtctatagcggatcttcttaattcatcttctatataaggccaaaacaaaattttacccgccttcgaataaataatagggataaagttcataacagatacataaacgaatttactcgcatttctaatacatgacaataaagcggttaaatcattggttctttccatagtacatagttgttgcggtgcagaagcaataaatacagagtgtggaacgccgcttacgttaatactaagaggatgatctgtattataatacgacggataaaagtttttccaattatatggtagattgttaactccaagataccagtatacctcaaaaatttgagtgagatccgctgccaagttcctattattgaagatcgcaatacccaattccttgacctgagttagtgatctccaatccatgttagcgcttcctaaataaatatgtgtattatcagatatccaaaattttgtatgaagaactcctcctaggatatttgtaatatctatgtatcgtacttcaactccggccatttgtagtctttcaacatcctttaatggtttgttagatttattaacggctactctaactcgtactcctcttttgggtaattgtacaatctcgtttaatattatcgtgccgaaattcgtacccacttcatccgataaactccaataaaaagatgatatatctagtgtttttgtggtattggatagaatttccctccacatgttaaatgtagacaaatatactttatcaaattgcatacctataggaatagtttctgtaatcactgcgattgtattatccggattcattttatttgttaaaagaataatcctatatcacttcactctattaaaaatccaagtttctatttctttcatgactgattttttaacttcatccgtttccttatgaagatgatgtttggcaccttcataaatttttatttctctattacaatttgcatgttgcatgaaataatatgcacctaaaacatcgctaatcttattgtttgttccctggagtatgagagtcgggggggtgttaatcttggaaattatttttctaaccttgttggtagccttcaagacctgactagcaaatccagccttaattttttcatgattgactaatgggtcgtattggtatttataaactttatccatatctctagatactgattctggacatagctttccgactggcgcatttggtgtgatggttcccataagtttggcagctagcagattcagtcttgaaacagcatctgcattaactagaggagacattagaatcattgctgtaaacaagtttggattatcgtaagaggctagctcccatggaatgacccaataagtagatttaatagttaccacgtgctgtaccaaagtcatcaatcatcattttttcaccattacttcttccatgtccaatatgatcatgtgagaatactaaaattcctaacgatgatatgttttcagctagttcgtcataacgtccagaatgtttaccagctccatgacttatgaatactaatgccttaggatatgtaataggtttccaatatttacaatatatgtaatcattgtccagattgaacatacagtttgcactcatgattcacgttatataactatcaatattaacagttcgtttgatgatcatattatttttatgttttattgataattgtaaaaacatacaattaaatcaatatagaggaaggagacggctactgtcttttgtaagatagtcatggcgactaaattagattatgaggatgctgttttttactttgtggatgatgataaaatatgtagtcgcgactccatcatcgatctaatagatgaatatattacgtggagaaatcatgttatagtgtttaacaaagatattaccagttgtggaagactgtacaaggaattgatgaagttcgatgatgtcgctatacggtactatggtattgataaaattaatgagattgtcgaagctatgagcgaaggagaccactacatcaattttacaaaagtccatgatcaggaaagtttattcgctaccataggaatatgtgctaaaatcactgaacattggggatacaaaaagatttcagaatctagattccaatcattgggaaacattacagatttgatgaccgacgataatataaacatcttgatactttttctagaaaaaaaattgaattgatgatataggggtcttcataacgcataattattacgttagcattctatatccgtgttaaaaaaaattatcctatcatgtatttgagagttttatatgtagcaaacatgatagctgtgatgccaataagctttagatattcacgcgtgctagtgttagggatggtattatctggtggtgaaatgtccgttatataatctacaaaacaatcatcgcatatagtatgcgatagtagagtaaacatttttatagtttttactggattcatacatcgtctacccaattcggttataaatgaaattgtcgccaatcttacacccaaccccttgttatccattagcatagtattaacttcgttatttatgtcataaactgtaaatgattttgtagatgccatatcatacatgatattcatgtccctattataatcattactaactttatcacaatatatgttgataatatctatatatgatctagtctttgtgggcaactgtctatacaagtcgtctaaacgttgtttactcatatagtatcgaacagccatcattacatggtcccgttccgttgatagataatcgagtatgttagtggacttgtcaaatctatataccatattttctggaagtggatatacatagtcgtgatcaacattattgctagcctcatcttctatatcctgtactataccattatctatatcatctacataatctatgatattattacacataaacatcgacaacatactattgtttattatctaagtcctgttgatccaaacccttgatctcctctatttgtactatctagagattgtacttcttccagttctggataatatatacgttgatagattagctgagctattctatctccagtatttacattaaacgtacattttccattattaataagaatgactcctatgtttcccctataatcttcgtctattacaccacctcctatatcaatgccttttagtgacagaccagacctaggagctattctaccatagcagaacttaggcatggacatactaatatctgtcttaattaactgtctttctcctggagggatagtataatcgtaagcgctatacaaatcatatccggcagcacccggcgattgcctagtaggagatttagctctgttagtttccttaacaaatctaactggtgagttaatattcatgttgaacataaaactaatattttatttcaaaattatttaccatcccatatattccatgaataagtgtgatgattgtacacttctatagtatctatatacgatccacgataaaatcctcctatcaatagcagtttattatccactatgatcaattctggattatccctcggataaataggatcatctatcagagtccatgtattgctggattcacaataaaattccgcatttctaccaaccaagaataaccttctaccgaacactaacgcgcatgatttataatgaggataataagtggatggtccaaactgccactgatcatgattgggtagcaaatattctgtagttgtatcagtttcagaatgtcctcccattacgtatataacattgtttatggatgccactgctggattacatctaggtttcagaagactcggcatattaacccaagcagcatccccgtggaaccaacgctcaacagatgtgggatttggtagacctcctactacgtataatttattgttagcgggtatcccgctagcatacagtctggggctattcatcggaggaattggaatccaattgtttgatatataatttaccgctatagcattgttatgtatttcattgttcatccatccaccgatgagatatactacttctccaacatgagtacttgtacacatatggaatatatctataatttgatccatgttcataggatactctatgaatggatacttgtatgatttgcgtggttgtttatcacaatgaaatattttggtacagtctagtatccattttacattatttatacctctgggagaaagataatttgacctgattacatttttgataaggagtagcagatttcctaatttatttcttcgctttatataccacttaatgacaaaatcaactacataatcctcatctggaacatttagttcatcgctttctagaataagtttcatagatagataatcaaaattgtctatgatgtcatcttccagttccaaaaagtgtttggcaataaagtttttagtatgacataagagattggatagtccgtattctatacccatcatgtaacactcgacacaatattcctttctaaaatctcgtaagataaagtttatacaagtgtagatgataaattctacagaggttaatatagaagcacgtaataaattgacgacgttatgactatctatatatacctttccagtatacgagtaaataactatagaagttaaactgtgaatgtcaaggtctagacaaaccctcgtaactggatctttatttttcgtgtatttttgacgtaaatgtgtgcgaaagtaaggagataactttttcaatatcgtagaattgactattatattgcctcctatggcatcaataattgttttgaatttcttagtcatagacaatgctaatatattcttacagtacacagtattgacaaatatcggcatttatgtttctttaaaagtcaacatctagagaaaaatgattatctttttgagacataactcccattttttggtattcacccacacgtttttcgaaaaaattagtttttccttccaatgatatattttccatgaaatcaaacggattggtaacattataaatttttttaaatcccaattcagaaatcaatctatccgcgacgaattctatatatgttttcatcatttcacaattcattcctataagtttaactggaagagccgcagtaagaaattcttgttcaatggatactgcatctgttataatagatctaacggtttcttcactcggtggatgcaataaatgtttaaacatcaaacatgcgaaatcgcagtgcagaccctcgtctctactaattagttcgttggaaaacgtgagtccgggcattaggccacgctttttaagccaaaatatggaagcgaatgatccggaaaagaagattccttctactgcagcaaaggcaataagtctctctccataaccggcgctgtcatgtatccacttttgagcccaatcggccttcttttttacacaaggcatcgtttctatggcattaaagagatagtttttttcattactatctttaacataagtatcgatcaaaagactatacatttccgaatgaatgttttcaatggccatctgaaatccgtagaaacatctagcctcggtaatctgtacttctgtacaaaatcgttccgccaaattttcattcactattccgtcactggctgcaaaaaacgccaatacatgttttataaaatatttttcgtctggtgttagtttattccaatcattgatatctttagatatatctacttcttccactgtccaaaatgatgcctctgcctttttatacatgttccagatgtcatgatattggattgggaaaataacaaatctatttggatttggtgcaaggatgggttccataactaaattaacaataacaataaattttttttcagttatctatatgcctgtacttggattttttgtacatcgatatcgccgcaatcactacaataattacaagtattattgatagcattgttattagtactatcataattaaattatctacattcatgggtgctgaataatcgttattatcatcattatcattttgtaattgtgacatcatactagataaatcgtttgcgagattgttgtgggaagcgggcatggaggatgcattatcattattatttaacgccttccatttggattcacaaatgttacgcacattcaacattttatggaaactataattttgtgaaaacaaataacaagaaaactcgtcatcgttcaaatttttaacgatagtaaaccgattaaacgtcgagctaatttctaacgctagcgactctgttggatatgggtttccagatatatatcttttcagttcccctacgtatctataatcatctgtaggaaatggaagatatttccatttatctactgttcctaatatcatatgtggtggtgtagtagaaccattaagcgcgaaagatgttatttcgcatcgtattttaacttcgcaataatttctggttagataacgcactctaccagtcaagtcaatgatattagcctttacagatatattcatagtagtcgtaacgatgactccatcttttagatgcgatactcctttgtatgtaccagaatcttcgtacctcaaactcgatatatttaaacaagttaatgagatattaacgcgttttatgaatgatgatatataaccagaagttttatcctcggtggctagcgctataaccttatcattataataccaactagtgtgattaatatgtgacacgtcagtgtgggtacaaatatgtacattatcgtctacgtcgtattcgatacatccgcatacagccaacaaatataaaatgacaaatactctaacgccgttcgtacccatcttgatgcggtttaataaatgttttgatttcaatttattgtaaaaaaagattcggttttatactgttcgatattctcattgcttatattttcatctatcatctccacacagtcaaatccgtggttagcatgcacctcatcaaccggtaaaagactatcggactcttctatcattataactctagaatatttaatttggtcattattaatcaagtcaattatcttatttttaacaaacgtgagtattttactcattttttataaaaacttttagaaatatacagactctatcgtgtgtctatatcttctttttatatccaatgtatttatgtctgatttttcttcatttatcatatataatggtccaaattctacacgtgcttcggattcatccagatcattaaggttcttataattgtaacatccttctcttccctcttctacatcttccttcttattcttattcttagcgtcacagaatctaccacagcaggatcccatgacgagcgtcatattaaactaatccattttcaattataatatatgattagtaatgaccattaaaataaaaaatattcttcataaccggcaagaaagtgaaaagttcacattgaaactatgtcagtagtatacatcatgaaatgatgatatatatatactctattttggtggaggattatatgatataattcgtggataatcatttttaagacacatttctttattcgtaaatcttttcacgttaaatgagtgtccatattttgcaatttcttcatatgatggcggtgtacgtggacgaggctgctcctgttcttgttgtggtcgccgactgtcgtgtctgcgtttagatccctccattatcgcgattgcgtagatggagtactattttataccttgtaattaaatttttttattaattaaacgtataaaaacgttccgtatctgtatttaagagccagatttcgtctaatagaacaaatagctacagtaaaaataactagaataattgctacacccactagaaaccacggatcgtaatacggcaatcggttttcgataataggtggaacgtatattttatttaaggacttaacaattgtctgtaaaccacaatttgcttccgcggatcctgtattaactatctgtaaaagcatatgttgaccgggcggagccgaacattctccgatatctaatttctgtatatctataatattattaacctccgcatacgcattacagttcttttctagcttggataccgcactaggtacatcgtctagatctattcctatttcctcagcgatagctcttctatccttttccggaagcaatgaaatcacttcaataaatgattcaaccatgagtgtgaaactaagtcgagaattactcatgcatttgttagttattcggagcgcgcaatttttaaactgtcctataacctctcctatatgaatagcacaagtgacattagtagggatagaatgttgagctaatttttgtaaataactatctataaaaagattatacaaagttttaaactctttagtttccgccatttatccagtctgagaaaatgtctctcataataaatttttccaagaaactaattgggtgaagaatggaaacctttaatctatatttatcacagtctgttttggtacacatgatgaattcttccaatgccgtactaaattcgatatctttttcgatttctggatatgtttttaataaagtatgaacaaagaaatggaaatcgtaataccagttatgtttaactttgaaattgttttttattttcttgttaatgattccagccacttgggaaaagtcaaagtcgtttaatgccgatttaatacgttcattaaaaacaaactttttatcctttagatgaattattattggttcattggaatcaaaaagtaagatattatcgggtttaagatctgcgtgtaaaaagttgtcgcaacagggtagttcgtagattttaatgtataacagagccatctgtaaaaagataaactttatgtattgtaccaaagatttaaatcctaatttgatagctaactcggtatctactttatctgccgaatacagtgctaggggaaaaattataatgtttcctctttcatattcgtagttagttctcttttcatgttcgaaaaagtgaaacatgcggttaaaatagtttataacattaatattactgttaataactgccggataaaagtgggatagtaatttcacgaatttgatactgtcctttctctcgttaaacgcctttaaaaaaactttagaagaatatctcaatgagagttcctgaccatccatagtttgtatcaataatagcaacatatgaagaacacgtttatacagagtatgtaaaaatgttaatttatagtttaatcccatggcccacgcacacacgattaattttttttcatctccctttagattgttgtatagaaatttgggtactgtgaactccgccgtagtttccatgggactatataattttgtggcctcgaatacaaattttactacatagttatctatcttaaagactataccatatcctcctgtagatatgtgataaaaatcgtcgtttataggataaaatcgtttatccttttgttggaaaaaggatgaattaatgtaatcattctcttctatctttagtagtgtttccttattaaaattcttaaaataatttaacaatctaactgacggagcccaattttggtgtaaatctaattgggacattatattgttaaaatacaaacagtctcctaatataacagtatctgataatctatggggagacatccattgatattcaggggatgaatcattggcaacacccatttattgtacaaaaagccccaatttacaaacgaaagtccaggtttgatagagacaaacaattaactattttgtctctgtttttaacacctccacagtttttaatttctttagtaatgaaattattcacaatatcagtatcttctttatctaccagagattttactaacttgataaccttggctgtctcattcaatagggtagtaatatttgtatgtgtgatattgatatctttttgaattgtttcttttagaagtgattctttgatggtgccagcatacgaattacaataatgcagaaactcggttaacatgcaggaattatagtaagccaattccaattgttgcctgtgttgtattagagtgtcaatatgagcaatggtgtccttgcgtttctctgatagaatgcgagcagcgattttggcgttatcatttgacgatatttctggaatgacgaatcctgtttctactaactttttggtaggacaaagtgaaacaatcaagaagatagcttctcctcctatttgtggaagaaattgaactcctctagatgatctactgacgatagtatctccttgacagatattggaccgaattacagaagtacctggaatgtaaagccctgaaaccccctcattttttaagcagattgttgccgtaaatcctgcactatgcccaagatagagagctcctttggtgaatccatctctatgtttcagtttaaccaagaaacagtcagctggtctaaaatttccatctctatctaatacagcatctaacttgatgtcaggaactatgaccggtttaatgttatatgtaacattgagtaaatccttaagttcataatcatcactgtcatcagttatgtacgatccaaacaatgtttctaccggcatagtggatacgaagatgctatccatcagaatgtttccctgattagtattttctatatagctattcttctttaaacgattttccaaatcagtaactatgttcatttttttaggagtaggacgcctagccagtatggaagaggattttctagatcctctcttcaacatctttgatctcgatggaatgcaaaaccccatagtgaaacaaccaacgataaaaataatattgtttttcactttttataattttaccatctgactcatggattcattaatatctttataagagctactaacgtataattctttataactgaactgagatatatacaccggatctatggtttccataattgagtaaatgaatgctcggcaataactaatggcaaatgtatagaacaacgaaattatactagagttgttaaagttaatattttctatgagctgttccaataaattatttgttgtgactgcgttcaagtcataaatcatcttgatactatccagtaaaccgtttttaagttctggaatattatcatcccattgtaaagcccctaattcgactatcgaatatcctgctctgatagcagtttcaatatcgacggacgtcaatactgtaataaaggtggtagtattgtcatcatcgtgataaactacgggaatatggtcgttagtaggtacggtaactttacacaacgcgatatataactttccttttgtaccatttttaacgtagttgggacgtcctgcagggtattgttttgaagaaatgatatcgagaacagatttgatacgatatttgttggattcctgattattcactataatataatctagacagatagatgattcgataaatagagaaggtatatcgttggtaggataatacatccccattccagtattctcggatactctattgatgacactagttaagaacatgtcttctattctagaaaacgaaaacatcctacatggactcattaaaacttctaacgctcctgattgtgtctcgaatgcctcgtacaaggatttcaaggatgccatagattctttgaccaacgatttagaattgcgtttagcatctgatttttttattaaatcgaatggtcggctctctggtttgctaccccaatgataacaatagtcttgtaaagataaaccgcaagaaaatttatacgcatccatccaaataaccctagcaccatcggatgatattaatgtattattatagattttccatccacagttattgggccagtatactgttagcaacggtatatcgaatagattactcatgtaacctactagaatgatagttcgtgtactagtcataatatctttaatccaatctaagaaatttaaaattagattttttacactgttaaagttaacaaaggtattacccggatacgtggatatcatatatggcattggtccattatcagtaatagctccataaactgatacggcgatggtttttatatgtgtttgatctaacgaggaagaaattcgcgcccacaattcatctctagatatgtatttaatatcaaacggtaacacatcaatttcgggacgcgtatatgtttctaaatttttaatccaaatataatgatgacctatatgccctattatcatactgtcaactatagtacacctagagaacttacgatacatctgtttcctgtaatcgttaaattttacaaatctataacatgctaaaccttttgacgacagccattcattaatttctgatatggaatctgtattctcgataccgtatcgttctaaagccagtgctatatctccctgttcgtgggaacgctttcgtataatatcgatcaacggataatctgaagtttttggagaataatatgactcatgatctatttcgtccataaacaatctagacataggaattggaggcgatgatcttaattttgtgcaatgagtcgtcaatcctataacttctaatcttgtaatattcatcatcgacataatactatctatgttatcatcgtatattagtataccatgaccttcttcatttcgtgccaaaatgatatacagtcttaaatagttacgcaatatctcaatagtttcataattgttagctgttttcatcaaggtttgtatcctgtttaacatgatggcgttctataacgtctctattttctatttttaattttttaaatttttaacgatttactgtggctagatacccaatctctctcaaatatttttttagcctcgcttacaagctgtttatctatactattaaaactgacgaatccgtgattttggtaatgggttccgtcgaaatttgccgaagtgatatgaacatattcgtcgtcgactatcaacaattttgtattattctgaatagtgaaaaccttcacagatagatcattttgaacacacaacgcatctagacttttggcggttgccatagaatatacgtcgttcttatcccaattaccaactagaagtctgatcttaactcctctattaatggctgcttctataatggagttgtaaatgtcgggccaatagtagctattaccgtcgacacgtgtagtgggaactatggccaaatgttcaatatctatactagtcttagctgacctgagtttatcaataactacatcggtatctagatctctagaatatcccaataggtgttccggagaatcagtaaagaacactccacctataggattcttaatatgatacgcagtgctaactggcaaacaacaagccgcagagcataaattcaaccatgaattttttgcgctattaaaggctttaaaagtatcaaatcttctacgaagatctgtggccagcgggggataatcagaatatacacctaacgttttaatcgtatgtatagatcctccagtaaatgacgcgtttcctacataacatctttcatcatctgacacccaaaaacaaccgagtagtagtcccacattattttttttatctatattaacggttataaaatttatatccgggcagtgactttgtagctctcccagatttcttttccctcgttcatctagcaaaactattattttaatccctttttcagatgcctcttttagtttatcaaaaataagcgctcccctagtcgtactcagaggattacaacaaaaagatgctatgtatatatatttcttagctagagtgataatttcgttaaaacattcaaatgttgttaaatgatcggatctaaaatccatattttctggtagtgtttctaccagcctacattttgctcccgcaggtaccgatgcaaatggccacatttagttaacataaaaacttatacatcctgttctatcaacgattctagaatatcatcggctatatcgctaaaattttcatcaaagtcgacatcacaacctaactcagtcaatatattaagaagttccatgatgtcatcttcgtctatttctatatccgtatccattgtagattgttgaccgattatcgagtttaaatcattactaatactcaatccttcagaatacaatctgtgtttcattgtaaatttataggcggtgtatttaagttggtagattttcaattatgtattaatatagcaacagtagttcttgctcctccttgattctagcatcctcttcattattttcttctacgtacataaacatgtccaatacgttagacaacacaccgacgatggcggccgctacagacacgaatatgactaaaccgatgaccatttaaaaacccctctctagctttcacttaaactgtatcgatcattcttttagcacatgtataatataaaaacattattctatttcgaatttaggcttccaaaaatttttcatccgtaaaccgataataatatatatagacttgttaatagtcggaataaatagattaatgcttaaactatcatcatctccacgattagagatacaatatttacattctttttgctgtttcgaaactttatcaatacacgttaatacaaacccaggaaggagatattgaaactgaggctgttgaaaatgaaacggtgaatacaataattcagataatgtaaaatcatgattccgtattctgatgatattagaactgctaatggatgtcgatggtatgtatctaggagtatctattttaacaaagcatcgatttgctaatatacaattatccttttgattaattgttattttattcatattcttaaaaggtttcatatttatcaattcttctacattaaaaatttccatttttaatttatgtagccccgcaatactcctcattacgtttcattttttgtctataatatccattttgttcatctcggtacatagattatccaattgagaagcgcatttagtagttttgtacattttaagtttattgacgaatcgtcgaaaactagttatagttaacattttattatttgataccctgatattaatacccctgccgttactattatttataactgatgtaatccacgtaacattggaattaactatcgatagtaatgcatcgacgcttccaaaattgtctattataaactcaccgataatttttttattgcatgttttcatattcattaggattatcaaatctttaatcttattacgattgtatgcgttgatattacaagacgtcattctaaaagacggaggatctccatcaaatgccagacaatcacgtacaaagtacatggaaataggttttgttctattgcgcatcatagatttatatagaacacccgtagaaatactaatttgttttactctataaaatactaatgcatctatttcatcgttttgtataacgtctttccaagtgtcaaattccaaatttttttcattgatagtaccaaattcttctatctctttaactacttgcatagataggtaattacagtgatgcctacatgccgttttttgaaactgaatagatgcgtctagaagcgatgctacgctagtcacaatcaccactttcatatttagaatatatatatgtaaaaatatagtagaatttcattttgtttttttctatgctataaatgaattctcattttgcatctgctcatactccgttttatattaataccaaagaaggaagatatctggttctaaaagccgttaaagtatgcgatgttagaactgtagaatgcgaaggaagtaaagcttcctgcgtactcaaagtagataaaccctcatcgcccgcgtgtgagagaagaccttcgtccccgtccagatgcgagagaatgaataaccctggaaaacaagttccgtttatgaggacggacatgctacaaaatatgttcgcggctaatcgcgataatgtagcttctagacttttgtcctaaaatactattatatccttttcgatattaataaatccgtgtcgtccaggttttttatctctttcagtatgtgaatagataggtattttatctctattcatcatcgaatttaagagatccgataaacattgtttgtattctccagatgtcagcatctgatacaacaatatatgtgcacataaacctctggcacttatttcatgtaccttccccttatcactaaggagaatagtatttgagaaatatgtatacatgatattatcatgaattagatatacagaatttgtaacactctcgaaatcacacgatgtgtcggcgttaagatctaatatatcactcgataacacattttcatctagatacactagacattttttaaagctaaaatagtctttagtagtaacagtaactatgcgattattttcatcgatgatacatttcatcggcatattattacgcttaccatcaaagactataccatgtgtatatctaacgtattctagcatggttgccatacgcgcattaaacttttcaggatctttggatagatcttccaatctatctatttgagaaaacatttttatcatgttcaatagttgaaacgtcggatccactatatagatattatctataaagattttaggaactacgttcatggtatcctggcgaatattaaaactatcaatgatatgattatcgttttcatcttttatcaccatatagtttctaagatatgggattttacttaatataatattatttcccgtgataaattttattagaaaggccaaatctataagaaaagtcctagaattagtctgaagaatatctatatcgccgtatagtatatttggattaattagatatagagaatatgatccgtaacatatacaacttttattatggcgtctaagatattcttccatcaacttattaacatttttgactagggaagatacattatgacgtcccattacttttgccttgtctattactgcgacgttcatagaatttagcatatctcttgccaattcttccattgatgttacattataagaaattttagatgaaattacatttggagctttaatagtaagaactcctaatatgtccgtgtatgtggtcactaatacagattgtagttctataatcgtaaataatttacctatattatatgtttgagtctgtttagaaaagtagctaagtatacgatcttttatttctgatgcagatgtattaacatcggaaaaaaatctttttttattcttttttactaaagatacaaatatgtctttgttaaaaacagttattttctgaatatttctagcttgtaattttaacatatgatattcgttcacactaggtactctgcctaaataggtttctataatctttaatgtaatattaggaaaagtattctgatcaggattcctattcattttgaggatttaaaactctgattattgtctaatatggtctctacgcaaactttttcacagagcgatagagtttttgataactcgtttttcttaagaaatataaaactactgtctccagagctcgctctatcttttattttatctaattcgatacaaactcctgatactggttcagaaagtaattcattaattttcagtcctttatagaagatatttaatatagataatacaaaatcttcagtttttgatatcgatctgattgatcctagaactagatatattaataacgtgctcattaggcagtttatggcagcttgataattagatatagtatattccagttcatatttattagataccgcattgcccagattttgatattctatgaattcctctgaaaataaatccaaaataactagacattctattttttgtggattagtgtactctcttccctctatcatgttcactactggtgtccacgatgataaatatctagagggaatataatatagtccataggatgccaatctagcaatgtcgaataactgtaattttattcttcgctcttcattatgaattgattcttgaggtataaacctaacacaaattatattattagacttttcgtatgtaatgtctttcatgttataagtttttaatcctggaatagaatctattttaatgaggcttttaaacgcagagttctccaacgagtcaaagcataatactctgttgtttttcttatatacgatgttacgattttcttctttgaatggaataggtttttgaattagtttataattacaacataatagataaggaagtgtgcaaatagtacgcggaaaaaacataatagctcccctgttttcatccatggttttaagtaaatgatcactggcttctttagtcaatggatattcgaacattaaccgtttcatcatcattggacagaatccatatttcttaatgtaaagagtgatcaaatcattgtgtttattgtaccatcttgttgtaaatgtgtattcggttatcggatctgctcctttttctattaaagtatcgatgtcgatctcgtctaagaattcaactatatcgacatatttcatttgtatacacataaccattactaacgtagaatgtataggaagagatgtaacgggaacagggtttgttgattcgcaaactattctaatacataattcttctgttaatacgtcttgcacgtaatctattatagatgccaagatatctatataattattttgtaagatgatgttaactatgtgatctatataagtagtgtaataattcatgtatttcgatatatgttccaactctgtctttgtgatgtctagtttcgtaatatctatagcatcctcaaaaaatatattcgcatatattcccaagtcttcagttctatcttctaaaaaatcttcaacgtatggaatataataatctattttacctcttctgatatcattaatgatatagtttttgacactatcttctgtcaattgattcttattcactatatctaagaaacggatagcgtccctaggacgaactactgccattaatatctctattatagcttctggacataattcatctattataccagaattaatgggaactattccgtatctatctaacatagttttaagaaagtcagaatctaagacttgatgttcatatattggttcatacatgaaatgatctctattgatgatagtgactatttcattctctgaaaattggtaactcattctatatatgctttccttgttgatgaaggatagaatatactcaatagaatttgtaccaacaaactgttctcttatgaatcgtatatcatcatctgaaataatcatgtaaggcatacatttaacaattagagacttgtctcctgttatcaatatactattcttgtgataatttatgtgtgaggcaaatttgtccacgttctttaattttgttatagtagatatcaaatccaatggagctacagttcttggcttaaacagatatagtttttctggaacaaattctacaacattattataaaggactttgggtaaataagtgggatgaaatcctattttaattaatgcgatagccttgtcctcgtgcagatatccaaacgcttttgtgatagtatggcattcattgtctagaaacgctctacgaatatctgtgacagatatcatctttagagaatatactagtcgcgttaatagtactacaatttgtattttttaatctatctcaataaaaaaattaatatgtatgattcaatgtataactaaactactaactgttattgataactagaatcagaatctaatgatgacgtacccaagaagtttatctactgccaatttagctgcattatttttagcatctcgtttagattttccatctgccttatcgaatactcttccgtcgatatctacacaggcataaaatgtaggagagttactaggcccaactgattcaatacgaaaagaccaatctctcttagttatttggcagtactcattaataacggtgacagggttagcatctttccaatcaataatttttttagccggaataacatcatcaaaagacttatgatcctctctcattgatttttcgcgggatacatcatctattatgacgtcagccataacatcagcatccggcttatccgcctccgttgtcataaaccaacgaggaggaatatcgtcggagctgtacaccatagcactacgttgaagatcgtacagagctttattaacttctcgcttctccatattaagttgtctagttagttgtgcagcagtagctccttcgattccaatggttttaatagcctcacacacaatctctgcgttagaacgttcgtcgatatagattttagacatttttagagagaactaacacaaccagcaataaaactgaacctactttatcatttttttattcatcatcctctggtggttcgtcgttcctatcaaatgtagctctgattaacccgtcatctataggtgatgctggttctggagattctggaggagatggattattatctggaagaatctctgttatttccttgttttcatgtatcgattgcgttgtaacattaagattgcgaaatgctctaaatttgggaggcttaaagtgttgtttgcaatctctacacgcgtgtctaactagtggaggttcgtcagctgctctagtttgaatcatcatcggcgtagtattcctacttttacagttaggacacggtgtattgtatttctcgtcgagaacgttaaaataatcgttgtaactcacatcctttattttatctatattgtattctactcctttcttaatgcattttataccgaataagagatagcgaaggaattctttttcggtgccgctagtacccttaatcatatcacatagtgttttatattccaaatttgtggcaatagacggtttatttctatacgatagtttgtttctggaatcctttgagtattctataccaatattattctttgattcgaatttagtttcttcgatattagattttgtattacctatattcttgatgtagtactttgatgatttttccatggcccattctattaagtcttccaagttggcatcatccacatattgtgatagtaattctcggatatcagtagcggctaccgccattgatgtttgttcattggatgagtaactactaatgtatacattttccatttataacacttatgtattaactttgttcatttatattttttcattattatgttgatattaacaaaagtgaatatatatatatgttaataattgtattgtggttatacggctacaattttataatgagtgaaagtcagtgtccgatgatcaatgacgatagctttactctgaaaagaaagtatcaaatcgatagtgcggagtcaacaataaaaatggataagaagaggataaagtttcagaatagagccaaaatggtaaaagaaataaatcagacaataagagcagcacaaactcattacgagacattgaaactaggatacataaaatttaagagaatgattaggactactactctagaagatatagcaccatctattccaaataatcagaaaacttataaactattctcggacatttcagccatcggcaaagcatcacagaatccgagtaagatggtatatgctctgctgctttacatgtttcccaatttgtttggagatgatcatagattcattcgttatagaatgcatccaatgagtaaaatcaaacacaagatcttctctcctttcaaacttaatcttattagaatattagtggaagaaagattctataataatgaatgcagatctaataaatggaaaataattggaacacaagttgataaaatgttgatagctgaatctgataaatatacaatagatgcaaggtataacctaaaacccatgtatagaatcaagggagaatctgaagaagataccctcttcatcaaacagatggtagaacaatgtgtgacatcccaggaattggtggaaaaagtgttgaagatactgtttagagatttgttcaagagtggagaatacaaagcgtacagatacgatgatgatgtagaaaatggattcattggattggatacactaaaattaaacattgttcatgatatagttgaaccatgtatgcctgttcgtaggccagtggctaagatactgtgtaaagaaatggtaaataaatactttgagaatccgctacatattattggtaaaaatcttcaagagtgcattgactttgttagtgaataggcatttcatctttctccaatactaattcaaattgttaaattaataatggatagtataaatagttattagttataagatagtaaaaataattattagaataagagtgtagtatcatagataactctcttctataaaaatggattttattcgtagaaagtatcttatatacacagtagaaaataatatagattttttaaaggatgatacattaagtaaagtaaacaattttaccctcaatcatgtactagctctcaagtatctagttagcaattttcctcaacacgttattactaaggatgtattagctaataccaatttttttgttttcatacatatggtacgatgttgtaaagtgtacgaagcggttttacgacacgcatttgatgcacccacgttgtacgttaaagcattgactaagaattatttatcgtttagtaacacaatacaatcgtacaaggaaaccgtgcataaactaacacaagatgaaaaatttttagaggttgccgaatacatggacgaattaggagaacttataggcgtaaattatgacttagttcttaatccattatttcacggaggggaacccatcaaagatatggaaatcatttttttaaaactgtttaagaaaacagacttcaaagttgttaaaaaattaagtgttataagattacttatttgggcatacctaagcaagaaagatacaggcatagagtttgcggataatgatagacaagatatatatactctatttcaacaaactggtagaatcgtccatagcaatctaacagaaacgtttagagattatatctttcccggagataagactagctattgggtgtggttaaacgaaagtatagctaatgatgcggatatcgttcttaatagacacgccattaccatgtatgataaaattcttagttatatatactctgagataaaacaaggacgcgttaataaaaacatgcttaagttagtttatatctttgagcctgaaaaagatatcagagaacttctgctagaaatcatatatgatattcctggagatatcctatctattattgatgcaaaaaacgacgattggaaaaaatattttattagtttttataaagctaattttattaacggtaatacatttattagtgatagaacgtttaacgaggacttattcagagttgttgttcaaatagatcccgaatatttcgataatgaacgaattatgtctttattctctacgagtgctgcggacattaaacgatttgatgagttagatattaataacagttatatatctaatataatttatgaggtgaacgatatcacattagatacaatggatgatatgaagaagtgtcaaatctttaacgaggatacgtcgtattatgttaaggaatacaatacatacctgtttttgcacgagtcggatcccatggtcatagagaacggaatactaaagaaactgtcatctataaaatccaagagtagacggctgaacttgtttagcaaaaacattttaaaatattatttagacggacaattggctcgtctaggtcttgtgttagatgattataaaggagacttgttagttaaaatgataaaccatcttaagtctgtggaggatgtatccgcattcgttcgattttctacagataaaaaccctagtattcttccatcgctaatcaaaactattttagctagttataatatttccatcatcgtcttatttcaaaggtttttgagagataatctatatcatgtagaagaattcttggataaaagcatccatctaaccaagacggataagaaatatatacttcaattgataagacacggtagatcatagaacagaccaaatatattattaataatttggtatatacatagatataattatcacacatttttgataaatgggaactgctgcaacaattcagactcccaccaaattaatgaataaagaaaatgcagaaatgattttggaaaaaattgttgatcatatagttatgtatattagtgacgaatcaagtgattcagaaaataatcctgaatatattgattttcgtaacagatacgaagactatagatctctcattataaaaagtgatcacgagtttgtaaagctatgtaaaaatcatgcggagaaaagttctccagaaacgcaacaaatgattatcaaacacatatacgaacaatatcttattccagtatctgaagtactattaaaacctataatgtccatgggtgacataattacatataacggatgtaaagacaatgaatggatgctagaacaactctctaccctaaactttaacaatctccgcacatggaactcatgtagcataggcaatgtaacgcgtctgttttatacattttttagttatctgatgaaagataaactaaatatataagtataatcccattctaatactttaacctgatgtattagcatcttattagaatattaacctaactaaaagacataacataaaaactcattacatagttgataaaaagcggtaggatataaatattatggctgccaccgttccgcgttttgacgacgtgtacaaaaatgcacaaagaagaattctagatcaagaaacattttttagtagaggtctaagtagaccgttaatgaaaaacacatatctatttgataattacgcgtatggatggataccagaaactgcaatttggagtagtagatacgcaaacttagatgcaagtgactattatcccatttcgttgggattacttaaaaagttcgagtttctcatgtctctatataaaggtcctattccagtatacgaagaaaaagtaaatactgaattcattgctaatggatctttctccggtagatacgtatcatatcttagaaagttttctgctcttccaacaaacgagtttattagttttttgttactgacttccattccaatctataatatcttgttctggtttaaaaatactcagtttgatattactaaacacacattattcagatacgtctatacagataatgccaaacacctggcgttggctaggtatatgtatcaaacaggagactataagcctttgtttagtcgtctcaaagagaattatatatttaccggtcccgttccaatatgtatcaaagatatagatcaccctaatcttagtagagcaagaagtccatccgattatgagacattagctaatattagtactatattgtactttaccaagtatgatccggtattaatgtttttattgttttacgtacctgggtattcaattactacaaaaattactccagccgtagaatatctaatggataaactgaatctaacaaagagcgacgtacaactgttgtaaattattttatgcttcgtaaaatgtaggttttgaaccaaacattctttcaaagaatgagatgcataaaactttattatccaatagattgactatttcggacgtcaatcgtttaaagtaaacttcgtaaaatattctttgatcactgccgagtttaaaacttctatcgataattgtttcatatgttttaatatttacaagttttttggtccatggtccattaggacaaatatatgcaaaataatatcgttctccaagttctatagtctctggattatttttattatattcagtaaccaaatacatattagggttatctgcggatttataatttgagtgatgcattcgactcaacataaataattctagaggagacgatctactatcaaattcggatcgtaaatctgtttctaaagaacggagaatatctatacatacctgattagaattcatccgtccttcagacaacatctcagacagtctggttttgtacatcttaatcatattcttatgaaacttggaaacatctcttctagtttcactagtacctttattaattctctcaggtacagattttgaattcgacgatgctgagtatttcatcgttgtatatttcttcttcgattgcataatcagattcttatataccgcctcaaactctattttaaaattattaaacaatactctattattaatcagtcgttctaactctttcgctatttctatagacttatctacatcttgactgtctatctctgtaaacacggagtcggtatctccatacacgctacgaaaacgaaatctgtaatctataggcaacgatgttttcacaatcggattaatatctctatcgtccatataaaatggattacttaatggattggcaaaccgtaacataccgttagataactctgctccatttagtaccgattctagatacaagatcattctacgtcctatggatgtgcaactcttagccgaagcgtatgagtatagagcactatttctaaatcccatcagaccatatactgagttggctactatcttgtacgtatattgcatggaatcatagatggccttttcagttgaactggtagcctgttttagcatctttttatatctggctctctctgccaaaaatgttcttaatagtctaggaatggttccttctatcgatctatcgaaaattgctatttcagagatgaggttcggtagtctaggttcacaatgaaccgtaatatatctaggaggtggatatttctgaagcaatagctgattatttatttcttcttccaatctattggtactaacaacgacaccgactaatgtttccggagatagatttccaaagatacacacattaggatacagactgttataatcaaagattaatacattattactaaacattttttgttttggagcaaataccttaccgccttcataaggaaacttttgttttgtttctgatctaactaagatagttttagtttccaacaatagctttaacagtggacccttgatgactgtactcgctctatattcgaataccatggattgaggaagcacatatgttgacgcacccgcgtctgtttttgtttctactccataatactcccacaaatactgacacaaacaagcatcatgaatacagtatctagccatatctaaagctatgtttagattataatccttatacatctgagctaaatcaacgtcatcctttccgaaagataatttatatgtatcattaggtaaagtaggacataatagtacgactttaaatccattttcccaaatatctttacgaattactttacatataatatcctcatcaacagtcacataattacctgtggttaaaacctttgcaaatgcagcggctttgcctttcgcgtctgtagtatcgtcaccgatgaacgtcatttctctaactcctctatttaatactttacccatgcaactgaacgcgttcttggatatagaatccaatttgtacgaatccaatttttcaaatttttgaatgaatgaatatagatcgaaaaatatagttccattattgttattaacgtgaaacgtagtattggccatgccgcctactcccttatgactagactgatttctctcataaatacagagatgtacagcttcctttttgtccggagatctaaagataattttctctcctgttaataactctagacgattagtaatatatctcagatcaaagttatgtccgttaaaggtaacgacgtagtcgaacgttagttccaacaattgtttagctattcgtaacaaaactatttcagaacatagaactagttctcgttcgtaatccatttccattagtgactgtatcctcaaacatcctctatcgacggcttcttgtatttcctgttccgttaacatctcttcattaatgagcgtaaacaataatcgtttaccacttaaatcgatataacagtaacttgtatgcgagattgggttaataaatacagaaggaaacttcttatcgaagtgacactctatatctagaaataagtacgatcttgggatatcgaatctaggtatttttttagcgaaacagttacgtggatcgtcacaatgataacatccattgttaatctttgtcaaatattgctcgtccaacgagtaacatccgtctggagatatcccgttagaaatataaaaccaactaatattgagaaattcatccatggtggcattttgtatgctgcgtttctttggctcttctatcaaccacatatctgcgacggagcattttctatctttaatatctagattataacttattgtctcgtcaatgtctatagttctcatctttcccaacggcctcgcattaaatggaggaggagacaatgactgatatatttcgtccgtcactacgtaataaaagtaatgaggaaatcgtataaatacggtctcaccatttcgacatctggatttcagatataaaaatctgttttcaccgtgactttcaaaccaattaatgcaccgaacatccatttatagaatttagaaatatattttcatttaaatgaatcccaaacattggggaagagccgtatggaccattatttttatagtactttcgcaagcgggtttagacggcaacatagaagcgtgtaaacgaaaactatatactatagttagcactcttccatgtcctgcatgtagacggcacgcgactatcgctatagaggacaataatgtcatgtctagcgatgatctgaattatatttattattttttcatcagattatttaacaatttggcatctgatcccaaatacgcgatcgatgtgacaaaggttaaccctttataaacttaacccattataaaacttatgattagtcacaactgaaataaccgcgtgattattttttggtataattctacacggcatggtttctgtgactatgaattcaacccccgttacattagtgaaatctttaacaaacagcaagggttcgtcaaagacataaaactcattgtttacaatcgaaatagaccccctatcacacttaaaataaaaaatatccttatcctttaccaccaaataaaattctgattggtcaatgtgaatgtattcacttaacagttccacaaatttatttattaactccgaggcacatacatcgtcggtattttttatggcaaactttactcttccagcatccgtttctaaaaaaatattaacgagttccatttatatcatccaatattattgaaatgacgttgatggacagatgatacaaataagaaggtacggtacctttgtccaccatctcctccaattcatgctctattttgtcattaactttaatgtatgaaaacagtacgccacatgcttccatgacagtgtgtaacactttggatacaaaatgtttgacattagtataattgttcaagactgtcaatctataatagatagtagctataatatattctatgatggtattgaagaagatgacaaccttggcatattgatcatttaacacagacatggtatcaacagatagcttgaatgaaagagaatcagtaattggaataagcgtcttctcgatagagtgtccgtataccaacatgtctgatattttgatgtattccattaaattatttagttttttctttttattctcgttaaacagcatttctgtcaacggaccccaacatcgttgaccgattaagttttgattgatttttccgtgtaaggcgtatctagtcagatcgtatagcctatccaataatccatcatctgtgcgtagatcacatcgtacactttttaattctctatagaagagcgacagacatctggagcaattacagacagcaatttctttattctctacagatgtaagatacttgaagacattcctatgatgatgcagaattttggataacacggtattgatggtatctgttaccataattcctttgatggctgatagtgtcagagcacaagatttccaatctttgacaatttttagcaccattatctttgttttgatatctatatcagacagcatggtgcgtctgacaacacagggattaagacggaaagatgaaatgattctctcaacatcttcaatagataccttgctattttttctggcattatctatatgtgcgagaatatcctctagagaatcagtatcctttttgatgatagtggatctcaatgacatgggacgtttaaaccttcttattctatcaccagattgcatggtgatttgtcttctttcttttatcataatgtaatctctaaattcatcggcaaattgtctatatctaaaatcataatatgagatgtttacctctacaaatatctgttcgtccaatgttagagtatttacatcagttttgtattccaaattaaacatggcaacggatttaattttatattcctctattaagtcctcgtcgataataacagaatgtagataatcatttaatccatcgtacatggttggaagatgcttgttgacaaaatctttaattgtcttgatgaaggtgggactatatctaacatcttgattaataaaatttataacattgtccataggatactttgtaactagttttatacacatctcttcatcggtaagtttagacagaatatcgtgaacaggtggtatattatattcatcagatatacgaagaacaatgtccaaatctatattgtttaatatattatatagatgtagcgtagctcctacaggaatatctttaactaagtcaatgatttcatcaaccgttagatctattttaaagttaatcatataggcattgatttttaaaaggtatgtagccttgactacattctcattaattaaccattccaagtcactgtgtgtaagaagattatattctatcataagcttgactacatttggtcccgataccattaaagaattcttatgatataaggaaacagcttttaggtactcatctactctacaagaattttggagagccttaacgatatcagtgacgtttattatttcaggaggaaaaaacctaacattgagaatatcggaattaatagcttccagatacagtgattttggcaatagtccgtgtaatccataatccagtaacacgagctggtgcttgctagacaccttttcaatgtttaatttttttgaaataagctttgataaagccttcctcgcaaattccggatacatgaacatgtcggcgacatgattaagtattgttttttcattattttctcaataccccaatagatgatagaatatcacccaatgcgtccatgttgtctatttccaacaggtcgctatatccaccaatagaagtttttccaaaaaagattctaggaacagttctaccaccagtaatttgttcaaaatagtcacgcaattcattttcgggtttaaattctttaatatcgacaatttcatacgctcctcttttgaaactaaacttatttagaatatccagtgcatttctacaaaaaggacatgtatacttgacaaaaattgtcactttgttattggccaacctttgttgtacaaattcctcggccattttaatatttaagtgatataaaactatctcgacttatttaactctttagtcgagatatatggacgcagatagctatatgatagccaactacagaaggcaaacgctataaaaaacataattacgacgagcatatttataaatatttttattcagcattacttgatatagtaatattaggcacagtcaaacattcaaccactctcgatacattaactctctcattttctttaacaaattctgcaatatcttcgtaaaaagattcttgaaactttttagaatatctatcgactctagatgaaatagcgttcgtcaacatactatgttttgtatacataaaggcgcccattttaacagtttctagtgacaaaatgctagcgatcctaggatcctttagaatcacatagattgacgattcgtctctcttagtaactctagtaaaataatcatacaatctagtacgcgaaataatattatccttgacttgaggagatctaaacaatctagttttgagaacatcgataagttcatcgggaatgacatacatactatctttaatagaactcttttcatccagttgaatggattcgtccttaaccaactgattaatgagatcttctattttatcattttccagatgatatgtatgtccattaaagttaaattgtgtagcgcttctttttagtctagcagccaatactttaacatcactaatatcgatatacaaaggagatgatttatctatggtattaagaattcgtttttcgacatccgtcaaaaccaattcctttttgcctgtatcatccagttttccatcctttgtaaagaaattattttctactagactattaataagactgataaggattcctccataattgcacaatccaaactttttcacaaaactagactttacaagatctacaggaatgcgtacttcaggttttttagcttgtgattttttcttttgcggacattttctagtaaccaactcatctaccatttcattgattttagcagtgaaataagctttcaatgcacgggcactgatactattgaaaacgagttgatcttcaaattccgccatttaagttcaccaaacaacttttaaatacaaatatatcaatagtagtagaataagaactataaaaaaaataataattaaccaataccaaccccaacaaccggtattattagttgatgtgactgttttctcatcacttagaacagatttaacaatttctataaagtctgtcaaatcatcttccggagaccccataaatacaccaaatatagcggcgtacaacttatccatttatacattgaatattggcttttctttatcgctatcttcatcatattcatcatcaatatcaacaagtcccagattacgagccagatcttcttctacattttcagtcattgatacacgttcactatctccagagagtccgataacgttagccaccacttctctatcaatgattagtttcttgagcgcgaaagtaatttttgtttccgttccggatctatagaagacgataggtgtgataattgccttagccaattgtctttctcttttactgagtgattctagttcaccttctatagatctgagaatggatgattctccagtcgaaacatattctaccatggatccgtttaatttgttgatgaagatggattcatccttaaatgttttctctgtaatagtttccaccgaaagactatgcaaagaatttggaatgcgttccttgtgcttaatgtttccatagacggcttctagaagttgatacaacataggactagccgcggtaacttttatttttagaaagtatccatcgcttctatcttgtttagatttatttttataaagtttagtctctccttccaacataataaaagtggaagtcatttgactagataaactatcagtaagttttatagagatagacgaacaattagcgtattgagaagcatttagtgtaacgtattcgatacattttgcattagatttactaatcgattttgcatactctataacacccgcacaagtctgtagagaatcgctagatgcagtaggtcttggtgaagtttcaactctcttcttgattaccttactcatgattaaacctaaataattgtactttgtaatataatgatatatattttcactttatctcatttgagaataaaaatgtttttgtttaaccactgcatgatgtacagatttcggaatcgcaaaccaccagtggttttattttatccttgtccaatgtgaattgaatgggagcggatgcgggtttcgtacgtagatagtacattcccgtttttagaccgagactccatccgtaaaaatgcatactcgttagtttggaataactcggatctgctatatggatattcatagattgactttgatcgatgaaggctcccctgtctgcagccatttttatgatcgtcttttgtggaatttcccaaatagttttataaactcgcttaatatcttctggaaggtttgtattctgaatggatccaccatctgccataatcctattcttgatctcatcattccataattttctctcggttaaaactctaaggagatgcggattaactacttgaaattctccagacaatactctccgagtgtaaatattactggtatacggttccaccgactcattatttcccaaaatttgagcagttgatgcagtcggcataggtgccaccaataaactatttctaagaccgtatgttctgattttatcttttagaggttcccaattccaaagatccgacggtacaacattccaaagatcatattgtagaataccgttactggcgtacgatcctacatatgtatcgtatggtccttccttctcagctagttcacaactcgcctctaatgcaccgtaataaatggtttcgaagatcttcttatttagatcttgtgcttccaggctatcaaatggataatttaagagaataaacgcgtccgctaatccttgaacaccaataccgataggtctatgtctcttattagagatttcagcttctggaataggataataattaatatctataattttattgagatttctgacaattactttgaccacatccttcagtttgagaaaatcaaatcgcccatctattacaaacatgttcaaggcaacagatgccagattacaaacggctacctcattagcatccgcatattgtattatctcagtgcaaagattactacacttgatagttcctaaattttgttgattactctttttgttacacgcatccttataaagaatgaatggagtaccagtttcaatctgagattctataatcgctttccagacgactcgagcctttattatagatttgtatctcctttctctttcgtatagtgtatacaatcgttcgaactcgtctccccaaacattgtccaatccaggacattcatccggacacatcaacgaccactctccgtcatccttcactcgtttcataaagagatcaggaatccaaagagctataaatagatctctggttctatgttcctcgtttcctgtattctttttaagatcgaggaacgccataatatcagaatgccacggttccaagtatatggccataactccaggccgtttgtttcctccctgatctatgtatctagcggtgttattataaactctcaacattggaataataccgtttgatataccattggtaccggagatatagcttccactggcacgaatattactaattgatagacctattccccctgccattttagagattaatgcgcatcgttttaacgtgtcatagataccctctatgctatcatcgatcatgttaagtagaaaacagctagacatttggtgacgactagttcccgcattaaataaggtaggagaagcgtgcgtaaaccatttttcagaaagtagattgtacgtctcaatagctgagtctatatcccattgatgaattcctactgcgacacgcattaacatgtgctgaggtctttcaacgatcttgttgtttattttcaacaagtaggatttttccaaagttttaaaaccaaaatagttgtatgaaaagtctcgttcgtaaataataaccgagttgagtttatccttatatttgttaactatatccatggtgatacttgaaataatcggagaatgtttcccatttttaggattaacatagttgaataaatcctccatcacttcactaaatagtttttttgtttccttgtgtagatttgatacggctattctggcggctagaatggcataatccggatgttgtgtagtacaagtggctgctatttcggctgccagagtgtccaattctaccgttgttactccattatatattccttgaataaccttcatagctattttaataggatctatatgatccgtgtttaagccataacataattttctaatacgagacgtgattttatcaaacatgacattttccttgtatccatttcgtttaatgacaaacatttttgttggtgtaataaaaaaattatttaacttttcattaatagggatttgacgtatgtagcgtacaaaatgatcgttcctggtatatagataaagagtcctatatatttgaaaatcgttacggctcgattaaactttaatgattgcatagtgaatatatcattaggatttaactccttgactatcatggcggcgccagaaattaccatcaaaagcattaatacagttatgccgatcgcagttaaaacggttatagcatccaccatttatatctaaaaattagatcaaagaatatgtgacaaagtcctagttgtatactgagaattgacgaaacaatgtttcttacatatttttttcttattagtaactgacttaatagtaggaactggaaagctagacttgattattctataagtatagatacccttccagataatgttctctttgataaaagttccagaaaatgtagaattttttaaaaagttatcttttgctattaccaagattgtgtttagacgcttattattaatatgagtgatgaaatccacaccgcctctagatatcgcctttatttccacattagatggtaaatccaatagtgaaactatctttttaggaatgtatggactcgcgtttagaggagtgaacgtcttgggcgtcggaaaggatgattcgtcaaacgaataaacaatttcacaaatggatgttaatgtattagtaggaaattttttgacgctagtggaattgaagattctaatggatgatgttctacctatttcatccgataacatgttaatttccgacaccaacggttttaatatttcgatgatatacggtagtctctctttcggacttatatagcttattccacaatacgagtcattatatactccaaaaaacaaaataactagtataaaatctgtatcgaatgggaaaaacgaaattatcgacataggtatagaatccggaacattgaacgtattaatacttaattctttttctgtggtaagtaccgataggttattgacattgtatggttttaaatattctataacttgagacttgatagatattagtgatgaattgaaaattatttttatcaccacgtgtgtttcaggatcatcgtcgacgcccgtcaaccaaccgaatggagtaaaataaatatcattaatatatgctctagatattagtatttttattaatcctttgattatcatcttctcgtaggcgaatgattccatgatcaagagtgatttgagaacatcctccggagtattaatgggcttagtaaacagtccatcgttgcaataataaaagttatccaagttaaaggatattatgcattcgtttaaagatatcacctcatctgacggagacaattttttggtaggttttagagactttgaagctacttgtttaacaaagttattcatcgtcgtctactattctatttaattttgtagttaatttatcacatatcacattaattgactttttggtccatttttccatacgtttatattcttttaatcctgcgttatccgtttccgttatatccagggatagatcttgcaagttaaatagaatgctcttaaataatgtcattttcttatccgctaaaaatttaaagaatgtataaacctttttcagagatttgaaactcttaggtggtgtcctagtacacaatatcataaacaaactaataaacattccacattcagattccaacagctgattaacttccacattaatacagcctattttcgctccaaatgtacattcgaaaaatctgaataaaacatcgatgtcacaatttgtattatccaatacagaatgtttgtgattcgtgttaaaaccatcggagaaggaatagaaataaaaattattatagtggtggaattcagttggaatattgcctccggagtcataaaaggatactaaacattgttttttatcataaattacacatttccaatgagacaaataacaaaatccaaacattacaaatctagaggtagaacttttaattttgtctttaagtatatacgataagatatgtttattcataaacgcgtcaaatttttcatgaatcgctaaggagtttaagaatctcatgtcaaattgtcctatataatccacttcggatccataagcaaactgagagactaagttcttaatacttcgattgctcatccaggctcctctctcaggctctattttcatcttgacgacctttggattttcaccagtatgtattcctttacgtgataaatcatcgattttcaaatccatttgtgagaagtctatcgccttagatactttttcccgtagtcgaggtttaaaaaaatacgctaacggtatactagtaggtaactcaaagacatcatatatagaatggtaacgcgtctttaactcgtcggttaactctttcttttgatcgagttcgtcgctactattgggtctgctcaggtgccccgactctactagttccaacatcataccgataggaatacaagacactttgccggcggttgtagatttatcatatttttccactacatatccgttacaatttgttaaaaatttagatacatctatattgctacataatccagctagtgaatatatatgacataataaattggtaaatcctagttctggtattttactaattactaaatctgtatatctttccatttatcatggaaaagaatttaccagatatcttcttttttccaaactgcgttaatgtattctcttacaaatattcacaagatgaattcagtaatatgagtaaaacggaacgtgatagtttctcattggccgtgtttccagttataaaacatagatggcataacgcacacgttgtaaaacataaaggaatatacaaagttagtacagaagcacgtggaaaaaaagtatctcctccatcactaggaaaacccgcacacataaacctaaccgcgaagcaatatatatacagtgaacacacaataagctttgaatgttatagttttctaaaatgtataacaaatacagaaatcaattcgttcgatgagtatatattaagaggactattagaagctggtaatagtttacagatattttccaattccgtaggtaaacgaacagatactataggtgtactagggaataagtatccatttagcaaaattccattggcctcattaactcctaaagcacaacgagagatattttcagcgtggatttctcatagacctgtagttttaactggaggaaccggagtgggtaagacgtcacaggtacccaagttattgctttggtttaattatttatttggtggattctctactctagataaaattactgactttcacgaaagaccagtcattctatctcttcctaggatagctttagttagattgcatagcaataccattttaaaatcattgggatttaaggtactagatggatctcctatttctttacggtacggatctataccggaagaattaataaacaaacaaccaaaaaaatatggaattgtattttctacccataagttatctctaacaaaactatttagttatggcactcttattatagacgaagttcatgagcatgatcaaataggagatattattatagcagtagcgagaaagcatcatacgaaaatagattctatgtttttaatgactgccacattagaggatgaccgagaacggctaaaagtatttttacctaatcccgcatttatacatattcctggagatacactgtttaaaattagcgaggtatttattcataataagataaatccatcttccagaatggcatacatagaagaagaaaagagaaatttagttactgctatacagatgtatactcctcctgatggatcatccggtatagtctttgtggcatccgttgcacagtgtcacgaatataaatcatatttagaaaaaagattaccgtatgatatgtatattattcatggtaaggtcttagatatagacgaaatattagaaaaagtgtattcatcacctaatgtatcgataattatttctactccttatttggaatccagcgttactatacgcaatgttacacacatttatgatatgggtagagtttttgtccccgctccttttggaggatcgcaacaatttatttctaaatctatgagagatcaacgaaaaggaagagtaggaagagttaatcctggtacatacgtctatttctatgatctgtcttatatgaagtctatacagcgaatagattcagaatttctacataattatatattgtacgctaataagtttaatctaacactccccgaagatttgtttataatccctacaaatttggatattctatggcgtacaaaggaatatatagactcgttcgatattagtacagaaacatggaataaattattatccaattattatatgaagatgatagagtatgctaaactttatgtactaagtcctattctcgctgaggagttggataactttgagaggacgggagaattaactagtattgtacgagaagccattttatctctaaatttacgaattaagattttaaattttaaacataaagatgatgatacgtatatacacttttgtaaaatattattcggtgtctataacggaacaaacgctactatatattatcatagacctctaacgggatatatgaatatgatttcagatactatatttgttcctgtagataataactaaaaatcaaactctaatgaccacatctttttttagagatgaaaaattttccacatctccttttgtagacacgactaaacattttgcagaaaaaagtttattagtgtttagataatcgtatacttcatcagtgtagatagtaaatgtgaacagataaaaggtattcttgctcaatagattggtaaattccatagaatatattaatcctttcttcttgagatcccacatcatttcaaccagagacgttttatccaatgatttacctcgtactataccacatacaaaactagattttgcagtgacgtcgtacctggtattcctaccaaacaaaattttacttttagttcttttagaaaattctaaggtagaatctctatttgccaatatgtcatctatggaattaccactagcaaaaaatgatagaaatatatattgatacatcgcagctggttttgatctactatactttaaaaacgaatcagattccataattgcctgtatatcatcagctgaaaaactatgttttacacgtattccttcggcatttctttttaatgatatatcttgtttagacaatgataaagttatcatgtccatgagagacgcgtctccgtatcgtataaatatttcattagatgttagacgcttcattaggggtatacttctataaggtttcttaatcagtccatcattggttgcgtcaagaactactatcggatgttgttgggtatctctagtgttacacatggccttactaaagtttgggtaaataactatgatatctctattaattatagatgcatatatttcattcgtcaaggatattagtatcgacttgctatcgtcattaatacgtgtaatgtaatcatataaatcatgcgatagccaaggaaaatttaaatagatgttcatcatataatcgtcgctataattcatattaatacgttgacattgactaatttgtaatatagcctcgccacgaagaaagctctcgtattcagtttcatcgataaaggataccgttaaatataactggttgccgatagtctcatagtctattaagtggtaagtttcgtacaaatacagaatccctaaaatattatctaatgttggattaatctttaccataactgtataaaatggagacggagtcataactattttaccgtttgtacttactggaatagatgaaggaataatctccggacatgctggtaaagacccaaatgtctgtttgaagaaatccaatgttccaggtcctaatctcttaacaaaaattacgatattcgatcccgatatcctttgcattctatttaccagcatatcacgaactatattaagattatctatcatgtctattctcccaccgttatataaatcgcctccgctaagaaacgttagtatatccatacaatggaatacttcatttctaaaatagtattcgttttctaattctttaatgtgaaatcgtatactagaaagggaaaaattatctttgagttttccgttagaaaagaaccacgaaactaatgttctgattgcgtccgattccgttgctgaattaatggatttacaccaaaaactcatataacttctagatgtagaagcattcgctaaaaaattagtagaatcaaaggatataagtagatgttccaacaagtgagcaattcccaagatttcatctatatcattctcgaatccgaaattagaaattcccaagtagatatcctttttcatccgatcgttgatgaaaatacgaactttattcggtaagacaatcatttactaaggagtaaaataggaagtaatgttcgtatgtcgttatcatcgtataaattaaaggtgtgttttttaccattaagtgacattataattttaccaatattggaattataatataggtgtatttgcgcactcgcgacggttgatgcatcggtaaatatagctgtatctaatgttctagtcggtatttcatcatttcgctgtctaataatagcgttttctctatctgtttccattacagctgcctgaagtttattggtcggataatatgtaaaataataagaaatacatacgaataacaaaaataaaataagatataataaagatgccatttagagatctaattttgtttaacttgtccaaattcctacttacagaagatgaggaatcgttggagatagtgtcttccttatgtagaggatttgaaatatcttataatgacttgataacttactttccagataggaaataccataaatatatttataaagtatttgaacatgtagatttatcggaggaattaagtatggaattccatgatacaactctgagagatttagtctatcttagattgtacaagtattccaagtgtatacggccgtgttataaattaggagataatctaaaaggcatagttgttataaaggacaggaatatttatattagggaagcaaatgatgacttgatagaatatctcctcaaggaatacactcctcagatttatacatattctaatgagcgcgtccccataactggttcaaaattaattctttgtggattttctcaagttacatttatggcgtatacaacgtcgcatataacaacaaataaaaaggtagatgttctcgtttccaaaaaatgtatagatgaactagtcgatccaataaattatcaaatacttcaaaatttatttgataaaggaagcggaacaataaacaaaatactcaggaagatattttattcggtaacaggtggccaaactccataggtagctttttctatttcggattttagaatttccaaattcaccagcgatttatcggttttggtgaaatccaaggatttattaatgtccacaaatgccatttgttttgtctgtggattgtatttgaaaatggaaacgatgtagttagatagatgcgctgcaaagtttcctattagggttccgcgctttacgtcacccagcatacttgaatcaccatcctttaaaaaaaatgataagatatcaacatggagtatatcatactcggattttaattcttctactgcatcactgacattttcacaaatactacaatacggtttaccgaaaataatcagtacgttcttcatttatgggtatcaaaaacttaaaatcgttactgctggaaaataaatcactgacgatattagatgataatttatacaaagtatacaatggaatatttgtggatacaatgagtatttatatagccgtcgccaattgtgtcagaaacttagaagagttaactacggtattcataaaatacgtaaacggatgggtaaaaaagggagggcatgtaaccctttttatcgatagaggaagtataaaaattaaacaagacgttagagacaagagacgtaaatattctaaattaaccaaggacagaaaaatgttagaattagaaaagtgtacatccgaaatacaaaatgttaccggatttatggaagaagaaataaaggcagaaatgcaattaaaaatcgataaactcacatttcaaatatatttatctgattctgataacataaaaatatcattgaatgagatactaacacatttcaacaataatgagaatgttacattattttattgtgatgaacgagacgcagaattcgttatgtgtctcgaggctaaaacacatttctctaccacaggagaatggccgttgataataagtaccgatcaggatactatgctatttgcatctgctgataatcatcctaagatgataaaaaacttaactcaactgtttaaatttgttccctcggcagaggataactatttagcaaaattaacggcgttagtgaatggatgtgatttctttcctggactctatggggcatctataacacccaccaacttaaacaaaatacaattgtttagtgattttacaatcgataatatagtcactagtttggcaattaaaaattattatagaaagactaactctaccgtagacgtgcgtaatattgttacgtttataaacgattacgctaatttagacgatgtctactcgtatattcctccttgtcaatgcactgttcaagaatttatattttccgcattagatgaaaaatggaatgaatttaaatcatcttatttagaaagcgtgccgttaccctgccaattaatgtacgcgttagaaccacgcaaggagattgatgtttcagaagttaaaactttatcatcttatatagatttcgaaaatactaaatcagatatcgatgttataaaatctatatcctcgatcttcggatattctaacgaaaactgtaacacgatagtattcggcatctataaggataatttactactgagtataaataattcattttactttaacgatagtctgttaataaccaatactaaaagtgataatataataaatataggttactagattaaaaatggtgttccaactcgtgtgctctacatgcggtaaagatatttctcacgaacgatataaattgattatacgaaaaaaatcattaaaggatgtactcgtcagtgtaaagaacgaatgttgtaggttaaaattatctacacaaatagaacctcaacgtaacttaacagtgcaacctctattggatataaactaatatggatccggttaattttatcaagacatatgcgcctagaggttctattatttttattaattataccatgtcattaacaagtcatttgaatccatcgatagaaaaacatgtgggtatttattatggtacgttattatcggaacacttggtagttgaatctacctatagaaaaggagttcgaatagtcccattggatagtttttttgaaggatatcttagtgcaaaagtatacatgttagagaatattcaagttatgaaaatagcagctgatacgtcattaactttattgggtattccgtatggatttggtcataatagaatgtattgttttaaattggtagctgactgttataaaaatgccggtattgatacatcgtctaaacgaatattgggcaaagatatttttctgagccaaaacttcacagacgataatagatggataaagatatatgattctaataatttaacattttggcaaattgattaccttaaagggtgagttaatatgcataactactcctccgttgttttttccctcgttctttttcttaacgttgtttgccatcactctcataatgtaaagatattctaaaatggtaaacttttgcatatcggacgcagaaattggtataaatgttgtaattgtattatttcccgtcaatggactagtcacagctccatcagttttatatcctttagagtatttctcactcgtgtctaacattctagagcattccatgatctgtttatcgttgatattggccggaaagatagattttttattttttattatattactattggcaattgtagatataacttctggtaaatatttttctaccttttcaatctcttctattttcaagccggctatatattctgctatattgttgctagtatcaataccttttctggctaagaagtcatatgtggtattcactatatcagttttaactggtagttccattagcctttccacttctgcagaataatcagaaattggttctttaccagaaaatccagctactataataggctcaccgatgatcattggcaaaatcctatattgtaccagattaatgagagcatatttcatttccaataattctgctagttcttgagacattgatttatttgatgaatctagttggttctctagatactctaccatttctgccgcatacaataacttgttagataaaatcagggttatcaaagtgtttagcgtggctagaatagtgggcttgcatgtattaaagaatgcggtagtatgagtaaaccgttttaacgaattatatagtctccagaaatctgtggcgttacatacatgagccgaatgacatcgaagattgtccaatatttttaatagctgctctttgtccattatttctatatttgactcgcaacaattgtagataccattaatcaccgattcctttttcgatgccggacaatagcacaattgtttagctttggactctatgtattcagaattaatagatatatctctcaatacagattgcactatacattttgaaactatgtcaaaaattgtagaacgacgctgttctgcagccatttaactttaaataatttacaaaaatttaaaatgagcatccgtataaaaatcgataaactgcgccaaattgtggcatatttttcagagttcagtgaagaagtgtctataaatgtagactcgacggatgagttaatgtatatttttgccgccttgggcggatctgtaaacatttgggcaattatacctctaagtgcatcagtgttttaccgaggagccgaaaatattgtgtttaatcttcctgtgtccaaggtaaaatcgtgtttgtgtagttttcacaatgatgccatcatagatatagaacctgatctggaaaataatctagtaaaactttctagttatcatgtagtaagtgtcgattgtaacaaggaactgatgcctattaggacagatactactatttgtctaagtatagatcaaaagaaatcttacgtgtttaattttcacaagtatgaagaaaaatgttgtggtagaaccgtcattcatctagaatggttgttgggctttatcaagtgtattagtcagcatcagcatctggctattatgtttaaagatgacaatattattatgaagactcctggtaatactgatgcgttttccagggaatattctatgactgaatgttctcaagaactacaaaagttttctttcaaaatagctatctcgtctctcaacaaactacgaggattcaaaaagagagtcaatgtttttgaaactagaatcgtaatggataatgacgataacattttaggaatgttgttttcggatagagttcaatcctttaagatcaacatctttatggcgtttttagattaatactttcaatgagataaatatgggtggcggagtaagtgttgagctccctaaacgggatccgcctccgggagtacccactgatgagatgttattaaacgtggataaaatgcatgacgtgatagctcccgctaagcttttagaatatgtgcatataggaccactagcaaaagataaagaggataaagtaaagaaaagatatccagagtttagattagtcaacacaggacccggtggtctttcggcattgttaagacaatcgtataatggaaccgcacccaattgctgtcgcacttttaatcgtactcattattggaagaaggatggaaagatatcagataagtatgaagagggtgcagtattagaatcgtgttggccagacgttcacgacactggaaaatgcgatgttgatttattcgactggtgtcagggggatacgttcgatagaaacatatgccatcagtggatcggttcagcctttaataggagtaatagaactgtagagggtcaacaatcgttaataaatctgtataataagatgcaaacattatgtagtaaagatgctagtgtaccaatatgcgaatcatttttgcattatttacgcgcacacaatacagaagatagcaaagagatgatcgattatattctaagacaacagtctgcggactttaaacagaaatatatgagatgtagttatcccactagagataagttagaagagtcattaaaatatgcggaacctcgagaatgttgggatccagagtgttcgaatgccaatgttaatttcttactaacacgtaattataataatttaggactttgcaatattgtacgatgtaataccagcgtgaacaacttacagatggataaaacttcctcattaagattgtcatgtggattaagcaatagtgatagattttctactgttcccgtcaatagagcaaaagtagttcaacataatattaaacactcgttcgacctaaaattgcatttgatcagtttattatctctcttggtaatatggatactaattgtagctatttaaatgggtgccgcggcaagcatacagacgacggtgaatacactcagcgaacgtatctcgtctaaattagaacaagaagcgaacgctagtgctcaaacaaaatgtgatatagaaatcggaaatttttatatccgacaaaaccatggatgtaacctcactgttaaaaatatgtgctctgcggacgcggatgctcagttggatgctgtgttatcagccgctacagaaacatatagtggattaacaccggaacaaaaagcatacgtgccagctatgtttactgctgcgttaaacattcagacgagtgtaaacactgttgttagagattttgaaaattatgtgaaacagacttgtaattctagcgcggtcgtcgataacaaattaaagatacaaaacgtaatcatagatgaatgttacggagccccaggatctccaacaaatttggaatttattaatacaggatctagcaaaggaaattgtgccattaaagcgttgatgcaattgacgactaaggccactactcaaatagcacctagacaagttgctggtacaggagttcagttttatatgattgttatcggtgttataatattggcagcgttgtttatgtactatgccaagcgtatgttgttcacatccaccaatgataaaatcaaacttattttagccaataaggaaaacgtccattggactacttacatggacacattctttagaacttctccgatggttattgctaccacggatatgcaaaactgaaaatatattgataatattttaatagattaacatggaagttatcgctgatcgtctagacgatatagtgaaacaaaatatagcggatgaaaaatttgtagattttgttatacacggtctagagcatcaatgtcctgctatacttcgaccattaattaggttgtttattgatatactattatttgttatagtaatttatatttttacggtacgtctagtaagtagaaattatcaaatgttgttggtggtgctagtcatcacattaactattttttattactttatactataatagtactagactgacttctaacaaacatctcacctgccataaataaatgcttgatattaaagtcttctatttctaacactattccatctgtggaaaataatactctgacattatcgctaattgacacatcggtgagtgatatgcctataaagtaataatcttctttgggcacatataccagtgtaccaggttctaacaacctatttactggtgctcctgtagcatactttttctttaccttgagaatatccatcgtttgcttggtcaatagcgatatgtgattttttatcaaccactcaaaaaagtaattggagtgttcatatcctctacgggctattgtctcatggccgtgtatgaaatttaagtaacacgactgtggtagatttgttctatagagccgattgccgcaaatagatagaactaccaatatgtctgtacaaatgttaaacattaattgattaacagaaaaaacaatgttcgttctgggaatagaaaccagatcaaaacaaaattcgttagaatatatgccacgtttatacatggaatataaaataactacagtttgaaaaataacagtatcatttaaacatttaacttgcggggttaatctcacaactttactgtttttgaactgttcaaaatatagcatcgatccgtgagaaatacgtttagccgcctttaatagaggaaatcccaccgcctttctggatctcaccaacgacgatagttctgaccagcaactcatttcttcatcatccacctgttttaacatataataggcaggagatagatatccgtcattgcaatattccttctcgtaggcacacaatctaatattgataaaatctccattctcttctctgcatttattatcttgtctcggtggctgattaggctgtggtcttggtttaggccttggtctatcgttgttgaatctattttggtcattaaatctttcatttcttcctggtatatttttatcacctcgtttggttggatttttgtctatattatcgtttgtaacatcggtacgggtattcatttatcacaaaaaaaacttctctaaatgagtctactgctagaaaacctcatcgaagaagataccatattttttgcaggaagtatatctgagtatgatgatttacaaatggttattgccggcgcaaaatccaaatttccaagatctatgctttctatttttaatatagtacctagaacgatgtcaaaatatgagttggagttgattcataacgaaaatatcacaggagcaatgtttaccacaatgtataatataagaaacaatttgggtctaggagatgataaactaactattgaagccattgaaaactatttcttggatcctaacaatgaagttatgcctcttattattaataatacggatatgactgccgtcattcctaaaaaaagtggtaggagaaagaataagaacatggttatcttccgtcaaggatcatcacctatcttgtgcattttcgaaactcgtaaaaagattaatatttataaagaaaatatggaatccgcgtcgactgagtatacacctatcggagacaacaaggctttgatatctaaatatgcgggaattaatgtcctgaatgtgtattctccttccacatccataagattgaatgccatttacggattcaccaataaaaataaactagagaaacttagtactaataaggaactagaatcgtatagttctagccctcttcaagaacccattaggttaaatgattttctgggactattggaatgtgttaaaaagaatattcctctaacagatattccgacaaaggattgattactataaatggagaatgttcctaatgtatactttaatcctgtgtttatagagcccacgtttaaacattctttattaagtgtttataaacacagattaatagttttatttgaagtattcgttgtattcattctaatatatgtattttttagatctgaattaaatatgttcttcatgcctaaacgaaaaatacccgatcctattgatagattacgacgtgctaatctagcgtgtgaagacgataaattaatgatctatggattaccatggatgacaactcaaacatctgcgttatcaataaatagtaaaccgatagtgtataaagattgtgcaaagcttttgcgatcaataaatggatcacaaccagtatctcttaacgatgttcttcgcagatgatgattcattttttaagtatttggctagtcaagatgatgaatcttcattatctgatatattgcaaatcactcaatatctagactttctgttattattattgatccaatcaaaaaataaattagaagctgtgggtcattgttatgaatctctttcagaggaatacagacaattgacaaaattcacagactttcaagattttaaaaaactgtttaacaaggtccctattgttacagatggaagggtcaaacttaataaaggatatttgttcgactttgtgattagtttgatgcgattcaaaaaagaatcctctctagctaccaccgcaatagatcctgttagatacatagatcctcgtcgtgatatcgcattttctaacgtgatggatatattaaagtcgaataaagtgaacaataattaattctttattgtcatcatgaacggcggacatattcagttgataatcggccccatgttttcaggtaaaagtacagaattaattagacgagttagacgttatcaaatagctcaatataaatgcgtgactataaaatattctaacgataatagatacggaacgggactatggacgcatgataagaataattttgaagcattggaagcaactaaactatgtgatgtcttggaatcaattacagatttctccgtgataggtatcgatgaaggacagttctttccagacattgtttaattctgtgagcgtatggcaaacggtaccgagctcggtttggaattagtgaaagcttaaaaattgaaattttattttttttttttggaatataaataagctcgaagtcgaccaccatgagtgctcctaaactcctctctctgggctgtatcttcttccccttgctactttttcagcaggcccgggctcaattcccaagacagtgtgccactgttgaggctttgagaagtggtatgtgttgcccagacctgtcccctgtgtctgggcctgggacagaccgctgtggctcatcatcagggaggggcagatgtgaggcagtgactgcagactcccggccccacagccctcagtatccccatgatggcagagatgatcgggaggtctggcccttgcgcttcttcaataggacatgtcactgcaacggcaatttctcaggacacaactgtgggacgtgccgtcctggctggagaggagctgcctgtgaccagagggttctcatagtcaggagaaatcttctggacttaagtaaagaagaaaagaaccactttgtccgggccctggatatggcaaagcgcacaactcaccctttatttgtcattgccaccaggagatcagaagaaatactggggccagatggcaacacgccacaatttgagaacatttccatttataactactttgtttggacacactattactcagtcaaaaagactttccttggggtaggacaggaaagctttggtgaagtggatttctctcatgagggaccagcttttctcacatggcacaggtaccacctcctgcgtctggagaaagacatgcaggaaatgttgcaagagccttctttctcccttccttactggaattttgcaacggggaaaaatgtctgtgatatctgcacggatgacttgatgggatccagaagcaactttgattccactctaataagcccaaactctgtcttttctcaatggcgagtggtctgtgactccttggaagattatgataccctgggaacactttgtaacagcaccgaggatgggccaattaggagaaatccagctggaaatgtggccagaccaatggtgcaacgtcttcctgaaccacaggatgtcgctcagtgcttggaagttggtttatttgacacgcctcctttttattccaactctacaaacagtttccgaaacacagtggaaggttacagtgaccccacgggaaagtatgaccctgctgttcgaagtcttcacaatttggctcatctattcctgaatggaacagggggacaaacccatttgtctccaaatgatcctatttttgtcctcctgcacaccttcacagatgcagtctttgatgaatggctgaggagatacaatgctgatatatccacatttccattggaaaatgcccctattggacataatagacaatacaacatggtgccattctggcccccagtcaccaacacagaaatgtttgttactgctccagacaacctgggatacacttatgaaattcaatggccaagtcgggagtttagtgtacctgagataattgccatagcagtagttggcgctttgttactggttgcactcatttttgggactgcttcttatctgattcgtgccagacgcagtatggatgaagctaaccagcctctcctcactgatcagtatcaatgctatgctgaagaatatgaaaaactccagaatcctaatcagtctgtggtctaattaattaatttttatcgatctaattcaacaatgtctggagagctcggtttggaattagtgaaagcttaaaaattgaaattttattttttttttttggaatataaataagctcgaagtcgaccaccatgttcttggctgttttgtattgccttctgtggagtttccagatctctgatggccattttcctcgagcctgtgcctcctctaagaacttgttggcaaaagaatgctgcccaccatggatgggtgatgggagtccctgcggccagctttcaggcagaggttcctgccaggatatccttctgtccagtgcaccatctggacctcagttccccttcaaaggggtggatgaccgtgagtcctggccctctgtgttttataataggacctgccagtgctcaggcaacttcatgggtttcaactgcggaaactgtaagtttggatttgggggcccaaattgtacagagaagcgagtcttgattagaagaaacatttttgatttgagtgtctccgaaaagaataagttcttttcttacctcactttagcaaaacatactatcagctcagtctatgtcatccccacaggcacctatggccaaatgaacaatgggtcaacacccatgtttaatgatatcaacatctacgacctctttgtatggatgcattactatgtgtcaagggacacactgcttgggggctctgaaatatggagggacattgattttgcccatgaagcaccagggtttctgccttggcacagacttttcttgttattgtgggaacaagaaattcgagaactaactggggatgagaacttcactgttccatactgggattggagagatgcagaaaactgtgacatttgcacagatgagtacttgggaggtcgtcaccctgaaaatcctaacttactcagcccagcatccttcttctcctcctggcagatcatttgtagcagatcagaagagtataatagccatcaggttttatgcgatggaacacctgagggaccactattacgtaatcctggaaaccatgacaaagccaaaacccccaggctcccatcttcagcagatgtggaattttgtctgagtttgacccagtatgaatctggatcaatggatagaactgccaatttcagctttagaaacacactggaaggatttgccagtccactcacagggatagcagatccttctcaaagtagcatgcacaatgccttacatatctttatgaatggaacaatgtcccaagtacagggatcggccaacgatcccatttttcttcttcaccatgcttttgtggacagtatttttgaacaatggctgcgaaggcaccgccctcttttggaagtttacccagaagccaatgcacctatcggccataacagagactcttacatggttcctttcataccgctctatagaaatggtgatttcttcataacatccaaggatctgggatatgactacagctacctccaagagtcagatccaggcttttacagaaattatattgagccttacttggaacaagccagtcgtatctggccatggcttcttggggcagcactggtgggagctgttattgctgcagctctctctgggcttagcagtaggctatgccttcagaagaagaagaagaagaagcaaccccaggaggaaaggcagccactcctcatggacaaagacgactaccacagcttgctgtatcagagccatctgtgattaattaatttttatcgatctaattcaacaatgtctggagagctcggatccttctgtgagcgtatggcaaacgaaggaaaaatagttatagtagccgcactcgatgggacatttcaacgtaaaccgtttaataatattttgaatcttattccattatctgaaatggtggtaaaactaactgctgtgtgtatgaaatgctttaaggaggcttccttttctaaacgattgggtgaggaaaccgagatagagataataggaggtaatgatatgtatcaatcggtgtgtagaaagtgttacgtcggctcataatattatattttttatctaaaaaactaaaaataaacattgattaaattttaatataatacttaaaaatggatgttgtgtcgttagataaaccgtttatgtattttgaggaaattgataatgagttagattacgaaccagaaagtgcaaatgaggtcgcaaaaaaactgccgtatcaaggacagttaaaactattactaggagaattattttttcttagtaagttacagcgacacggtatattagatggtgccaccgtagtgtatataggatcggctcctggtacacatatacgttatttgagagatcatttctataatttaggagtgatcatcaaatggatgctaattgacggccgccatcatgatcctattttaaatggattgcgtgatgtaactctagtgactcggttcgttgatgaggaatatctacgatccatcaaaaaacaactgcatccttctaagattattttaatttctgatgtgagatccaaacgaggaggaaatgaacctagtacggcggatttactaagtaattacgctctacaaaatgtcatgattagtattttaaaccccgtggcgtctagtcttaaatggagatgcccgtttccagatcaatggatcaaggacttttatatcccacacggtaataaaatgttacaaccttttgctccttcatattcagctgaaatgagattattaagtatttataccggtgagaacatgagactgactcgagttaccaaattagacgctgtaaattatgaaaaaaagatgtactaccttaataagatcgtccgtaacaaagtagttgttaactttgattatcctaatcaggaatatgactattttcacatgtactttatgctgaggaccgtgtactgcaataaaacatttcctactactaaagcaaaggtactatttctacaacaatctatatttcgtttcttaaatattccaacaacatcaactgaaaaagttagtcatgaaccaatacaacgtaaaatatctagcaaaaattctatgtctaaaaacagaaatagcaagagatccgtacgcggtaataaatagaaacgtactactgagatatactaccgatatagagtataatgatttagttactttaataaccgttagacataaaattgattctatgaaaactgtgtttcaggtatttaacgaatcatccataaattatactccggttgatgatgattatggagaaccaatcattataacatcgtatcttcaaaaaggtcataacaagtttcctgtaaattttctatacatagatgtggtaatatctgacttatttcctagctttgttagactagatactacagaaactaatatagttaatagtgtactacaaacaggcgatggtaaaaagactcttcgtcttcccaaaatgttagagacggaaatagttgtcaagattctctatcgccctaatataccattaaaaattgttagatttttccgcaataacatggtaactggagtagagatagccgatagatctgttatttcagtcgctgattaatcaattagtagagatgagataagaacattataataatcaataatatatcttatatcttatatcttatatcttatatcttgtttagaaaaatgctaatattaaaatagctaacgctagtaatccaatcggaagccatttgatatctataatagggtatctaatttcctgatttaaatagcggacagctatattctcggtagctactcgtttggaatcacaaacattatttacatctaatttactatctgtaatggaaacgtttcccaatgaaatggtacaatccgatacattgcattttgttatatttttttttaaagaggctggtaacaacgcatcgcttcgtttacatggctcgtaccaacaataatagggtaatcttgtatctattcctatccgtactatgcttttatcaggataaatacatttacatcgtatatcgtctttgttagcatcacagaatgcataaatttgttcgtccgtcatgataaaaatttaaagtgtaaatataactattatttttatagttgtaataaaaagggaaatttaattgtatactttcggttctttaaaagaaactgacttgataaaaatggctgtaatctctaaggttacgtatagtctatatgatcaaaaagagattaatgctacagatattatcattagtcatgttaaaaatgacgacgatatcggtaccgttaaagatggtagactaggtgctatggatggggcattatgtaagacttgtgggaaaacggaattggaatgtttcggtcactggggtaaagtaagtatttataaaactcatatagttaagcctgaatttatttcagaaattattcgtttactgaatcatatatgtattcactgcggattattgcgttcacgagaaccgtattccgacgatattaacctaaaagagttatcgggacacgctcttaggagattaaaggataaaatattatccaagaaaaagtcatgttggaacagtgaatgtatgcaaccgtatcaaaaaattactttttcaaagaaaaaggtttgtttcgtcaacaagttggatgatattaacgttcctaattctctcatctatcaaaagttaatttctattcatgaaaagttttggccattattagaaattcatcaatatccagctaacttattttatacagactactttcccatccctccgttgattattagaccggctattagtttttggatagatagtatacccaaagagaccaatgaattaacttacttattaggtatgatcgttaagaattgtaacttgaatgctgatgaacaggttatccagaaggcggtaatagaatacgatgatattaaaattatttctaataacactaccagtatcaatttatcatatattacatccggcaaaaataatatgattagaagttatatcgtcgcccgacgaaaagatcagaccgctagatctgtaattggtcccagtacatctatcaccgttaatgaggtaggaatgcccgcatatattagaaatacacttacagaaaagatatttgttaatgcctttacagtggataaagttaaacaactattagcgtcaaaccaagttaaattttactttaataaacgattaaaccaattaacaagaatacgccaaggaaagtttattaaaaataaaatacatttattgcctggtgattgggtagaagtagctgttcaagaatatacaagtattatttttggaagacagccgtctctacatagatacaacgtcatcgcttcatctatcagagctaccgaaggagatactatcaaaatatctcccggaattgccaactctcaaaatgctgatttcgacggggatgaggaatggatgatattagaacaaaatcctaaagctgtaattgaacaaagtattcttatgtatccgacgacgttactcaaacacgatattcatggagcccccgtttatggatctattcaagatgaaatcgtagcagcgtattcattgtttaggatacaagatctttgtttagatgaagtattgaacatcttggggaaatatggaagagagttcgatcctaaaggtaaatgtaaattcagcggtaaagatatctatacttacttgataggtgaaaagattaattatccgggtctcttaaaggatggtgaaattattgcaaacgacgtagatagtaattttgttgtggctatgaggcatctgtcattggctggactcttatccgatcataagtcgaacgtggaaggtatcaactttattatcaagtcatcttatgtttttaagagatatctatctatttacggttttggggtgacattcaaagatctgagaccaaattcgacgttcactaataaattggaggccatcaacgtagaaaaaatagaacttatcaaagaagcatacgccaaatatctcaacgatgtaagagacgggaaaatagttccattatctaaagctttagaggcggactatgtggaatccatgttatccaacttgacaaatcttaatatccgagagatagaagaacatatgagacaaacgctgatagatgatccagataataacctcctgaaaatggccaaagcgggttataaagtaaatcccacagaactaatgtatattctaggtacgtatggacaacaaaggattgatggtgaaccagcagagactcgagtattgggtagagttttaccttactatcttccagactctaaggatccagaaggaagaggttatattcttaattctttaacaaaaggattaacgggttctcaatattacttttcgatgctggttgcaagatctcaatctactgatatcgtctgtgaaacatcacgtaccggaacactggctagaaaaatcattaaaaagatggaggatatggtggtcgacggatacggacaagtagttataggtaatacgctcatcaagtacgccgccaattataccaaaattctaggctcagtatgtaaacctgtagatcttatctatccagatgagtccatgacttggtatttggaaattagtgctctgtggaataaaataaaacagggattcgtttactctcagaaacagaaacttgcaaagaagacattggcgccgtttaatttcctagtattcgtcaaacccaccactgaggataatgctattaaggttaaggatctgtacgatatgattcataacgtcattgatgatgtgagagagaaatacttctttacggtatctaatatagattttatggagtatatattcttgacgcatcttaatccttctagaattagaattacaaaagaaacggctatcactatctttgaaaagttctatgaaaaactcaattatactctaggtggtggaactcctattggaattatttctgcacaggtattgtctgagaagtttacacaacaagccctgtccagttttcacactactgaaaaaagtggtgccgtcaaacaaaaacttggtttcaacgagtttaataacttgactaatttgagtaagaataagaccgaaattatcactctggtatccgatgatatctctaaacttcaatctgttaagattaatttcgaatttgtatgtttgggagaattaaatccagacatcactcttcgaaaagaaacagataggtatgtagtagatataatagtcaatagattatacatcaagagagcagaaataaccgaattagtcgtcgaatatatgattgaacgatttatctcctttagcgtcattgtaaaggaatggggtatggaaacattcattgaggatgaggataatattagatttactgtctacctaaatttcgttgaaccggaagaattgaatcttagtaagtttatgatggttcttccgggtgccgccaacaagggaaagattagtaaattcaagattcctatctctgactatacgggttatgacgacttcaatcaaacaaaaaagctcaataagatgactgtagaactcatgaatctaaaagaattgggttctttcgatttggaaaacgtcaacgtgtatcctggagtatggaatacatacgatatcttcggtatcgaggccgctcgtgaatacttgtgcgaagccatgttaaacacctatggagaagggttcgattatctgtatcagccttgtgatcttctcgctagtttactatgtgctagttacgaaccagaatcagtgaataaattcaagttcggcgcagctagtactcttaagagagctacgttcggagacaataaagcattgttaaacgcggctcttcataaaaagtcagaacctattaacgataatagtagctgccacttttttagcaaggtccctaatataggaactggatattacaaatactttatcgacttgggtcttctcatgagaatggaaaggaaactatctgataagatatcttctcaaaagatcaaggaaatggaagaaacagaagacttttaattcttatcaataacatatttttctatgatctgtcttttaaacgatggattttccacaaatgcgcctctcaagtccctcatagaatgatacacgtataaaaaatatagcataggcaatgactccttatttttagacattagatatgccaaaatcatagccccgcttctatttactcccgcagcacaatgaaccaacacgggctcgtttcgttgatcacatttagataaaaaggcggttacgtcgtcaaaatatttactaatatcggtagttgtatcatctaccaacggtatatgaataatattaatattagagttaggtaatgtatatttatccatcgtcaaatttaaaacatatttgaacttaacttcagatgatggtgcatccatagcatttttataatttcccaaatacacattattggttacccttgtcattatagtgggagatttggctttgtgcatatctccagttgaacgtagtagtaagtatttatacaaacttttcttatccatttataacgtacaaatggataaaactactttatcggtaaacgcgtgtaatttagaatacgttagagaaaaggctatagtaggcgtacaagcagccaaaacatcaacacttatattctttgttattatattggcaattagtgcgctattactctggtttcagacgtctgataatccagtctttaatgaattaacgagatatatgcgaattaaaaatacggttaacgattggaaatcattaacggatagcaaaacaaaattagaaagtgatagaggtagacttctagccgctggtaaggatgatatattcgacttcaaatgtgtggatttcggcgcctattttatagctatgcgattggataagaaaacatatctgccgcaagctattaggcgaggtactggagacgcgtggatggttaaaaaggcggcaaaggtcgatccatctgctcaacaattttgtcagtatttgataaaacacaagtctaataatgttattacttgtggtaatgagatgttaaatgaattaggttatagcggttattttatgtcaccgcattggtgttccgattttagtaatatggaatagtgttagataaatgcggtaacgaatgttcctgtaaggaaccataacagcttagatttaacgttaaagatgagcataaacataataaacaaaattacaatcaaacttataacattaatatcaaacaatccaaaaaatgaaatcagtggagtagtaaacgcgtacataactcctggataacgtttagcagctgccgttcctattctagaccaaaaatttggtttcatgttttcgaaacggtattctgcaacaagtcggggatcgtgttctacatatttggcggcattatccagtatctgcctattgatcttcatttcgttttcgattctggctatttcaaaataaaatcccgatgatagacctccagactttataatttcatctacgatgttcagcgccgtagtaactctaataatataggctgataagctaacatcataccctcctgtatatgtgaatatggcatgatttttgtccattacaagctcggttttaactttattgcctgtaataatttctctcatctgtaggatatctatttttttgtcatgcattgccttcaagacgggacgaagaaacgtaatatcctcaataacgttatcgttttctacaataactacatattctacctttttattttctaactcggtaaaaaaattagaatcccatagggctaaatgtctagcgatatttcttttcgtttcctctgtacacatagtgttacaaaaccctgaaaagaagtgagtatacttgtcatcatttctaatgtttcctccagtccactgtataaacgcataatccttgtaatgatctggatcatccttgactaccacaacatttcttttttctggcataacttcgttgtcctttacatcatcgaacttctgatcattaatatgctcatgaacattaggaaatgtttctgatggaggtctatcaataactggcacaacaataacaggagttttcaccgccgccatttagttattgaaattaatcatatacaactctttaatacgagttatattttcgtctatccattgtttcacatttacatatttcgacaaaaagatataaaatgcgtattccaatgcttctctgtttaatgaattactaaaatatacaaacacgtcactgtctggcaataaatgatatcttagaatattgtaacaatttattttgtattgcacatgttcgtgatctatgagttcttcttcgaatggcataggatctccgaatctgaaaacgtataaataggagttagaataataatatttgagagtattggtaatatataaactctttagcggtataattagtttttttctctcaatttctatttttagatgtgatggaaaaatgactaattttgtagcattagtatcatgaactctaatcaaaatcttaatatcttcgtcacacgttagctctttgaagtttttaagagatgcatcagttggttctacagatggagtaggtgcaacaattttttgttctacacatgtatgtactggagccattgttttaactataatggtgcttgtatcgaaaaactttaatgcagatagcggaagctcttcgccgcgactttctacgtcgtaattgggttctaacgccgatctctgaatggatactagttttctaagttctaatgtgattctctgaaaatgtaaatccaattcctccggcattatagatgtgtatacatcggtaaataaaactatagtatccaacgatcccttctcgcaaattctagtcttaaccaaaaaatcgtatataaccacggagatggcgtatttaagagtggattcttctaccgttttgttcttggatgtcatataggaaactataaagtccgcactactgttaagaatgattactaacgcaactatatagttcaaattaagcattttggaaacataaaataactctgtagacgatacttgactttcgaataagtttgcagacaaacgaagaaagaacagacctctcttaatttcagaagaaaactttttttcgtattcctgacgtctagagtttatatcaataagaaagttaagaattagtcggttaatgttgtatttcattacccaagtttgagatttcataatattatcaaaagacatgataatattaaagataaagcgctgactatgaacgaaatagctatatggttcgctcaagaatatagtcttgttaaacgtggaaacgataactgtatttttaatcacgtcagcggcatctaaattaaatataggtatatttattccacacactctacaatatgccacaccatcttcataataaataaattcgttagcaaaattattaattttagtgaaatagttagcgtcaactttcatagcttccttcaatctaatttgatgctcacacggtgcgaattccactctaacatcccttttccatgcctcaggttcatcgatctctataatatctagttttttgcgtttcacaaacacaggctcgtctctcgcgatgagatctgtatagtaactatgtaaatgataactagatagaaagatgtagctatatagatgacgatcctttaagagaggtataataactttaccccaatcagatagactgttgttatggtcttcggaaaaagaatttttataaatttttccagtattttccaaatatacgtacttaacatctaaaaaatccttaatgataataggaatggataatccgtctattttataaagaaatacatatcgcacattatacttttttttggaaatgggaataccgatgtgtctacataaatatgcaaagtctaaatattttttagagaatcttagttggtccaaattcttttccaagtacggtaatagatttttcatattgaacggtatcttcttaatctctggttctagttccgcattaaatgatgaaactaagtcactatttttataactaacgattacatcacctctaacatcatcatttaccagaatactgatcttcttttgtcgtaaatacatgtctaatgtgttaaaaaaaagatcatacaagttatacgtcatttcatctgtggtattcttgtcattgaaggataaactcgtactaatctcttctttaacagcctgttcaaatttatatcctatatacgaaaaaatagcaaccagtgtttgatcatccgcgtcaatattctgttctatcgtagtgtataacaatcgtatatcttcttctgtgatagtcgatacgttataaaggttgataacgaaaatatttttatttcgtgaaataaagtcatcgtaggattttggacttatattcgcgtctagtagatatgcttttatttttggaatgatctcaattagaatagtctctttagagtccatttaaagttacaaacaactaggaaattggtttatgatgtataatttttttagtttttatagattctttattctatacttaaaaaatgaaaataaatacaaaggttcttgagggttgtgttaaattgaaagcgagaaataatcataaattatttcattatcgcgatatccgttaagtttgtatcgtaatggcgtggtcaattacgaataaagcggatactagtagcttcacaaagatggctgaaatcagagctcatctaaaaaatagcgctgaaaataaagataaaaacgaggatattttcccggaagatgtaataattccatctactaagcccaaaaccaaacgagccactactcctcgtaaaccagcggctactaaaagatcaaccaaaaaggaggaagtggaagaagaagtagttatagaggaatatcatcaaacaactgaaaaaaattctccatctcctggagtcagcgacattgtagaaagcgtggccgctgtagagctcgatgatagcgacggggatgatgaacctatggtacaagttgaagctggtaaagtaaatcatagtgctagaagcgatctctctgacctaaaggtggctaccgacaatatcgttaaagatcttaagaaaattattactagaatctctgcagtatcgacggttctagaggatgttcaagcagctggtatctctagacaatttacttctatgactaaagctattacaacactatctgatctagtcaccgagggaaaatctaaagttgttcgtaaaaaagttaaaacttgtaagaagtaaatgcgtgcacttttttataaagatggtaaactctttaccgataataattttttaaatcctgtatcagacgataatccagcgtatgaggttttgcaacatgttaaaattcctactcatttaacagatgtagtagtatatgaacaaacgtgggaggaggcgttaactagattaatttttgtgggaagcgattcaaaaggacgtagacaatacttttacggaaaaatgcatgtacagaatcgcaacgctaaaagagatcgtatttttgttagagtatataacgttatgaaacgaattaattgttttataaacaaaaatataaagaaatcgtccacagattccaattatcagttggcggtttttatgttaatggaaactatgttttttattagatttggtaaaatgaaatatcttaaggagaatgaaacagtagggttattaacactaaaaaataaacacatagaaataagtcccgatgaaatagttatcaagtttgtaggaaaggacaaagtttcacatgaatttgttgttcataagtctaatagactatataaaccgctattgaaactgacggatgattctagtcccgaagaatttctgttcaacaaactaagtgaacgaaaggtatatgaatgtatcaaacagtttggtattagaatcaaggatctccgaacgtatggagtcaattatacgtttttatataatttttggacaaatgtaaagtccatatctcctcttccatcaccaaaaaagttaatagcattaactatcaaacaaactgctgaagtggtaggtcatactccatcaatttcaaaaagagcttatatggcaacgactattttagaaatggtaaaggataaaaattttttagatgtagtatctaaaactacgttcgatgaattcctatctatagtcgtagatcacgttaaatcatctacggatggatgatatagatctttacacaaataattacaagaccgataaatggaaatggataagcgtatgaaatctctcgcaatgacagctttcttcggagagctaagcacattagatattatggcattgataatgtctatatttaaacgccatccaaacaataccattttttcagtggataaggatggtcagtttatgattgatttcgaatacgataattataaggcttctcaatatttggatctgaccctcactccgatatctggagatgaatgcaagactcacgcatcgagtatagccgaacaattggcgtgtgtggatattattaaagaggatattagcgaatatatcaaaactactccccgtcttaaacgatttataaaaaaataccgcaatagatcagatactcgcatcagtcgagatacagaaaagcttaaaatagctctagctaaaggcatagattacgaatatataaaagacgcttgttaataagtaaatgaaaaaaaactagtcgtttataataaaacacgatatggatgccaacgtagtatcatcttctactattgcgacgtatatagacgctttagcgaagaatgcttcagaattagaacagaggtctaccgcatacgaaataaataatgaattggaactagtatttattaagccgccattgattactttgacaaatgtagtgaatatctctacgattcaggaatcgtttattcgatttaccgttactaataaggaaggtgttaaaattagaactaagattccattatctaaggtacatggtctagatgtaaaaaatgtacagttagtagatgctatagataacatagtttgggaaaagaaatcattagtgacggaaaatcgtcttcacaaagaatgcttgttgagactatcgacagaggaacgtcatatatttttggattacaagaaatatggatcctctatccgactagaattagtcaatcttattcaagcaaaaacaaaaaactttacgatagactttaagctaaaatattttctaggatccggtgcccaatctaaaagttctttgttgcacgctattaatcatccaaagtcaaggcctaatacatctctggaaatagaattcacacctagagacaatgaaacagttccatatgatgaactaataaaggaattgacgactctctcgcgtcatatatttatggcttctccagagaatgtaattctttctccgcctattaacgcgcctataaaaacctttatgttgcctaaacaagatatagtaggtttggatctggaaaatctatatgccgtaactaagactgacggcattcctataactatcagagttacatcaaacgggttgtattgttattttacacatcttggttatattattagatatcctgttaagagaataatagattccgaagtagtagtctttggtgaggcagttaaggataagaactggaccgtatatctcattaagctaatagagcctgtgaatgcaatcaatgatagactagaagaaagtaagtatgttgaatctaaactagtggatatttgtgatcggatagtattcaagtcaaagaaatacgaaggtccgtttactacaactagtgaagtcgtcgatatgttatctacatatttaccaaagcaaccagaaggtgttattctgttctattcaaagggacctaaatctaacattgattttaaaattaaaaaggaaaatactatagaccaaactgcaaatgtagtatttaggtacatgtccagtgaaccaattatctttggagaatcgtctatctttgtagagtataagaaatttagcaacgataaaggctttcctaaagaatatggttctggtaagattgtgttatataacggcgttaattatctaaataatatctattgtttggaatatattaatacacataatgaagtgggtattaagtccgtggttgtacctattaagtttatagcagaattcttagttaatggagaaatacttaaacctagaattgataaaaccatgaaatatattaactcagaagattattatggaaatcaacataatatcatagtcgaacatttaagagatcaaagcatcaaaataggagatatctttaacgaggataaactatcggatgtgggacatcaatacgccaataatgataaatttagattaaatccagaagttagttattttacgaataaacgaactagaggaccgttgggaattttatcaaactacgtcaagactcttcttatttctatgtattgttccaaaacatttttagacgattccaacaaacgaaaggtattggcgattgattttggaaacggtgctgacctggaaaaatacttttatggagagattgcgttattggtagcgacggatccggatgctgatgctatagctagaggaaatgaaagatacaacaaattaaactctggaattaaaaccaagtactacaaatttgactacattcaggaaactattcgatccgatacatttgtctctagtgtcagagaagtattctattttggaaagtttaatatcatcgactggcagtttgctatccattattcttttcatccgagacattatgctaccgtcatgaataacttatccgaactaactgcttctggaggcaaggtattaatcactaccatggacggagacaaattatcaaaattaacagataaaaagacttttataattcataagaatttacctagtagcgaaaactatatgtctgtagaaaaaatagctgatgatagaatagtggtatataatccatcaacaatgtctactccaatgactgaatacattatcaaaaagaacgatatagtcagagtgtttaacgaatacggatttgttcttgtagataacgttgatttcgctacaattatagaacgaagtaaaaagtttattaatggcgcatctacaatggaagatagaccgtctacaaaaaactttttcgaactaaatagaggagccattaaatgtgaaggtttagatgtcgaagacttacttagttactatgttgtttatgtcttttctaagcggtaaataataatatggtatgggttctgatatccccgttctaaatgcattaaataattccaatagagcgatttttgttcctataggaccttccaactgtggatactctgtattgttaatagatatattaatacttttgtcgggtaacagaggttctacgtcttctaaaaataaaagttttataacatctggcctgttcataaataaaaacttggcgattctatatatactcttattatcaaatctagccattgtcttatagatgtgagctactgtaggtgtaccatttgattttctttctaatactatatatttctctcgaagaagttcttgcacatcatctgggaataaaatactactgttgagtaaatcagttattttttttatatcgatattgatggacatttttatagttaaggataataagtatcccaaagtcgataacgacgataacgaagtatttatacttttaggaaatcacaatgactttatcagattaaaattaacaaaattaaaggagcatgtatttttttctgaatatattgtgactccagatacatatggatctttatgcgtcgaattaaatgggtctagttttcagcacggtggtagatatatagaggtggaggaatttatagatgctggaagacaagttagatggtgttctacatccaatcatatatctaaagatatacccgaagatatgcacactgataaatttgtcatttatgatatatacacttttgacgctttcaagaataaacgattggtattcgtacaggtacctccgtcgttaggagatgatagtcatttgactaatccgttattgtctccgtattatcgtaattcagtagccagacaaatggtcaataatatgatttttaatcaagattcatttttaaaatatttattagaacatctgattagaagccactatagagtttctaaacatataacaatagttagatacaaggataccgaagaattaaatctaacgagaatatgttataatagagataagtttaaggcgtttgtattcgcttggtttaacggcgtttcggaaaatgaaaaggtactagatacgtataaaaaggtatctaatttgatataatgaattcagtgactgtatcacacgcgccatatactattacttatcacgatgattgggaaccagtaatgagtcaattggtagagttttataacgaagtagccagttggctgctacgagacgagacgtcgcctattcctgataagttctttatacagttgaaacaaccgcttagaaataaacgagtatgtgtgtgcggtatagatccgtatccgaaagatggaactggtgtaccgttcgaatcaccaaattttacaaaaaaatcaattaaggagatagcttcatctatatctagattaaccggagtaattgattataaaggttataaccttaatataatagacggggttataccctggaattattacttaagttgtaaattaggagaaacaaaaagtcacgcgatctactgggataagatttccaagttactgctgcagcatataactaaacacgttagtgttctttattgtttgggtaaaacagatttctcgaatatacgggcaaagttagaatccccggtaactaccatagtcggatatcatccagcggctagagaccgccaattcgagaaagatagatcatttgaaattatcaacgttttactggaattagacaacaaggcacctataaattgggctcaagggtttatttattaatgctttagtgaaattttaacttgtgttctaaatggatgcggctattagaggtaatgatgttatctttgttcttaagactataggtgtcccgtcagcgtgcagacaaaatgaagatccaagatttgtagaagcatttaaatgcgacgagttagaaagatatattgagaataatccagaatgtacactattcgaaagtcttagggatgaggaagcatactctatagtcagaattttcatggatgtagatttagacgcgtgtctagacgaaatagattatttaacggctattcaagattttattatcgaggtgtcaaactgtgtagctagattcgcgtttacagaatgcggtgccattcatgaaaatgtaataaaatccatgagatctaatttttcattgactaagtctacaaatagagataaaacaagttttcatattatctttttagacacgtataccactatggatacattgatagctatgaaacgaacactattagaattaagtagatcatctgaaaatccactaaccagatcgatagacactgccgtatataggagaaaaacaactcttcgggttgtaggtactaggaaaaatccaaattgcgacactattcatgtaatgcaaccaccgcatgataatatagaagattacctattcacttacgtggatatgaacaacaatagttattacttttctctacaacaacgattggaggatttagttcctgataagttatgggaaccagggtttatttcattcgaagacgctataaaaagagtttcaaaaatattcattaattctataataaactttaatgatctcgatgaaaataattttacaacggtaccactggtcatagattacgtaacaccttgtgcattatgtaaaaaacgatcgcataaacatccgcatcaactatcgttggaaaatggtgctattagaatttacaaaactggtaatccacatagttgtaaagttaaaattgttccgttggatggtaataaactgtttaatattgcacaaagaattttagacactaactctgttttattaaccgaacgaggagaccatatagtttggattaataattcatggaaatttaacagcgaagaacccttgataacaaaactaattttgtcaataagacatcaactacctaaggaatattcaagcgaattactctgtccgaggaaacgaaagactgtagaagctaacatacgagacatgttagtagattcagtggagaccgatacctatccggataaacttccgtttaaaaatggtgtattggacctggtagacggaatgttttactctggagatgatgctaaaaaatatacgtgtactgtatcaaccggatttaaatttgacgatacaaagttcgtcgaagacagtccagaaatggaagagttaatgaatatcattaacgatatccaaccattaacggatgaaaataagaaaaatagagagctatatgaaaaaacattatctagttgtttatgcggtgctaccaaaggatgtttaacattcttttttggagaaactgcaactggaaagtcgacaaccaaacgtttgttaaagtctgctatcggtgacctgtttgttgagacgggtcaaacaattttaacagatgtattggataaaggacctaatccatttatcgctaacatgcatttgaaaagatctgtattctgtagcgaactacctgattttgcatgtagtgggtcaaagaaaatcagatctgataatattaaaaagttgacagaaccttgtgtcattggaagaccgtgtttctccaataaaattaataatagaaaccatgcgacaatcattatcgatactaattacaaacctgtttttgataggatagataacgcattaatgagaagaattgccgtcgtgcgattcagaacacacttttctcaaccttctggtagagaggctgctgaaaataatgacgcgtacgataaagtcaaactattagacgaggggttagatggtaaaatacaaaataatagatatagattcgcatttctatacttgttggtgaaatggtacagaaaatatcatgttcctattatgaaactatatcctacacccgaagagattcctgactttgcattctatctcaaaataggtactctgttagtatctagctctgtaaagcatattccattaatgacggacctctccaaaaagggatatatattgtacgataatgtggttactcttccgttgactactttccaacagaaaatatccaagtattttaattctagactatttggacacgatatagagagcttcatcaatagacataagaaatttgccaatgttagtgatgaatatctgcaatatatattcatagaggatatttcatctccgtaaatatatgctcatatatttatagaagatatcacatatctaaatgaataccggaatcatagatttatttgataatcatgttgatagtataccaactatattacctcatcagttagctactctagattatctagttagaactatcatagatgagaacagaagcgtgttattgttccatattatgggatcaggtaaaacaataatcgctttgttgttcgccttggtagcttccagatttaaaaaggtttacattctagtgccgaacatcaacatcttaaaaattttcaattataatatgggtgtagctatgaacttgtttaatgacgaattcatagctgagaatatctttattcattccacaacaagtttttattctcttaattataacgataacgtcattaattataacggattatctcgctacaataactctatttttatcgttgatgaggcacataatatctttgggaataatactggagaacttatgaccgtgataaaaaataaaaacaagattccttttttactattgtctggatctcccattactaacacacctaatactctgggtcatattatagatttaatgtccgaagagacgatagattttggtgaaattattagtcgtggtaagaaagtaattcagacacttcttaacgaacgcggtgtgaatgtacttaaggatttgcttaaaggaagaatatcatattacgaaatgcctgataaagatctaccaacgataagatatcacggacgtaagtttctagatactagagtagtatattgtcacatgtctaaacttcaagagagagattatatgattactagacgacagctatgttatcatgaaatgtttgataaaaatatgtataacgtgtcaatggcagtattgggacaacttaatctgatgaataatttagatactttatttcaggaacaggataaggaattgtacccaaatctgaaaataaataatggcgtgttatacggagaagaattggtaacgttaaacattagttccaaatttaaatactttattaatcggatacagacactcaacggaaaacattttatatacttttctaattctacatatggcggattggtaattaaatatatcatgctcagtaatggatattctgaatataatggttctcagggaactaatccacatatgataaacggcaaaccaaaaacatttgctatcgttactagtaaaatgaaatcgtctttagaggatctattagatgtgtataattctcctgaaaacgatgatggtagtcaattgatgtttttgttttcatcaaacattatgtccgaatcctatactctaaaagaggtaaggcatatttggtttatgactatcccagatactttttctcaatacaaccaaattcttggacgatctattagaaaattctcttacgccgatatttctgaaccagttaatgtatatcttttagccgccgtatattccgatttcaatgacgaagtgacgtcattaaacgattacacacaggatgaattaattaatgttttaccatttgacatcaaaaagctgttgtatctaaaatttaagacgaaagaaacgaatagaatatactctattcttcaagagatgtctgaaacgtattctcttccaccacatccatcaattgtaaaagttttattgggagaattggtcagacaatttttttataataattctcgtattaagtataacgataccaagttacttaaaatggttacatcagttataaaaaataaagaagacgctaggaattacatagatgatattgtaaacggtcacttctttgtatcgaataaagtatttgataaatctcttttatacaaatacgaaaacgatattattacagtaccgtttagactttcctacgaaccatttgtttggggagttaactttcgtaaagaatataacgtggtatcttctccataaaactgatgagatatataaagaaataaatgtcgagctttgttaccaatggatacctttccgttacattggaaccacacgagctgacgttagacataaaaactaatattaggaatgccgtatataagacgtatctccatagagaaattagtggtaaaatggccaagaaaatagaaattcgtgaagacgtggaattacctctcggcgaaatagttaataattctgtagttataaacgttccgtgtgtaataacctacgcgtattatcacgttggggatatagtcagaggaacattaaacatcgaagatgaatcaaatgtaactattcaatgtggagatttaatctgtaaactaagtagagattcgggtactgtatcatttagcgattcaaagtactgcttttttcgaaatggtaatgcgtatgacaatggcagcgaagtcactgccgttctaatggaggctcaacaaggtatcgaatctagttttgtttttctcgcgaatatcgtcgactcataaaaaagagaatagcggtaagtataaacacgaatactatggcaataattgcgaatgttttattctcttcgatatatttttgataatatgaaaaacatgtctctctcaaatcggacaaccatctcataaaatagttctcgcgcgctggagaggtagttgccgctcgtataatctctccagaataatatacttgcgtgtcgtcgttcaatttatacggatttctatagttctctgttatataatgcggtttgccctcatgattagacgacgacaatagtgttctaaatttagatagttgatcagaatgaatgtttattggcgttggaaaaattatccatacagcgtctgcagagtggttgatagttgttcctagatatgtaaaataatccaacttactaggcagcaaattgtctagataaaatactgaatcaaacggtgcagacgtattggcggatctaatggaatccaattgattaactatcttttgaaaatatacatttttatgatccaatacttgtaagaatatagaaataatgataagtccatcatcgtgtttttttgcctcttcataagaactatattttttcttattccaatgaacaagattaatctctccagagtatttgtacacatctatcaagtgattggatccataatcgtcttcctttccccaatatatatgtagtgatgataacacatattcattggggagaaaccctccacttatatatcctcctttaaaattaatccttactagttttccagtgttctggatagtggttggtttcgactcattataatgtatgtctaacggcttcaatcgcgcgttagaaattgcttttttagtttctatattaataggagatagttgttgcggcatagtaaaaatgaaatgataactgtttaaaaatagctcttagtatgggaattacaatggatgaggaagtgatatttgaaactcctagagaattaatatctattaaacgaataaaagatattccaagatcaaaagacacgcatgtgtttgctgcgtgtataacaagtgacggatatccgttaataggagctagaagaacttcattcgcgttccaggcgatattatctcaacaaaattcagattctatctttagagtatccactaaactattacggtttatgtactacaatgaactaagagaaatctttagacggttgagaaaaggttctatcaacaatatcgatcctcactttgaagagttaatattattgggtggtaaactagataaaaaggaatctattaaagattgtttaagaagagaattaaaagaggaaagtgatgaacgtataacagtaaaagaatttggaaatgtaattctaaaacttacaacacgggataaattatttaataaagtatatataagttattgcatggcgtgttttattaatcaatcgttggaggatttatcgcatactagtatttacaatgtagaaattagaaagattaaatcattaaatgattgtattaacgacgataaatacgaatatctgtcttatatttataatatgctagttaatagtaaatgaacttttacagatctagtataattagtcagattattaagtataatagacgactagctaagtctattatttgcgaggatgactctcaaattattacactcacggcattcgttaaccaatgcctatggtgtcataaacgagtatccgtgtccgctattttattaactactgataacaaaatattagtatgtaacagacgagatagttttctctattctgaaataattagaactagaaacatgtttagaaagaaacgattatttctgaattattccaattatttgaacaaacaggaaagaagtatactatcgtcatttttttctctagatccagctactactgataatgatagaatagatgctatttatccgggtggcatacccaaaaggggtgagaatgttccagagtgtttatccagggaaattaaagaagaagttaatatagacaattcttttgtattcatagacactcggttttttattcatggcatcatagaagataccattattaataaattttttgaggtaatcttctttgtcggaagaatatctctaacgagtgatcaaatcattgatacatttaaaagtaatcatgaaatcaaggatctaatatttttagatccgaattcaggtaatggactccaatacgaaattgcaaaatatgctctagatactgcaaaacttaaatgttacggccatagaggatgttattatgaatcattaaaaaaattaactgaggatgattgattagaaaatataaattaatttaccatcgtgtatttttataacgggattgtccggcatatcatgtagatagttaccgtctacatcgtatactcgaccatctacgcctttaaatcctctatttattgacattaatctattagaattggaataccaaatattagtaccctcaattagtttattggtaatattttttttagacgatagatcgatggctcttgaaaccaaggttttccaaccggactcattgtcgatcggtgagaagtctttttcattagcatgaatccattctaatgatgtatgtttaaacactctaaacaattggacaaattcttttgatttgctttgaatgatttcaaataggtcttcgtctacagtaggcataccattagataatctagccattataaagtgcacgtttacatatctacgttctggaggagtaagaacgtgactattgagacgaatggctcttcctactatctgacgaagagacgcctcgttccatgtcatatctaaaatgaagatatcattaattgagaaaaaactaataccctcgcctccactagaagagaatacgcatgttttaatgcattctccgttagtgtttgattcttggttaaactcagccaccgccttgattctagtatcttttgttctagatgagaactctatattagagataccaaagactttgaaatatagtaataagatttctattcctgactgattaacaaatggttcaaagactagacatttaccatgggatgctaatattcccaaacatacatctataaatttgacgcttttctcttttaattcagtaaatagagagatatcagccgcactagcatcccctttcaatagttctccctttttaaaggtatctaatgcggatttagaaaactctctatctcttaatgaatttttaaaatcattatatagtgttgctatctcttgcgcgtattcgcccggatcacgattttgtctttcaggaaagctatcgaacgtaaacgtagtagccatacgtctcagaattctaaatgatgatatacctgtttttatttcagcgagtttagccttttgataaatttcttcttgctttttcgacatattaacgtatcgcattaatactgttttcttagcgaatgatgcagacccttctacgtcatcaaaaatagaaaactcgttattaactatatacgaacatagtcctcctagtttggagactaattctttttcatcgactagacgtttattctcaaatagtgattggtgttgtaaggatcctggtcgtagtaagttaaccaacatggtgaattcttgcacactattgacgataggtgtagccgataaacaaatcatcttatggttttttaacgcaatggtcttagataaaaaattatatactgaacgagtaggacggatcttaccatcttctttgattaatgatttagaaatgaagttatgacattcatcaatgatgacgcatattctactcttggaattaatagttttgatattagtaaaaaatttatttctaaaattttgatcatcgtaattaataaaaatacaatccttcgttatctctggagcgtatctgagtatagtgttcatccaaggatcttctatcaaagcctttttcaccaataagataatagcccaattcgtataaatatccttaagatgtttgagaatatatacagtagtcattgttttaccgacacccgtttcatggaacaataaaagagaatgcatactgtctaatcctaagaaaactcttgctacaaaatgttgataatccttgaggcgtactacgtccgaccccatcatttcaacgggcatattagtagttctgcgtaaggcataatcgatataggccgcgtgtgatttactcatttatgagtgataagtaataactatgttttaaaaatcacagcagtagtttaactagtcttctctgatgtttgttttcgatactttttgaatcagaagtcatactagaataaagcaacgagtgaacgtaatagagagcttcgtatactctattcgaaaactctaagaacttattaatgaattccgtatccactggattgtttaaaatactaaattgaacactgttcacatccttccaagaagaagacttagtgacggacttaacatgagacataaataaatccaaattttttttacaaacatcactagccaccataatggcgctatctttcaaccagctatcgcttacgcattttagcagtctaacatttttaaagagactacaatatattctcatagtatcgattacacctctaccgaataaagttggaagtttaataatacaatatttttcgtttacaaaatcaaataatggtcgaaacacgtcgaaggttaacatcttataatcgctaatgtatagattgttttcagtgagatgattattagatttaatagcatctcgttcacgtttgaacagtttattgcgtgcgctgaggtcggcaactacggcgtccgctttagtactcctcccataatactttacgctattaatctttaaaatttcatagactttatctagatcgctttctggtaacatgatatcatgtgtaaaaagttttaacatgtcggtcggcattctatttagatcattaactctagaaatctgaagaaagtaattagctccgtattccagactaggtaatgggcttttacctagagacagattaagttctggcaatgtttcataaaatggaagaaggacatgcgttccctcccggatattttttacaatttcatccatttacaactctatagtttgttttcattattattagttattatctcccataatcttggtaatacttaccccttgatcgtaagataccttatacaggtcattacatacaactaccaattgtttttgtacataatagattggatggttgacatccatggtggaataaactactcgaacagatagtttatctttccccctagatacattagccgtaatagttgtcggcctaaagaatatctttggtgtaaagttaaaagttagggttcttgttccattattgctttttgtcagtagttcattataaattctcgagatgggtccgttctctgaatatagaacatcatttccaaatctaacttctagtctagaaataatatcggtcttattcttaaaatctattcccttgatgaagggatcgttaatgaacaaatccttggcctttgattcggctgatctattatctccgttatagacgttacgttgactagtccaaagacttacaggaatagatgtatcgatgatgttgatactatgtgatatgtgagcaaagattgttctcttagtggcatcactatatgttccagtaatggcggaaaactttttagaaatgttatatataaaagaattttttcgtgttccaaacattagcagattagtatgaagataaacactcatattatcaggaacattatcaatttttacatacacatcagcatcttgaatagaaacgataccatcttctggaacctctacgatctcggcagactccggataaccagtcggtgggccatcgctaacaataactagatcatccaacaatctactcacatatgcatctatataatctttttcatcttgtgagtaccctggatacgaaataaatttattatccgtatttccataataaggtttagtataaacagagagagatgttgccgcatgaacttcagttacagtcgccgttggttggtttatttgacctattactctcctaggtttctctataaacgatggtttaatttgtacattcttaaccatatatccaataaagctcaattcaggaacataaacaaattctttgttgaacgtttcaaagtcgaacgaagagtcacgaataacgatatcggatactggattgaaggttaccgttacggtaatttttgaatcggatagtttaagactgctgaatgtatcttccacatcaaacggagttttaatataaacgtatactgtagatggttctttaatagtgtcattaggagttaggccaatagaaatatcattaagttcactagaatatccagagtgtttcaaagcaattgtattattgatacaattattatataattcttcgccctcaatttcccaaataacaccgttacacgaagagatagatacgtgattaatacatttatatccaacatatggtacgtaactgaatcttcccatacctttaacttctggaagttccaaactcagaaccaaatgattaagcgcagtaatatactgatccctaatttcgaagctagcgatagcctgattgtctggaccatcgtttgtcataactccggatagagaaatatattgcggcatatataaagttggaatttgactatcgactgcgaagacattagaccgtttaatagagtcatccccaccgatcaaagaattaatgatagtattattcattttctatttaaaatggaaaaagcttacaataaactccgtagagaaatatctataatttgtgagttttccttaaagtaacagcttccgtaaacgccgtctttatctcttagtaggtttattgtatttatgaccttttccttatcttcatagaatactaaaggcaacaaagaaatttttggttcttctctaagagctacgtgagacttaaccatagaagccaacgaatccctacatattttagaacagaaataccctacttcaccacccttgtatgtctcaatactaataggtctaaaaaccaaatcttgattacaaaaccaacacttatcaattacactatttgtcttaatagacacatctgccatagatttataatactttggtagtatacaagcgagtgcttcttctttagcgggcttaaagactgctttaggtgctgaaataaccacatctggaaggcttactcgcttagccatttaattacggaactatttttttatacttctaatgagcaagtagaaaacctctcatctacaaaaacgtactcgtgtccataatcctctaccatagttacacgttttttagatctcatatgtgctaaaaagttttcccatactaattggttactattatttttcgtataatttttaacagtttgaggttttagatttttagttacagaagtgatatcgaatattttatccaaaaagaatgaataattaattgtcttagaaggagtgttttcttggcaaaagaataccaagtgcttaaatatttctactacttcattaatcttttctgtactcagattcagtttctcatcttttacttgattgattatttcaaagactaacttataatcctttttatttattctctcgttagccttaagaaaactagatacaaaatttgcatctacatcatccgtggatatttgatttttttccatgatatccaagagttccgagataatttctccagaacattgatgagacaataatctccgcaatacatttctcaaatgaataagtttattagacacgtggaagtttgactttttttgtacctttgtacatttttgaaataccgactcgcaaaaaatacaatattcatatccttgttcagatactataccgttatgtctacaaccgctacataatcgtagattcatgttaacactctacgtatctcgtcgtccaatattttatataaaaacattttatttctagacgttgccagaaaatcctgtaatatttttagttttttgggctgtgaataaagtatcgccctaatattgttaccgtcttccgccaatatagtagttaaattatccgcacatgcagaagaacaccgcttaggcggattcagtacaatgttatatttttcgtaccaactcatttaaatatcataatctaaaatagttctgtaatatgtctagcgctaatatattgatcataatcctgtgcataaattaagatacaacaatgtctcgaaatcatcgacatggcttcttccatagttagaagatcgtcgtcaaagttagcaacgtgattcatcaacatttgctgttttgaggcagcaaatactgaaccgtcgccattcaaccattcataaaaaccatcgtctgaatccattgataatttcttgtactggtttttgagagctcgcatcaatctagcatttctagctcccggattgaaaacagaaagaggatcgtacatccagggtccattttctgtaaatagaatcgtataatgtcccttcaagaagatatcagacgatccacaatcaaagaattggtctccgagtttgtaacaaactgcggactttaacctatacatgataccgtttagcataatttctggtgatacgtcaatcggagtatcatctattagagatctaaagccggtgtaacattctccaccaaacatattcttattctgacgtcgttctacataaaacatcattgctccattaacgataacaggggaatgaacagcactacccatcacattagttcccaatggatcaatgtgtgtaactccagaacatcttccatagcctatgttaggaggagcgaacaccactcttccactattgccatcgaatgccatagaataaatatccttggaattgatagaaatcggactgtcggatgttgtgatcatcttcataggattaacaactatgtatggtgccgcctgaagtttcatatcgtaactgatgccgtttataggtctagccacagaaaccaacgtaggtctaaatccaactatagacaaaatagaagccaatatctgttcctcatctgtcataacttgagagcatccagtatgaataatcttcattagatggggatctaccgcatcatcatcgttacaataaaaaattcccattctaatgttcataattgcttttctaatcatggtatgcatgtttgctctctgaatctctgtggaaattagatctgatacacctgtaatcactatcggattatcctccgtaagacgattaaccaacaacatataattataagactttacttttctaaattcataaagttgctggattaggctataggtgtctccatgtacatacgcgttctcgagcgcaggaagtttaataccgaatagtgccatcagaataggatgaatatagtaattagtttctggttttctataaataaaagacaaatcttgtgaactagacatatcggtaaaatgcatggattggaatcgtgtagtcgacagaagaatatgatgattagatggagagtatattttatctaactctttgagttggtcaccgattctaggactagctcgagaatgaataagtactaaaggatgagtacatttcacagaaacactagcattgttcaatgtgctctttacatgggtaaggagttgaaatagctcgtttctatttgttctgacaatatttagtttattcataatgttaagcatatcctgaatagtaaagttagatgtgtcatacttgttagtagttagatatttagcaattgcattcccatcatttctcaatctcgtactccaatcatgcgtggatgctacttcgtcgatggaaaccatacaatcctttttgataggctgttgagattgattatttcctgcacgtttaggtttggtacgttgatttctagcccctgcggatataaagtcatcgtctacaatttgggacaatgaattgcatacactacaagacaaagatttatcagaagtgtgaatatgatcttcatctaccaaagaaagagtttgattagtataactagattttagtcctgcgttagatgttaaaaaaacatcgctattgaccacggcttccattatttatattcgtagtttttactcgaaagcgtgattttaatatccaatcttattacttttggaatcgttcaaaacctttgactaattgtagaatttgatctattgccctacgcgtatactcccttgcatcatatacgttcgtcaccagatcgtttgtttcggcctgaagttggtgcatatctctttcaacattcgacatgagatccttaagggccatatcgtctagattttgttgagatgctgctcctggatttggattttgttgtgctgttgtacatactgtaccaccagtaggtgtaggagtacatacagtggccacaataggaggttgaggaggtgtaaccgttggagtagtacaagaaatatttccatccgattgttgtgtacatgtagttgttggtaacgtctgagaaggttgggtagatggcggtgtcgtcgtcttttgatctttattaaatttagagataatatcctgaacagcattgctcggcgtcaacgctggaaggagtgaactcgccggcgcatcagtatctgcagacagccaatcaaaaagattagacatatcagatgatgtattagtttgttgtcgtggttttggtgtaggagcagtactactaggtagaagaataggagccggtgtagctgttggaaccggctgtggagttatatgaatagttggttgtagcggttggataggctgtctgctggcggccatcatattatctctagctagttgttctcgcaactgtctttgataatacgactcttgagactttagtcctatttcaatcgcttcatcctttttcgtatccggatccttttcttcagaataatagattgacgactttggtgtagaggattctgccagcctctgtgagaacttgttaaagaagtccatttaaggctttaaaattgaattgcgattataagattaaatggcagacacagacgatattatcgactatgaatccgatgatctcaccgaatacgaggatgatgaagaagaggaagaagatggagagtcactagaaactagtgatatagatcccaaatcttcttataagattgtagaatcagcatccactcatatagaagatgcgcattccaatcttaaacatatagggaatcatatatctgctcttaaacgacgctatactagacgtataagtctatttgaaatagcgggtataatagcagaaagctataacttgcttcaacgaggaagattacctctagtttcagaattttctgacgaaacgatgaagcaaaatatgctacatgtaattatacaagagatagaggagggttcttgtcctatagtcatcgaaaagaacggagaattgttgtcggtaaacgattttgacaaagatggtctaaaattccatctagactatattatcaaaatttggaaacttcaaaaacgatattagaatttatacgaatatcgttctctaaatgtcacaatcaagtctcgcatgttcagcaatttattgtcgtactttatatcgtgttcattaacgatattttgcaaaatagtaatgattctatcttccttcgatagatattcttcagagattattgtcttatattctttcttgttatccgatatgaatttgataagactttgaacattattgatacccgtctgtttaattttttctacagatattttagttttggcagattctatcgtatctgtcaatagacatccaacatcgacattcgacgtcaattgtctataaatcaacgtataaattttagaaataacattagcgaattgttgtgcattgatgtcgttattctgaaacagtatgattttaggtagcattttcttaacaaagagaacgtatttattgttactcagttgaacagatgatatatccagattactaacgcatctgattccgtataccaaactttcagaagaaatggtatacaattgtttgtattcattcaatgtctctttttcagaaattagtttagagtcgaatactgcaataattttcaagagatagttttcatcagataagattttatttagtgtagatatgataaaactattgttttgttggagaacttgatacgccgcgttctctgtagtcgacgctctcaaatgggaaacaatctccattatttttttggaatcggatactatatcttcggtatcttgacgcagtctagtatacatagagttaagagagattagagtttgtacattaagcaacatgtctctaaatgtggctacaaacttttcctttttcacatcatctagtttattatataccgatttcacaacggcaccagatttaaggaaccagaatgaaaaactctgataactacaatatttcatcatagttacgattttatcatcttctatagttggtgtaatagcgcatacctttttctccaagactggaaccaacgtcataaaaatgtttaaatcaaaatccatatcaacatctgatgcgctaagaccagtctcgcgttcaagattatctttactaatggtgacgaactcatcgtataaaactctaagtttgtccattatttatttacagatttagttgtttaatttatttgtgctcttccagagttgggatagtatttttctaacgtcggtattatattattaggatctacgttcatatgtatcataatattaatcatccacgttttgataaatctatctttagcttctgaaataacgtatttaaacaaaggagaaaaatatttagctacggcatcagacgcaataacattttttgtaaatgtaacgtatttagacgacagatcttcgttaaaaagttttccatctatgtagaatccatcggttgttaacaccattcccgcgtcagattgaataggagtttgaatagtttgttttggaaatagatccttcaataacttatagttgggtgggaaaaaatcgattttatcactagactctttcttttttactatcattacctcatgaactatttcttgaatgagtatatgtattttctttcctatatcggacgcgttcattggaaaatataccatgtcgttaactataagaatatttttatcctcgtttacaaactgaataatatcagatgtagttcgtaaacgaactatatcatcaccagcacaacatctaactatatgatatccactagtttcctttagccgtttattatcttgttccatattagcagtcattccatcatttaagaaggcgtcaaagataatagggagaaatgacattttggattctgttacgactttaccaaaattaaggatatacggacttactatctttttctcaacgtcaatttgatgaacacacgatgaaaatgtgcttctatgagattgatcatgtagaaaacaacaagggatacaatatttccgcatatcatgaaatatattaagaaatcccaccttattatatttccccaaaggatccatgcacgtaaacattatgccgttatcattaataaagacttctttctcatcggatctgtaaaagttgttactgatttttttcattccaggatctagataattaataatgatgggttttctattcttattctttgtattttggcatatcctagaccagtaaacagtttccactttggtaaaatcagcagacttttgaacgctattaaacatggcattaatggcaataactaaaaatgtaaaatatttttctatgttaggaatatggtttttcactttaatagatatatggtttttggccaaaatgatagatatttttttatccgaggatagtaaaatattattagtcgccgtctctataaaaatgaagctagtctcgatatccaattttattctagaattgataggagtcgccaaatgtaccttatacgttatatctcccttgatgcgttccatttgtgtatctatatcggacacaagatctgtaaatagttttacgttattaatcatcacggtatcgccgtcgctagataacgctaatgtaccatccaagtcccaaatggagagatttaactgttcatcgtttagaataaaatgattaccggtcatattaataaagtgttcatcgtatctagataacaacgacttataattaatgtccaagtcttgaactcgctgaatgatcttttttaacccagttagttttagattggtacgaaatatattgttaaactttgattctacagtaatgtccaaatctagttgtggaaatacttccatcaacattgtttcaaacttgataatattattatctacatcttcgtacgatccaaattccggaatagatgtatcgcacgctctggccacccagataaccaaaaagtcacacgctccaggatatacattgtataaaaagctatcgttttttagtagggtttttttctgcgtgtatacgaagggattaaaaatagtattatcaacgtaactatattccaaattattcttatgagaatagataataatatcgtccttaatatctaacaaatttcctaaatatccctttaattgagtcattcgaagcgtcaatagaatatgtctcttaactatttccggctgttgtatatttaaatgacttcgtaaaaaataatatatgggcgacttctcatctatgtaatcatatggagtgagatatagggctcgttctacctcctgccccttacccacctgtaataccaattgcggacttactatatatcgcatatttatatcgtggggtaaagtgaaaatctactaccgatgatgtaagtcttacaatgttcgaaccagtaccagatcttaatttggaggcctccgtagaactaggggaggtaaatatagatcaaacaacacctatgataaaggagaatagcggttttatatcccgcagtagacgtctattcgcccatagatctaaggatgatgagagaaaactagcactacgattctttttacaaagactttattttttagatcatagagagattcattatttgttcagatgcgttgacgctgtaaaagacgtcactattaccaaaaaaaataacattatcgtggcgccttatatagcacttttaactatcgcatcaaaaggatgcaaacttacagaaacaatgattgaagcattctttccagaactatataatgaacatagtaagaaatttaaattcaactctcaagtatccatcatccaagaaaaactcggataccagtttggaaactatcacgtttatgattttgaaccgtattactctacagtagctctggctattcgagatgaacattcatctggcatttttaatatccgtcaagagagttatctggtaagttcattatctgaaataacatatagattttatctaattaatctaaaatctgatcttgttcaatggagtgctagtacgggcgctgtaattaatcaaatggtaaatactgtattgattacagtgtatgaaaagttacaactggtcatagaaaatgattcacaatttacatgttcattggctgtggaatcaaaacttccaataaaattacttaaagatagaaatgaattatttacaaaattcattaacgagttaaaaaagaccagttcattcaagataagcaaacgcgataaggatacgctactaaaatattttacttaggactggagttagaatttatagacgactcatttcgtttatcattgttactattattactattactatcattattagtgttggcattattagtattcttcttgtcatcttgttcagaaatatacagcaatgctatacctaatactaaatacattatcatgctcgcaatggctctaacaacaacgaaccaaaatgaatttggtcgtagcttttgttcacaaaaatacataaagaaatgtctacataaatctatggcgccattggctacttgaaatagcgccagtcctcctacagattttaatatagctgtataacatgacatttattcatcatcaaaagagacagagtcaccatctgtcatatttagattttttttcatgtgttcaaagtatcctctactcatttcattataatagtttatcatacttagaattttaggacggatcaatgagtaagacttgactagatcgtcagtagtaatttgtgcatcgtctattctgcatccgcttcgtcgaataatgtatagcatcgctttgagattctccatagctatcaagtctttatacaatgacatggaaatatctgtgaatactttatacttctccaacatcgatgccttaacatcatcgcctactttagcattgaaaatacgttctattgtgtagatggatgtagcaagatttttaaacaacaatgccatcttacacgatgattgcctcaagtctccaatcgtttgtttagaacgattagctacagagtccaatgcttggctgactagcatattattatctttagaaattgtattcttcaatgaggcgtttatcatatctgtgatttcgttagtcatattacagtctgactgggttgtaatgttatccaacatatcacctatggatacggtacacgtaccagcatttgtaataatcctatctaagatgttgtatggcattgcgcagaaaatatcttctcctgtaatatctccactctcgataaatctactcagattattcttaaatgccttattctctggagaaaagatatcagtgtccatcatttcattaatagtatacgcagaaaagataccacgagtatcaattctatccaagatacttatcggttccgagtcacagataatggtttcctctccttcgggagatcctgcatagaaatatctaggacaatagtttctatactgtctgtaactctgataatctctaaagtcactaactgataccatgaaattgagaagatcaaacgctgaagtaattaatttttctgcctcgtttttactacaactagttttcatcaatgtagtgacgatgtattgtttagttacttttggtctaatactgatgatagagatattattgcttcccataatggatcttctagtagtcaccttaaagcccattgatgcgaatagcagatagataaagtcttggtatgactcctttctaatatagtacggactacctttgtcacccaactttatacccacataagccataacaacctctttaatagccgtttcatgaggtttatcagccatgagcctgagtagttggaagaatctcatgaatcccgtctcagaaagtcctatatgcatgatagatttatctttcctgggaaactctcgtatagtcatagatgaaatactctttaaagtttctgaaataagattagtaacagtcttacctccgactactctaggtaacaaacaaactctaataggtgttttctctgcggagataatatcagaaaggatagagcaataagtagtattattgtgattataaagaccgaatacataacaggtagaatttataaacatcatgtcctgaaggtttttagacttgtattcctcgtaatccataccgtcccaaaacatggatttggtaactttgatagccgtagatctttgttccttcgccaacaggttaaagaaattaataaagaatttgttgtttctatttatgtccacaaattgcacgtttggaagcgccacggttacattcactgcagcattttgaggatcgcgagtatgaagtacgatgttattgtttactggtatatctggaaagaaatctaccagtctaggaataagagattgatatcgcatagaaatagtaaagtttataatctcatcatcgaagagcattttgttaccattgtaataaatatccactctgtcatatgtataaatgaagtactgttcaaacatgatgagatgtttatatgttggcatagtagtgagatcgacgtttggtaatggcaatgtattaagattaactccataatgtctagcagcatctgcgatgttataagcgtcgtcaaagcggggtcgatcttgtattgttatatattgtctaacacctataagattatcaaaatcttgtctgcttaatacaccgttaacaatttttgccttgaattcttttattggtgcattaataacatccttatagaggatgttaaacaaataagtgttatcaaagttaagatctggatatttcttttctgctagaacatccattgagtcggagccatctggtttaatataaccaccgataaatctagctctgtattctgtatccgtcaatctaatattaagaaggtgttgagtgaaaggtggaagatcgtaaaagctgtgagtattaatgataggattagtttccgaactaatgttaattggggtattaataatatctatatttccagcgttaagtgtaacattaaacagttttaattcacgtgacgtggtatcaattaaataattaatgcccaatttggatatagcagcctgaagctcatcttgtttagttacggatcctaatgagttattaagcaatatatcgaacggatgaacgaaggttgttttaagttggtcacatactttgtaatctagacatagatgcggaagaacggtagaaactatacgaaataaatattcagagtcctctaattgatcaagagtaactattgacttaataggcatcatttatttagtattaaatgacgaccgtaccagtgacggatatacaaaacgatttaattacagagttttcagaagataattatccatctaacaaaaattatgaaataactcttcgtcaaatgtctattctaactcacgttaacaacgtggtagatagagaacataatgccgccgtagtgtcatctccagaggaaatatcctcacaacttaatgaagatctatttccagatgatgattcaccggccactattatcgaacgagtacaacctcatactactattattgacgatactccacctcctacgtttcgtagagagttattaatatcggaacaacgtcaacaacgagaaaaaagatttaatattacagtatcgaaaaatgctgaagcaataatggaatctagatctatgataacttctataccaacacaaacaccatccttgggagtagtttatgataaagataaaagaattcagatgttagaggatgaagtggttaatcttagaaatcaacgatctaatacaaaatcatctgataatttagataattttaccaaaatactatttggtaagactccgtacaaatcaacagaagttaataagcgtatagccatcgttaattatgcaaatttgaacgggtcccccttatcagtcgaggacttggatgtttgttcggaggatgaaatagatagaatctataaaacgattaaacaatatcacgaaagtagaaaacgaaaaattatcgtcactaacgtgattattattgtcataaacattatcgagcaggcattgctaaaactcggatttgaagaaatcaaaggactgagtaccgatatcacttcagaaattatcgatgtggagatcggagatgactgcgatgctgtagcatctaaactaggaatcggtaacagtccggttcttaatattgtattgtttatactcaagatattcgttaaacgaattaaaattatttaatttaatacattcccatatccagacaacaatcgtctggattaatctgttcctgtcgtctcataccggacgacatattaatctttttattagtgggcatctttttagatggtttctttttcccagcattaactgagtcgatacctagaagatcgtgattgatctctccgaccattccacgaacttctaattggccgtctctgacggtaccataaactattttaccagcattagtaacagcttggacaatctgaccatccatcgcattgtacgatgtagtagtaactgttgttctacgtctaggagcaccagaagtatttttggagcccttggatgttgatgtagaagaagacgaggattttgattttggtttacatgtaatacattttgaactctttgattttgtatcacatgcgccggcagtcacatctgtttgagaattaagattattgttgcctcctttgacggctgcatctccaccgatttgcgctagtagatttttaagctgtggtgtaatcttattaactgtttcgatataatcatcgtaactgcttctaacggctaaattttttttatccgccatttagaagctaaaaatatttttatttatgcagaagatttaactagattatacaatgaactaatatgatccttttccagattatttacaaacttggtattttttggttctggaggaggcgaatttaaattcggacttggattcggattttgtaagttcttgatcttattatacatcgagtataggatggcgacagtaactgctacacaaataccgatcaaaagaagaataccaatcatttattgacaataacttcactattgatcaagtatgcaatatatcatcttttcactaaataagtagtaataatgattcaacaatgtcgagatatatggacgataataatttagttcatggaaatatcgctatgattggtgtgaatgactccgctaactctgtggggtgcgcagtgctttccccacatagaataaattagcattccgactgtgataataataccaagtataaacgccataatactcaatactttccatgtacgagtgggactggtagacttactaaagtcaataaaggcgaagatacacgaaagaatcaaaagaatgattccagcgattagcacgccggaaaaataatttccaatcataagcatcatgtccatttaactaataaaaattttaaatcgccgaatgaacaaagtggaatataaaccatataaaaacaatagtttgtactgcaaaaataatatctatttttgttttcgaagatatggtaaaattaaatagtagtacacagcatgttataactaacagcagcaacggctcgtaattacttatcatttactagacgaaaaggtggtgggatattttcttgctcaaataatacgaatatatcacccatccattttatgcgatgtttatatactctaatctttaatagatctatagacgacgggtttaccaacaatatagattttatcgattcatctaatttaaacccttccttaaacgtgaatgatctattatctggcataacgatgaccctacctgatgaatcggacaatgtactgggccatgtagaataaattatcaacgaattatcgtctacgaacatttatatcatttgttttaattttaggacgcgaataaatggatataaaatagaaaataacagatattacaaccagtgttatggccgcgcccaaccaggtaggcagttttattttatcttttactacaggttctcctggatgtacgtcaccaacggcggacgtagttctagtacaattagacgtaagttccgcttgggaattttttaacgctaaagagttaacgttaatcgtgcacccaacgtatttacatctagttcgttgaacatcttgattataatataaccattttctatctctagattcgtcagtgcactcatgtaaccaacataccctaggtcctaaatatttatctccggaattagattttggataattcgcgcaccaacaatttctatttcctttatgatcgttacaaaagacgtataatgccgtatccccaaaagtaaaataatcaggacgaataattctaataaactcagaacaatatctcgcatccatatgtttggagcaaatatcggaataagtagacatagccggtttccgttttgcacgtaaccattctaaacaattggggtttccaggatcgtttctacaaaatccagtcatgaaatcgtcacaatgttctgtcttgtaattattattaaatatttttggacagtgtttggtatttgtcttagaacaacattttgccacgctatcactatcgcccaggagataatccttttttataaaatgacatcgttgcccggatgctatataatcagtagcgtgttttaaatccttaatatattcaggagttacctcgttctgataatagattaatgatccaggacgaaatttgaaagaactacatggttctccatgaattaatacatattgtttagcaaattcaggaactataaaactactacaatgatctatcgacataccatctatcaaacaaaacttgggtttaatttctcccggagatgtttcataatagtacgtataactttcttctgcaaacttaacagctctattatattcaggataattaaaacctaattccatatatttgtctcgtatatctgctattcctggtgctattttgattctattaagagtaacagctgcccccattcttaataatcgtcagtatttaaactgttaaatgttggtatatcaacatctaccttatttcccgcagtataaggtttgttgcaggtatactgttcaggaatggttacatttatacttcttctatagtcctgtctttcgatgttcatcacatatgcaaagaacagaataaacaaaataatgtaagaaataatattaaatatctgtgaattcgtaaatacattgattgccataataattacagcagctacaatacatacaatagacattcccacagtgttgccattacctccacgatacatttgagttactaagcaataggtaataactaagctagtaagaggcaatagaaaagatgagataaatatcatcaatatagagattagaggagggctatatagagccaagacgaacaaaatcaaaccgagtaacgttctaacatcattatttttgaagattcccaaataatcattcattcctccataatcgttttgcatcatacctccatctttaggcataaacgattgctgctgttcctctgtaaataaatctttatcaagcactccagcacccgcagagaagtcgtcaagcatattgtaatatcttaaataactcatttatatattaaaaaatgtcactattaaagatggagtataatctttatgccgaactaaaaaaaatgacttgtggtcaacccctaagtctttttaacgaagacggggatttcgtagaagttgaaccgggatcatcctttaagtttctgatacctaagggattttacgcctctccttccgtaaagacgagtctagtattcgagacattaacaacgaccgataataaaatcactagtatcaatccaacaaatgcgccaaagttatatcctcttcaacgcaaagtcgtatctgaagtagtttctaatatgaggaaaatgatcgaatcaaaacgtcctctatacattactcttcacttggcgtgtggatttggtaagactattaccacgtgttatcttatggctacacacggtagaaaaaccgtcatttgcgtacccaataaaatgttaatacatcaatggaagacacaggtagaggcagtcggattggaacataagatatccatagatggagtaagtagtctattaaaggaactaaagactcaaagtccggatgtattaatagtagtcagtagacatctgacaaacgatgccttttgtaaatatatcaataagcattatgatttgttcatcttggatgaatcacatacgtataatctgatgaacaatacagcagttacaagatttttagcgtattatcctccgatgatgtgttattttttaactgctacacctagaccatctaaccgaatttattgtaacagtattattaatattgccaagttatccaatctaaaaaaaactatctatgcagtagatagtttttttgagccatattccacagataatattagacatatggtaaaacgactagatggaccatctaataaatatcatatatataccgagaagttattatctgtagacgagcctagaaatcaacttattcttgataccctggtagaagaattcaagtcaggaactattaatcgcattttagttattactaaactacgtgaacatatggtattattctacaaacgattattagattttttcggaccagaggttgtatttataggagacgcccaaaatagacgtactccagatatggtcaaatcaatcaaggaactaaatagatttatattcgtatccaccttattttattccggtactggtttagatattcctagtttggattcgttgttcatttgctcggcagtaatcaacaatatgcaaatagagcaattactagggagggtatgtcgagaaacagaactattagataggacggtatatgtatttcctaacacatccatcaaagaaataaagtacatgataggaaatttcatgcaacgaattattagtctgtctgtagataaactaggatttaaacaaaaaagttatcggaaacatcaagaatccgatcccacttctgcatgtacaacatcatccagagaagaacgtgtattaaatagaatatttaactcgcaaaatcgttaagaagtttaagcgacgatccgcatgctgcgcaggccagtgtattacccctcatagtattaatataatccaatgatacttttgtgatgtcggaaatcttaaccaatttagactgacaggcagaacacgtcatgcaatcatcatcgtcatcgataactgtagtcttgggcttctttttgcgactcttcattccggaacgcacattggtgctatccatttaggtagtaaaaaataagtcagaatatgccctataacacgatcgtgcaaaacctggtatatcgtctctatctttatcacaatatagtgtatcgacatttttattattattgacctcgtttatcttggaacatggaatgggaacatttttgttatcaacggccatctttgccttaattccagatgttgtaaaattataactaaacagtctatcatcgacacaaatgaaattcttgtttagacgtttgtagtttacgtatgcggctcgttcgcgtctcattttttcagatattgcaggtactataatattaaaaataagaatgaaataacataggattaaaaataaagttatcatgacttctagcgctgatttaactaacttaaaagaattacttagtctgtacaaaagtttgagattttcagattctgcggctatagaaaagtataattctttggtagaatggggaacatctacttactggaaaataggcgtgcaaaaggtagctaatgtcgagacgtcaatatctgattattatgatgaggtaaaaaataaaccgtttaatattgatccgggctattacattttcttaccggtatattttgggagcgtctttatttattcgaagggtaaaaatatggtagaacttggatctggaaactcttttcaaataccagatgatatgcgaagtgcgtgtaacaaagtattagacagcgataacggaatagactttctgagatttgttttgttaaacaatagatggataatggaagatgctatatcaaaatatcagtctccagttaatatatttaaactagctagtgagtacggattaaacatacccaaatatttagaaattgaaatagaggaagacacattatttgacgacgagttatactctattatagaacgctctttcgatgataaatttccaaaaatatccatatcgtatattaagttgggagaacttagacggcaagttgtagactttttcaaattctcattcatgtatattgagtccatcaaggtagatcgtataggagataatatttttattcctagcgttataacaaaatcaggaaaaaagatattagtaaaagatgtagaccatttaatacgatccaaggttagagaacatacatttgtaaaagtaaaaaagaaaaacacattttccattttatacgactatgatggaaacggaacagaaactagaggagaagtaataaaacgaattatagacactataggacgagactattatgttaacggaaagtatttctctaaggttggtagtgcaggcttaaagcaattgactaataaattagatattaatgagtgcgcaactgtcgatgagttagttgatgagattaataaatccggaactgtaaaacgaaaaataaaaaaccaatcagcatttgatttaagcagagaatgtttgggatatccagaagcggattttataacgttagttaataacatgcggttcaaaatagaaaattgtaaggttgtaaatttcaatattgaaaatactaattgtttaaataacccgagtattgaaactatatatggaaactttaaccagttcgtctcaatctttaatgtcgtcaccgatgtcaaaaaaagattattcgagtgaaataatatgcgcctttgatataggtgcaaaaaatcctgccagaactgttttagaagtcaaggataactccgttagggtattggatatatcaaaattagactggagttctgattgggaaaggcgcatagctaaagatttgtcacaatatgaatacactacagttcttctagaacgtcagcctagaaggtcgccgtatgttaaatttatctattttattaaaggctttttatatcatacatcggctgccaaagttatttgcgtctcgcctgtcatgtctggtaattcatatagagatcgaaaaaagagatcggtcgaagcatttcttgattggatggacacattcggattgcgagactccgttccggatagacgcaaattagacgatgtagcggatagtttcaatttggctatgagatacgtattagataaatggaatactaattatacaccttataataggtgtaaatctagaaattacataaaaaaaatgtaataacgttagtaacgccattatggataatctatttacctttctacatgaaatagaagatagatatgccagaactatttttaactttcatctaataagttgcgatgaaataggagatatatatggtcttatgaaagaacgcatttccttagaggatatgtttgataatatagtgtataataaagatatacatcctgccattaagaaactagtgtattgcgacatccaacttactaaacacattattaatcagaatacgtatccggtatttaacgattcttcacaagtgaaatgttgtcattatttcgacataaactcagataatagcaatattagctctcgtacagtagagatatttgagagggaaaagtcatctcttgtatcatatattaaaactaccaataagaagagaaaggtcaattacggcgaaataaagaaaactgttcatggaggcactaatgcaaattacttttccggtaaaaagtctgacgagtatctgagtactacagttagatccaacattaatcaaccttggatcaaaaccatctctaagaggatgagagttgatatcattaatcactctatagtaacgcgtggaaaaagctctatattacaaactatagaaattatttttactaatagaacatgtgtgaaaatattcaaggattctactatgcacattattctatccaaggacaaggatgaaaaggggtgtatacacatgattgacaaattattctatgtctattataatttatttctgttgttcgaagatatcatccaaaacgagtactttaaagaagtagctaatgttgtaaaccacgtactcacggctacggcattagatgagaaattattcctaattaagaaaatggctgaacacgatgtttatggagttagcaatttcaaaatagggatgtttaacctgacatttattaagtcgttggatcataccgttttcccctctctgttagatgaggatagcaaaataaagttttttaaggggaaaaagctcaatattgtagcattacgatctctggaggattgtataaattacgtgactaaatccgagaatatgatagaaatgatgaaggaaagatcgactattttaaatagcatagatatagaaacggaatcggtagatcgtctaaaagaattgcttctaaaatgaaaaaaaacactgattcagaaatggatcaacgactcggatataagtttttggtgcctgatcctaaagccggagttttttatagaccgttacatttccaatatgtatcgtattctaattttatattgcatcgattgcatgaaatcttgaccgtcaagcggccactcttatcgtttaagaataatacagaacgaattatgatagaaattagcaatgttaaagtgactcctccagattactcacctataatcgcgagtattaaaggtaagagttatgacgcattagccacgttcactgtaaatatctttaaagaggtaatgaccaaagagggtatatccatcactaaaataagtagttatgagggaaaagattctcatttgataaaaattccgctactaataggatacgggaataaaaatccacttgatacagccaagtatcttgttcctaatgtcataggtggagtctttatcaataaacaatctgtcgaaaaagtaggaattaatctagtagaaaagattacaacatggccaaaatttagggttgttaagccaaactcattcactttctcgttttcctccgtatcccctcctaatgtattaccgacaagatatcgccattacaagatatctctggatatatcacaattggaagcgttgaatatatcatcgacaaagacatttataacggtcaatattgttttgctgtctcaatatttatctagagtgagtctagaattcattagacgtagtttatcatacgatatgcctccagaagttgtctatctagtaaacgcgataatagatagtgctaaacgaattactgaatctattactgactttaatattgatacatacattaatgacctggtggaagctgaacacattaaacaaaaatctcagttaacgattaacgagttcaaatatgaaatgctgcataactttttacctcatatgaactatacacccgatcaactaaagggattttatatgatatctttactaagaaagtttctctactgtatcttccacacttctagatatccagatagagattcgatggtttgtcatcgcatcctaacgtacggcaaatattttgagacgttggcacatgatgaattagagaattacataggcaacatccgaaacgatatcatgaacaatcacaagaacagaggcacttacgcggtaaacattcatgtactaacaactcccggacttaatcacgcgttttctagcttattgagtggaaagttcaaaaagtcagacggtagttatcgaacacatcctcactattcatggatgcagaatatttctattcctaggagtgttggattttatccggatcaagtaaagatttcaaagatgttttctgtcagaaaataccatccaagtcaatatctttacttttgttcatcagacgttccggaaagaggtcctcaggtaggtttagtatctcaattgtctgtcttgagttccattacaaatatactaacgtctgagtatttggatttggaaaagaaaatttgtgagtatatcagatcatattataaagatgatataagttactttgaaacaggatttccaatcactatagaaaatgctctagtcgcatctcttaatccaaatatgatatgtgattttgtaactgactttagacgtagaaaacggatgggattcttcggtaacttggaggtaggtattactttagttagggatcacatgaatgaaattcgcattaatattggagcgggaagattagtcagaccattcttggttgtggataacggagagctcatgatggatgtgtgtccggagttagaaagcagattagacgacatgacattctctgacattcagaaagagtttccgcatgtcatcgaaatggtagatatagaacaatttacttttagtaacgtatgtgaatcggttcaaaaatttagaatgatgtcaaaggatgaaagaaagcaatacgatttatgtgactttcctgccgaatttagagatggatatgtagcatcttcactagtgggaatcaatcacaattctggacccagagctattcttggatgtgctcaagctaaacaagctatctcttgtctgagttcggatatacgaaataaaatagacaatggaattcatttgatgtatccagagaggccaatcgtgattagtaaggctttagaaacttcaaagattgcggctaattgcttcggccaacatgttactatagcattaatgtcgtacaaaggtatcaatcaagaggatggaattatcatcaaaaaacaatttattcagagaggcggtctcgatatagttaccgcaaagaaacatcaagtagaaattccattggaaaactttaataacaaagaaagagataggtctaacgcctattcaaaattagaaagtaatggattagttagactgaatgctttcttggaatccggagacgctatggcacgaaatatctcatcaagaactcttgaagatgattttgctagagataatcagattagcttcgatgtttccgagaaatataccgatatgtacaaatctcgcgttgaacgagtacaagtagaacttactgacaaagttaaggtacgagtattaaccatgaaagaaagaagacccattctaggagacaaatttaccactagaacgagtcaaaagggaacagtcgcgtatgtcgcggatgaaacggaacttccatacgacgaaaatggtatcacaccagatgtcattattaattctacatccatcttctctagaaaaactatatctatgttgatagaagttattttaacagccgcatattctgctaagccgtacaacaataagggagaaaaccgacctgtctgttttcctagtagtaacgaaacatccatcgatacatatatgcaattcgctaaacaatgttatgagcattcaaatccgaaattgtccgatgaagaattatcggataaaatcttttgtgaaaagattctctatgatcctgaaacggataagccttatgcatccaaagtattttttggaccaatttattacttgcgtctgaggcatttaactcaggacaaggcaaccgttagatgtagaggtaaaaagacgaagctcattagacaggcgaatgagggacgaaaacgtggaggaggtatcaagttcggagaaatggagagagactgtttaatagcgcatggtgcagccaatactattacagaagttttgaaagattcggaagaagattatcaagatgtgtatgtttgtgaaaattgtggagacatagcagcacaaatcaagggtattaatacatgtcttagatgttcaaaacttaatctctctcctctcttaacaaaaattgataccacgcacgtatctaaagtatttcttactcaaatgaacgccagaggcgtaaaagtcaaattagatttcgaacgaaggcctccttcgttttataaaccattagataaagttgatctcaagccgtcttttctggtgtaatattctagtttggtagtagatacatatcaatatcatcaaattcgagatccgaattataaaatgggcgtggattgttaactatagaatcggacgtctgatattcgaaaatctgtggagtttcaggttttggtggaggtgtaactgctacttgggatactgaagtctgatattcagaaagctgtggatgttctggttcggcatccaccgatggtgtcacatcactaatcggttcggtaacgtctgtggatggaggtgctacttctacagaacctgtagcctcagttgtcaacggagatacatttttaatgcgagaaaatgtataatttggtaatggtttcttatgtggatctgaagaagaggtaagatatctactagaaagataccgatcacgttctagttctcttttgtagaacttaactttttctttctccgcatctagttgatattccaacctcttcacgttactacgttcagattccaattcacgttcgcatgggttacctccgcagtttttacgagcgatttcacgttcagccttcatgcgtctctccctctctctatcgagtttatcagagcagtctttctgaaggcgatcgaactccataaatttctccaacgctttgattgtttccatagatttccgaagttcagcttttaggactgtgattctttttctttcgaattcacagctggatgtacaaccgtttccattaccgccatctctaagtttcttttctagatcggcaacatttcatccccatgccttttacattcctcgagtctactgtcgtcgaaatatcgttccagctccttttcgacatcaataactttagcacgttgtctctcaagctctcttttgtagttatctgattccctggcacgtttaagatcttcatgcaattgagtcagctcttaacttcctctcttgcttcttcgtcatagtacgcgcaatcactgtgagatccattgttaccacgtctacactcggcgagctcgcgtttaagagattcaatttcccgtttgtattggtccatgtttccattgctaccaccattagatttacaggctgctagttgtcgttcgagatcagaaatacgggttttcttggaattgatttcgtcgatgtacttggcatcgaaacacttattaagttctttttccaattctacgattttatttctttcgcgagtcaattccctcctgtagtaactatctgttttgtcagattcacgctctctacgtagactttcttgcaagttactaatttgttccctagcacgtccgagtttagttttatatgctgaatagagttctgattcatcctttgagcagatctctagcgatcgtttaagattcctaattctagtctttagcctatttacctcctcagaagatgttccgttaccgttgcgtttacactcgttaagctgtctatcaagatccatgattctatctctaagacgttgcatctctctttccatatcagcattgctttcattattacgtctgcagtcactcaactgtctttcaatatctgagattctatctctaagacgtcgcatctctctctgtttcggcattggtttcattattacgtctacagtcgttcaactgtctttcaagatctgatattctagattggagtctgctaatctctgtagcattttcacggcattcactcagttgtctttcaagatctgaaattttagattggagtctgctaatctctgtaagatttcctcctccgctctcgatgcagtcggtcaacttattctctagttctctaatacgcgaacgcagtgcatcaacttcttgcgtgtcttcctggttgcgtgtacattcatcgagtctagattcgagatctctaacgcgtcgtcgttcttcctcaagttctctgcgtactacagaaagcgtgtccctatcttgttgatatttagcaatttctgattctagagtactgattttgcttacgtagttactaatatttgtcttggccttatcaagatcctccttgtatttgtcgcattccttgatatccctacgaagtctggacagttcccattcgacattacgacgtttatcgatttcagctcggagatcgtcatcgcgttgttttagccacatacgactgagttcaagttctcgttgacaagatccatctacttttccattcctaatagtatccagttccttttctagttctgaacgcatttctcgttccctatcaagcgattctctcaattctcggatagtcttcttatcaatttctaataaatctgaaccatcatctgtcccattttgaatatccctgtgttctttgatctcttttgtaagtcggtcgattctttcggttttataaacagaatccctttccaaagtcctaatcttactgagtttatcactaagttctgcattcaattcggtgagttttctcttggcttcttccaactctgttttaaactctccactatttccgcattcttcctcgcatttatctaaccattcaattagtttattaataactagttggtaatcagcgattcctatagccgttcttgtaattgtgggaacataattaggatcttctaatggattgtatggcttgatagcatcatctttatcattattagggggatggacaaccttaattggttggtcctcatctcctccagtagcgtgtggttcttcaataccagtgttagtaataggcttaggcaaatgcttgtcgtacgcgggcacttcctcatccatcaagtatttataatcgggttctacttcagaatattcttttctaagagacgcgacttcgggagttagtagaagaactctgtttctgtatctatcaacgctggaatcaatactcaagttaaggatagcgaatacctcatcgtcatcatccgtatcttctgaaacaccatcatatgacatttcatgaagtctaacgtattgataaatagaatcagatttagtattaaacagatccttaacctttttagtaaacgcatatgtatattttagatctccagatttcataatatgatcacatgccttaaatgtcagtgcttccatgatataatctggaacactaatgggtgacgaaaaagatacagcaccatatgctacgttgataaataaatctgaaccactaagtagataatgattaatgttaagaaagaggaaatattcagtgtataggtatgtcttggcgtcatatcttgtactaaacacgctaaacagtttgttaatgtgatcaatttccaatagattaattagagcagcgggaataccaacaaacatattaccacatccgtattttctatgaatatcacatatcatgttaaaaaatcttgatagaagagcgaatatctcgtctgacttaatgagtcgtagttcagcagcaacataagtcataactgtaaatagaacatactttcctgtagtgttgattctagactccacatcaacaccattattaaaaatagttttatatacatctttaatctgctctccgttaatcgtcgaacgttctagtatacggaaacactttgatttcttatctgtagttaatgacttagtgatatcacgaagaatattacgaattacatttcttgtttttcttgagagacctgattcagaactcaactcatcgttccatagtttttctacctcagtggcgaaatctttggagtgcttggtacatttttcaataaggttcgtgacctccatttattataaaaaatttattcaaaacttaactacaatcgggtaattataaaatcgtagatctcccatgtggcggaatactaccatctatcgcatgtggatggacagtaggtaatggccatgggaacagtaatgtttgcatatttatctttcttgccagtattactgcatattgtcccaatgtttcgatgtgatgttctaacctatcaactgccgctgtatcacaacaatagtgtccgatgaaattaagattatgatccaatgtgtttaatatatgattatcaagtcttatacgatccgcgtcttttttgacaggatcaggttcttctacaggaagaagtttcggcctcttatgatattcatgtctgggaaacggtggtctagggtgaggctccggtatcggagtgggttttggattataatcatcatcgtctatgacatcatcttcgacttcgatatttattttgctatcttgatgatgtcctgtatcagttgcattttcagcactcgactgaatattagcgcattcattgtctattattaccatatttctaaacccaaaatgtatgtgttgaacatcagtactatcgttgatgagtcttatagcatgaattcgcttatcgttatcgggtttatcttctgtcaccttagcaattccttttttattaaactctacataatcatatccatttctattgtttgttctaatataaacgagtatagcatcattgctaaatttttcaatagtatcaaaaacagaatatcctaaaccatataatatatattcaggaacactcaaactaaatgtccaggattctcctaaatacgtaaactttaatagtgcgaaatcattcaaaaatctaccacttatagatagatagtacataaatgcgtatagtagtctacctatctctttattatgaaaaccggcattacgatcatatatgtcgtgatatacctgtgatccgtttacgttaaaccataaatacatgggtgatcctataaacatgaatttatttctaattctcagagctatagttaattgaccgtgtaatatttgcttacatgcatacttgatacgcttattaataagatttttatcattgctcgttatttcagaatcgtatatataaggagtaccatcgtgattcttaccagatattatacaaaatactatatataaaatatattgaccaacgttagtaatcatataaatgtttaacgttttaaattttgtattcaatgatccattatcatacgctagcatggtcttatgatattcattctttaaaatataatattgtgttagccattgcattggggctcctaatggagattttttattctcatccattttaggataggctttcataaagtccctaataacttcgtgaataatgtttctatgttttctactgatgcatgtatttgcttcgatttttttatcccatgtttcatctatcatagatttaaacgcagtaatgctcgcaacattaacatcttgaaccgttggtacaattccgttccataaatttataatgttcgccatttatataactcattttttgaatatacttttaattaacaaaagagttaagttactcatatggacgccgtccagtctgaacatcaatctttttagccagagatatcatagccgctcttagagtttcagcgtgattttccaacctaaatagaacttcatcgttgcgtttacaacacttttctatttgttcaaactttgttgttacattagtaatctttttttccaaattagttagccgttgtttgagagtttcctcattgtcgtctccatcggctttaacaattgcttcgcgtttagcctctggctttttagcagcctttgtagaaaaaaattcagttgctggaattgcaagatcgtcatctccggggaaaagagttccgtccatttaaagtacagattttagaaactgacactctgcgttatttatatttggtacaacacatggattataaatattgatgttaataacatcagaaaatgtaaagtctatacattgttgcatcgtgttaaattttctaatggatctagtattattgggtccaacttctgcctgaaatccaaatatggaagcggatacaaaaccgtttcctggataaaccacacatctccacttttgctttacatcagaaattgtgtcgttgacatcttgaactctcctatctaatgccggtgttccacctatagattttgaatattcgaatgctgcatgagtagcattaaattccttaatattgccataattttcatatattgagtaaccctggataaaaagtaaacacaccgcagccgtcgctaccacaataaaaaaaattgatagagagttcatttataatctattagaagctgacaaaatttttttacacgcatcagacaatgctttaataaatagttcaacatctacttttgtcatatcgaaccgatggtatgattctaacctagaattacatccgaaaaagttgactatgttcatagtcattaagtcattaacaaacaacattccagactctggattataagacgatactgtttcgtcacaattacctaccttaatcatgtgattatgaatattggctattagagcaccttctaagaaatctataatatctttgaaacacgatttaaaatcaaaccacgaatatacttctacgaagaaagttagtttacccataggagaaataactataaatggagatctaaatacaaaatccggatctatgatagttttaacattattatattctctattaaatacctccacatctaaaaatgttaattttgaaactatgtcttcgtttattaccgtacctgaactaaacgctataagctctattgtttgagaactctttaaacgatattcttgaaatacatgtaacaaagtttcctttaactcggtcggtttatctaccatagttacagaatttgtatccttatctataatataataatcaaaatcgtataaagttatataattatcgcgttcagattgggatcttttcaaatagactaaaaaccccatttctctagtaagtatcttatgtatatgtttgtaaaatatcttcatggtgggaatatgctctaccgcagttagccattcctcattgacagcggtagatgtattagacaaaactattccaatgtttaacaagggccattttacgagattattaaatccttgtttgataaatgtagccaatgagggttcgagttcaacgacgattgaattctcttcccgcggatgctgcatgatgaacgacgggatgttgttcgattgatttggaattctttttcgactttttgtttatattaaatattttaaaatttatagcggatagcaattcatgtaccacggataatgtagacgcgtattgcgcatcgatatctttattattagataaatttatcaataaatgtgagaagtttgcctcgttaaggtcttccatttaaatattatataaacatttgtgtttgtaacttattcgtcttttatggaatagttttttactagtaaagctgcaattacacactttgtccgtaaaacataaatataaacaccagcttttatcaatcgttccaaaaagtcgacggcggacatttttaacatggcatctattttaaatacacttaggtttttggaaaaaacatcattttataattgtaacgattcaataactaaagaaaagattaagattaaacataagggaatgtcatttgtattttataagccaaagcattctaccgttgttaaatacttgtctggaggaggtatatatcatgatgatttggttgtattggggaaggtaacaattaataatctaaagatgatgctattttacatggatttatcatatcatggagtgacaagtagtggagcaatttacaaattgggatcgtctatcgatagactttctctaaataggactattgttacaaaagttaataattatgatgatacattttttgacgacgatgattgatcgctattgcacaattttgtttttgtactttctaatatagtgtttaggttctttttcatatgagaatattgatttactaaaatatctatgtttaacttttgttctatgacgtccttatcggcggtatcggtacatatacgtaattcaccttcacaaaatacggagtcttcgataataatagccaatcgattattggatctagctgtctgtatcatattcaacatgtttaatatatcctttcgtttcccctttacaggcatcgatcgtagcatattttccgcgtctgatatggaaatgttaaaactacaaaaatgcgtaatgttagcccgtcctaatattggtacgtgtctataagtttggcatagtagaataatagacgtgtttaaatgccttccaaagtttaagaattctattagagtattgcattttgatagtttatcgcctacatcatcaaaaataagtaaaaagtgtgctgattttttatgattttgtgcgacagcaatacatttttctatgttacttttagttcgtatcagattatattctagagattcctgactactaacgaaattaatatgatttggccaaatgtatccatcataatctgggttataaacgggtgtaaacaagaatatatgtttatattttttaactagtgtagaaaacagagatagtaaatagatagtttttccagatccagatcctcctgttaaaaccattctaaacggcatttttaataaattttctcttgaaaattgtttttcttggaaacaattcataattatatttacagttactaaattaatttgataataaatcaaaatatggaaaactaaggttgttagtagggaggagaacaaagaaggcacatcgtgatataaataacatttattatcatgatgacaccagaaaacgacgaagagcagacatctgtgttctccgctactgtttacggagacaaaattcagggaaagaataaacgcaaacgcgtgattggtctatgtattagaatatctatggttatttcactactatctatgattaccatgtccgcgtttctcatagtgcgcctaaatcaatgcatgtctgctaacgaggctgctattactgacgccgctgttgccgttgctgctgcatcatctactcatagaaaggttgcgtctagcactacgcaatatgatcacaaagaaagctgtaatggtttatattaccagggttcttgttatatattacattcagactaccagttattctcggatgctaaagcaaattgcactgcggaatcatcaacactacccaataaatccgatgtcttgactacctggctcattgattatgttgaggatacatggggatctgatggtaatccaattacaaaaactacatccgattatcaagattctgatgtatcacaagaagttagaaagtatttttgtgttaaaacaatgaactaatatttatttttgtacattaataaatgaaatcgcttaatagacaaactgtaagtaggtttaagaagttgtcggtgccggccgctataatgatgatactctcaaccattattagtggcataggaacatttctgcattacaaagaagaactgatgcctagtgcttgcgccaatggatggatacaatacgataaacattgttatttagatactaacattaaaatgtctacagataatgcggtttatcagtgtcgtaaattacgagctagattgcctagacctgatactagacatctgagagtattgtttagtattttttataaagattattgggtaagtttaaaaaagaccaatgataaatggttagatattaataatgataaagatatagatattagtaaattaacaaattttaaacaactaaacagtacgacggatgctgaagcgtgttatatatacaagtctggaaaactggttaaaacagtatgtaaaagtactcaatctgtactatgtgttaaaaaattctacaagtgacaacaaaaaatgaattaataataagtcgttaacgtacgccgccatggacgccgcgtttgttattactccaatgggtgtgttgactataacagatacattgtatgatgatctcgatatctcaatcatggactttataggaccatacattataggtaacataaaaactgtccaaatagatgtacgggatataaaatattccgacatgcaaaaatgctactttagctataagggtaaaatagttcctcaggattctaatgatttggctagattcaacatttatagcatttgtgccgcatacagatcaaaaaataccatcatcatagcatgcgactatgatatcatgttagatatagaagataaacatcagccattttatctattcccatctattgatgtttttaacgctacaatcatagaagcgtataacctgtatacagctggagattatcatctaatcatcaatccttcagataatctgaaaatgaaattgtcgtttaattcttcattctgcatatcagacggcaatggatggatcataattgatgggaaatgcaatagtaattttttatcataaaagttgtaaagtaaataataaaacaataaatattgaactagtagtacgtatattgagcaatcagaaatgatgctggtacctcttatcacggtgaccgtagttgcgggaacaatattagtatgttatatattatatatttgtaggaaaaagatacgtactgtctataatgacaataaaattatcatgacaaaattaaaaaagataaagagttctaattccagcaaatctagtaaatcaactgatagcgaatcagactgggaggatcactgtagtgctatggaacaaaacaatgacgtagataatatttctaggaatgagatattggacgatgatagcttcgctggtagtttaatatgggataacgaatccaatgttatggcgcctagcacagaacacatttacgatagtgttgctggaagcacgctgctaataaataatgatcgtaatgaacagactatttatcagaacactacagtagtaattaatgaaacggagactgttgaagtacttaatgaagataccaaacagaatcctaactattcatccaatcctttcgtaaattataataaaaccagtatttgtagcaagtcaaatccgtttattacagaacttaacaataaatttagtgagaataatccgtttagacgagcacatagcgatgattatcttaataagcaagaacaagatcatgaacacgatgatatagaatcatcggtcgtatcattggtgtgattagtttcctttttataaaattgaagtaatatttagtattattgctgccgtcacgttgtacaaatggagatattccctgtattcggcatttctaaaattagcaattttattgctaataatgactgtagatattatatagatacagaacatcaaaaaattatatctgatgagatcaatagacagatggatgaaacggtacttcttaccaacatcttaagcgtagaagttgtaaatgacaatgagatgtaccatcttattcctcatagattatcgacgattatactctgtattagttctgtcggaggatgtgttatctctatagataatgacgtcaatggcaaaaatattctaacctttcccattgatcatgctgtaatcatatccccactgagtaaatgtgtcgtagttagcaagggtcctacaaccatattggttgttaaagcggatatacctagcaaacgattggtaacatcgtttacaaacgacatactatatgtaaacaatctgtcactgattaattatttgccgttgtctgtattcattattagacgagtcaccgactatttggatagacacatatgcgatcagatatttgctaataataagtggtattcccttataaccatcgacgataagcaatatcctattccatcaaactgtataggtatgtcctctgccaagtacataaattctagcatcgagcaagatactttaatccatgtttgtaacctcgagcatccgttcgactcagtatacaaaaaaatgcagtcgtacaattctctacctatcaaggaacaaatattgtacggtagaattgataatataaatatgagcattagtatttctgtggattaatagatttctagtatggggatcattaatcatctctaatctctaaatacctcataaaacgaaaaaaaagctattatcaaatactgtacggaatggattcattctcttctctttttatgaaactctgttgtatatctactgataaaactggaagcaaaaaatctgatagaaagaataagaataagatcaaggattatatggaacacgattattataaaataacaatagttcctggttcctcttccacgtctactagctcgtggtattatacacatgcctagtaatagtctctttgcgttgacggaaagcagactagaaataacaggctaaaatgttcagacaccataatagttcccaacccagataataacagagttccatcaacacattcctttaaactcaatcccaaacccaaaaccgttaaaatgtatccggccaattgatagtagataatgaggtgtacagcgcatgataatttacacagtaaccaaaatgaaaacactttagtaattataagaaatatagacggtaatgtcatcatcaacaatccgataatatgcctgagagtaaacattgatggataaaacaaaaatgctccgcataactctatcatggcaataacacaaccaaacacttgtaaaattcctaaattagtagaaaatacaacgaatatcgatgtataagtgatctcgagaaataataagaataaagtaatgcccgtaaagataaacatcaacattgtttggtaatcattaaaccaattagtatgaagttgaactaatttcacagtagattttattccagtgttatcctcgcatgtataagtacctggtaagatatctttatattccataatcaatgagacatcactatctgataacgaatgaagtctagcactagtatgccatttacttaatattgtcgtcttggaagttttattataagttaaaatatcatggttatccaatttccatctaatatactttgtcggattatctatagtacacggaataatgatggtatcattacatgctgtatactctatggtctttgtagttgttataacaaccaacgtatagaggtatatcaacgatattctaactcttgacattttttatttatttaaaatgatacctttgttatttattttattctattttgctaacggtattgaatggcataagtttgaaacgagtgaagaaataatttctacttacttattagacgacgtattatacacgggtgttaatggggcggtatacacattttcaaataataaactaaacaaaactggtttaactaataataattatataacaacatctataaaagtagaggatgcggataaggatacattagtatgcggaaccaataacggaaatcccaaatgttggaaaatagacggttcagacgacccaaaacatagaggtagaggatacgctccttatcaaaatagcaaagtaacgataatcagtcacaacggatgtgtactatctgacataaacatatcaaaagaaggaattaaacgatggagaagatttgacggaccatgtggttatgatttattcacggcggataacgtaattccaaaagatggtttacgaggagcattcgtcgataaagacggtacttatgacaaagtttacattcttttcactgatactatcggctcaaagagaattgtcaaaattccgtatatagcacaaatgtgcctaaacgacgaaggtggtccatcatcattgtctagtcatagatggtcgacgtttctcaaagtcgaattagaatgtgatatcgacggaagaagttatagacaaattattcattctagaactataaaaacagataatgatacgatactatatgtattcttcgatagtccttattccaagtccgcattatgtacctattctatgaataccattaaacaatctttttctacgtcaaaattggaaggatatacaaagcaattgccgtctccagctcctggtatatgtttaccagctggaaaagttgttccacataccacgtttgaagtcatagaacaatataatgtactagatgatattataaagcctttatctaaccaacctatcttcgaaggaccgtctggtgttaaatggttcgatataaaggagaaggaaaatgaacatcgggaatatagaatatacttcataaaagaaaattctatatattcgttcgatacaaaatctaaacaaactcgtagctcgcaagtcgatgcgcgactattttcagtaatggtaactgcgaaaccgttatttatagcagatatagggataggagtaggaatgccacaaatgaaaaaaatacttaaaatgtaatcttaatcgagtacaccacacgacaatgaacaaacataagacagattatgctggttatgcttgctgcgtaatatgcggtctaattgtcggaattatttttacagcgacactattaaaagttgtagaacgtaaattagttcatacaccattaatagataaaacgataaaagatgcatatattagagaagattgtcctactgactggataagctataataataaatgtatccatttatctactgatcgaaaaacctgggaggaaggacgtaatgcatgcaaagctctaaattcaaattcggatctaattaagatagagactccaaacgagttaagttttttaagaagccttagacgaggctattgggtaggagaatccgaaatattaaaccagacaaccccatataattttatagctaagaatgccacgaagaatggaactaaaaaacggaaatatatttgtagcacaacgaatactcccaaactgcattcgtgttacactatataacaattacactacatttttatcataccactacttcggttagatgttttagaaaaaaataaatatcgccgtaccgttcttgtttttataaaaataacaattaacaattatcaaattttttctttaatattttacgtggttgaccattcttggtggtaaaataatctcttagtgttggaatggaatgctgtttaatgtttccacactcatcgtatattttgacgtatgtagtcacatcgtttacgcaatagtcagactgtagttctatcatgcttcctacatcagaaggaggaacagttttaaagtctcttggttttaatctattaccgttagttttcatgaaatcctttgttttatccacttcacattttaaataaatgtccactatacattcttttgttaattttactagatcgtcatgggtcatagaatttataggttccgtagtccatggatccaaactagcaaacttcgcgtatacggtatcgcgattagtgtatacaccaactgtatgaaaattaagaaaacagtttaataaatcaacagaaatatttaatcctccgtttgatacagatgcgccatatttatggatttcggattcacacgttgtttgtctgaggtgttcgtctagtgttgcttctacgtaaacttcgattcccatatattctttattgtcagaatcgcataccgatttatcatcatacactgtttgaaaactaaatggtatacacatcaaaataataaataataacgagtacattctgcaatattgttatcgtaattggaaaaatagtgttcgagtgagttggattatgtgagtattggattgtatattttattttatattttgtaataagaataaaatgctaatgtcaagtttattccaatagatgtcttattaaaaacatatataataaataacaatggctgaatggcataaaattatcgaggatatctcaaaaaataataagttcgaggatgccgccatcgttgattacaagactacaaagaatgttctagctgctattcctaacagaacatttgccaagattaatccgggtgaaattattcctctcatcactaatcgtaatattctaaaacctcttattggtcagaaatattgtattgtatatactaactctctaatggatgagaacacgtatgctatggagttgcttactgggtacgcccctgtatctccgatcgttatagcgagaactcataccgcacttatatttttgatgggtaagccaacaacatccagacgtgacgtgtatagaacgtgtagagatcacgctacccgtgtacgtgcaactggtaattaaaataaaaagtaatattcatatgtagtgtcaattttaaatgatgatgatgaaatggataatatccatattgacgatgtcaataatgccggtattggcatacagttcatcgatttttagatttcattcagaggatgtggaattatgttatgggcatttgtattttgataggatctataatgtagtaaatataaaatataatccgcatattccatatagatataattttattaatcgcacgttaaccgtagatgaactagacgataatgtcttttttacacatggttattttttaaaacacaaatatggttcacttaatcctagtttgattgtctcattatcaggaaacttaaaatataatgatatacaatgctcagtaaatgtatcgtgtctcattaaaaatttggcaacgagtacatctactatattaacatctaaacataagacttattctctacatcggtccacgtgtattactataataggatacgattctattatatggtataaagatataaatgacaagtataatgacatctatgattttactgcaatatgtatgctaatagcgtctacattgatagtgaccatatacgtgtttaaaaaaataaaaatgaactcttaattatgctatgctattagaaatggataaaatcaaaattacggttgattcaaaaattggtaatgttgttaccatatcgtataacttggaaaagataactattgatgtcacacctaaaaagaaaaaagaaaaggatgtattattagcgcaatcagttgctgtcgaagaggcaaaagatgtcaaggtagaagaaaaaaatattatcgatattgaagatgacgatgatatggatgtagaaagcgcgtaatacgatctataaaaataagtatataaatactttttatttactgtactcttactgtgtagtggtgataccctactcgattatttttttaaaaaaaaaatacttattctgattcttctagccatttccgtgttcgtttgaatgccacatcgacgtcaaagataggggagtagttgaaatctagttctgcattgttggtacgcacctcaaatgtagtgttggatatcttcaacgtatagttgttgagtagtgatggttttctaaatagaattctcttcatatcattcttgcacgcgtacatttttagcatccatcttggaatcctagatccttgttctattcccaatggtttcatcaatagaagattaaacatatcgtacgaacacgatggagagtaatcgtagcaaaagtaagcatttcctttaatctcagatcccggatactggatatattttgcagccaacacgtgcatccatgcaacatttcctacatatacccggctatgcaccgcgtcatcatcgactgtacgatacataatgttaccgtgttgcttacattgctcgtaaaagactttcatcaatttgtctccttctccgtaaattccagtgggtcttaggcaacaagtatacaattttgctccattcatgattacggaattattggctttcataaccagttgctcggccatacgtttactttttgcgtatacatgtcctggtgatatatcataaagggtatgctcatggccgatgaatggatcaccgtgtttattgggtcctattgcttccatgctactagtatagatcaaatacttgattcctaggtccacacaagctgccaaaatagtctgtgttccataatagtttactttcatgatttcattatcggtgtattttccaaatacatccactagagcagccgtatgaataatcagatttaccccatctagcgcttctctcaccttatcaaagtcgtttatatcacattgtatatagtttataaccttaactttcgaggttattggttgtggatcttctacaatatctatgactctgatttcttgaacatcatctgcactaattaacagttttactatatacctgcctagaaatccggcaccaccagtaaccgcgtacacggccattgctgccactcataatatcagactacttattctattttactaaataatggctgtttgtataatagaccacgataatatcagaggagttatttactttgaaccagtccatggaaaagataaagttttaggatcagttattggattaaaatccggaacgtatagtttgataattcatcgttacggagatattagtcaaggatgtgattccataggcagtccagaaatatttatcggtaacatctttgtaaacagatatggtgtagcatatgtttatttagatacagatgtaaatatatttacaattattggaaaggcgttatctatttcaaaaaatgatcagagattagcgtgtggagttattggtatttcttacataaatgaaaagataatacattttcttacaattaacgagaatggcgtttgatatatcagttaatgcgtctaaaacaataaatgcattagtttacttttctactcagcaaaataaattagtcatacgtaatgaagttaatgatacacactacactgtcgaatttgatagggacaaagtagttgacacgtttatttcatataatagacataatgacaccatagaaataagaggggtgcttccagaggaaactaatattggttgcgcggttaatacgccggttagtatgacttacttgtataataagtatagttttaaactgattttagcagaatatataagacacagaaatactatatccggcaatatttattcggcattgatgacactagatgatttggctattaaacagtatggagacattgatctattatttaatgagaaacttaaagtagactccgattcgggactatttgactttgtcaactttgtaaaggatatgatatgttgtgattctagaatagtagtagctctatctagtctagtatctaaacattgggaattgacaaataaaaaatataggtgtatggcattagccgaacatatatctgatagtattccaatatctgagctatctagactacgatacaatctatgtaagtatctacgcgggcacactgagagcatagaggatgaatttgattattttgaagacgatgattcgtctacatgttctgccgtaaccgacagggaaacggatgtataatttttttttatagcgtgaaggatatgataaaaaatataattgttgtatttatcccattccaatcaccttatatgattctgtaacacaataaaggagtcttatagatgtatagaggtcagatactggtttgataaactgtttattccacataagtatgtttgactttatggttagacccgcatactttaacaaatcactgaaaattggagttaggtattgacctctcagaatcagttgccgttctggaacattaaatgtattttttatgatatactccaacgcatttatgtgggcatacaacaagtcattactaatggagtattccaagagttttagttgtctagtatttaacaagagaagagatttcaacagactgtttatgaactcgaatgccgcctcattgtcgcttatattgatgatgtcgaattctcccaatatcatcaccgatgagtagctcatcttgttatcgggatccaagttttctaaagatgtcattaaaccctcgatcatgaatggatttatcatcatcgtttttatgttggacatgagcttagtccgtttgtccacatctatagacgacgatttctgaattatttcatatatccctctctttaactccaggaacttgtcaggatggtctactttaatatgttctcgtctaagagatgaaaatctttggatggttgtacgcgacttttctctaaaggatgacgttgcccaagatcctctcttaaatgaatccatcttatccttggacaagatggacagtctattttccttagatggtttaatatttttgttacccatgatctataaaggtagacctaatcgtctcggatgacctatatatttattttcagttttattatacgcataaattgtaaaaaatatgttaggtttacaaaaatgtctcgtggggcattaatcgtttttgaaggattggacaaatctggaaaaacaacacaatgtatgaacatcatggaatctataccggcaaacacgataaaatatcttaactttcctcagagatccactgtcactggaaagatgatagatgactatctaactcgtaaaaaaacctataatgatcatatagttaatctattattttgtgcaaatagatgggagtttgcatcttttatacaagaacaactagaacagggaattactttaatagttgatagatacgcattttctggagtagcgtatgccgccgctaaaggcgcgtcaatgactctcagtaagagttatgaatctggattgcctaaacccgacttagttatattcttggaatctggtagcaaagaaattaatagaaacgtcggcgaggaaatttatgaagatgttacattccaacaaaaggtattacaagaatataaaaaaatgattgaagaaggagatattcattggcaaattatttcttctgaattcgaggaagatgtaaagaaggagttgattaagaatatagttatagaggctatacacacggttactggaccagtggggcaactgtggatgtaatagtgaaattacattttttataaatagatgttagtacagtgttataaatggatgaagcatattactctggcaacttggaatcagtactcggatacgtgtccgatatgcataccgaactcgcatcaatatctcaattagttattgccaagatagaaactatagataatgatatattaaacaaggacattgtaaattttatcatgtgtagatcaaacttggataatccatttatctctttcctagatactgtatatactattatagatcaagagaactatcagactgagttgattaattcattagacgacaatgaaattatcgattgtatagttaataagtttatgagcttttataaggataacctagaaaatatagtagatgctatcattactctaaaatatataatgaataatccagattttaaaactacgtatgcagaagtactcggttccagaatagccgatatagatattaaacaagtgatacgtaagaatatactacaattgtctaatgatatccgcgaacgatatttgtgaaaatattaaaaaaaaatactttttttattaaatgacgtcgcttcgcgaatttagaaaattatgctgtgatatatatcacgcatcaggatataaagaaaaatctaaattaattagagactttataacagatagggatgataaatatttgatcattaagctattgcttcccggattagacgatagaatttataacatgaacgataaacaaattataaaattatatagtataatatttaaacaatctcaggaagatatgctacaagatttaggatacggatatataggagacactattaggactttcttcaaagagaacacagaaatccgtccacgagataaaagcattttaactttagaagaagtggatagttttttaactacgttatcatccgtaactaaagaatcgcatcaaataaaattattgactgatatcgcatccgtttgtacatgtaatgatttaaaatgtgtagtcatgcttattgataaagatctaaaaattaaagcgggtcctcggtacgtacttaacgctattagtcctaatgcctatgatgtgtttagaaaatctaataacttgaaagagataatagaaaatgcatctaaacaaaatctagactctatatctatttctgttatgactccaattaatcccatgttagcggaatcgtgtgattctgtcaataaggcgtttaaaaaatttccatcaggaatgtttgcggaagtcaaatacgatggtgaaagagtacaagttcataaaaataataacgagtttgccttctttagtagaaacatgaaaccagtactctctcataaagtggattatctcaaagaatacataccgaaagcatttaaaaaagctacgtctatcgtattggattctgaaattgttcttgtagacgaacataatgtaccgctcccgtttggaagtttaggaatacacaaaaagaaagaatataaaaactctaacatgtgtttgttcgtgtttgactgtttgtactttgatggattcgatatgacggacattccattgtacgaacgaagatcttttctcaaagatgttatggttgaaatacccaatagaatagtattctcagagttgacgaatattagtaacgagtctcagttaactgacgtattggatgatgcactaacgagaaaattagaaggattggtcttaaaagatattaatggagtatacgaaccgggaaagagaagatggttaaaaataaagcgagactatttgaacgagggttccatggcagattctgccgatttagtagtactaggtgcttactatggtaaaggagcaaagggtggtatcatggcagtctttctaatgggttgttacgacgatgaatccggtaaatggaagacggttaccaagtgttcaggacacgatgataatacgttaagggagttgcaagaccaattaaagatgattaaaattaacaaggatcccaaaaaaattccagagtggttagtagttaataaaatctatattcccgattttgtagtagaggatccgaaacaatctcagatatgggaaatttcaggagcagagtttacatcttccaagtcccataccgcaaatggaatatccattagatttcctagatttactaggataagagaggataaaacgtggaaagaatctactcatctaaacgatttagtaaacttgactaaatcttaatagttacatacaaactgaaaattaaaataacactatttagttggtggtcgccatggatggtgttattgtatactgtctaaacgcgctagtaaaacatggcgaggaaataaatcatataaaaaatgatttcatgattaaaccatgttgtgaaagagtttgtgaaaaagtcaagaacgttcacattggcggacaatctaaaaacaatacagtgattgcagatttgccatatctggataatgcggtatccgatgtatgcaattcactgtataaaaagaatgtatcaagaatatccagatttgctaatttgataaagatagatgacgatgacaagactcctactggtgtatataattattttaaacctaaagatgccattcctgttattatatccataggaaaggatagagatgtttgtgaactattaatctcatcagacatatcgtgtgcatgcgtggagttaaattcatatcacgtagccattcttcccatggatgtttccttttttaccaaaggaaatgcatcattgattattctcctgtttgatttctctatcgatgcggcacctctcttaagaagtgtaaccgataataatgttattatatctagacaccagcgtatacatgacgagcttccgagttccaattggttcaagttttacataagtataaagtccgactattgttctatattatatatggttgttgatggatctgtgatgcatgcgatagctgataatagaactcacgcaattattagcaaaaatatattagacaatactacgattaacgatgagtgtagatgctgttattttgaaccacagattaggattcttgatagagatgagatgctcaatggatcatcgtgtgatatgaacagacattgtattatgatgaatttacctgatgtaggcgaatttggatctagtatgttggggaaatatgaacctgacatgattaagattgctctttcggtggctggtaatttaataagaaatcgagactacattcccgggagacgaggatatagctactacgtttacggtatagcctctagataatttttttaagcacgaaataaaaaacataattttaaaccaatctatttcatactattttgtgtgatcaccatggacataaagatagatattagtatttctggtgataaatttacggtgactactaggagggaaaatgaagaaagaaaaaaatatctacctctccaaaaagaaaaaactactgatgttatcaaacctgattatcttgagtacgatgacttgttagatagagatgagatgtttactattctagaggaatattttatgtacagaggtctattaggcctcagaataaaatatggacgactctttaacgaaattagaaaattcgacaatgatgcggaagaacaattcggtactatagaagaactcaagcagaaacttagattaaattctgaagagggagcagataactttatagattatataaaggtacaaaaacaggatatcgtcaaacttactgtatacgattgcatatctatgataggattgtgtgcatgcgtggtagatgtttggagaaatgagaaactgttttctagatggaaatattgtttacgagcgattaaactgtttattgatgatcacatgcttgataagataaaatctatactgcagaatagactagtatatgtggaaatgtcatagaaagttaaaagttaatgagagcaaaaatatataaggttgtattccatatttgttatttttttctgtaatagttagaaaaatacattcgatggtctatctatcagattattatgtgttataaggtactttttctcataataaactagagtatgagtaagatagtgtttttcaaaacatataaatctaaaattgatggatgagatatacagctattaatttcgaaaatatattttaatctgataactttaaacatggatttttgatggtggtttaacgttttaaaaaaagattttgttattgtagtatatgataatattaaaagatggatataaagaatttgctgactgcatgtactattttttacattactacattggctacggcagatatacctacttcgtcactgccacacgctccggtaaacggggcatgtgacgagggagaatatcttgataagaggcataatcaatgttgtaatcagtgtccacctggagaatttgccaaggtcagatgtagtggtagtgataacacaaaatgtgaacgctgcccacctcatacatataccgcaatccccaattactctaatggatgtcatcaatgtagaaaatgcccaacaggatcatttgataaggtaaagtgtaccggaacacagaacagtaaatgttcgtgtcttcctggttggtattgcgctactgattcttcacagactgaagattgtcgagattgtataccaaaaaggagatgtccatgcggatactttggtggaatagatgaacaaggaaatcctatttgtaaatcgtgttgtgttggtgaatattgcgactacctacgtaattatagacttgatccatttcctccatgcaaactatctaaatgtaattaattatgattttgatgataatgttaccatacattatatcgctacttggttagtgtattattcagtatgaagacctattaataattacttatcttttgacgatcttgttataattataatataaaaatacttatggcatagtaactcataattgctgacgcgataaattcgtaataatctgttttgttcaaaggaatctacaggcataaaaataaaaatataatttataatatactcttacagcgcgccatcatgaataacagcagtaaattaattgctgttattaatggatttagaaatagtggacgattttgtgatattaatatagttattaatgatgaaaggataaacgctcacagactcatcctatctggagcctccgaatatttttccattctgttttccaataattttatcgattctaatgaatacgaagttaatctaagtcatttagattatcaaagcgtaaacgatttgatcgattacatttatgggatacctttgagcctaactaacgataacgtgaaatatattctttcaaccgctgattttttacaaattggatctgctattacggagtgtgaaaattacatacttaaaaatctttgttctagaaactgtatcgatttctacatatacgctgataaatataataacaagaaaatagaatcagcgtcgtttaacacaatattacaaaatattttgagactcatcaacgatgaaaactttaaatacttaacagaggaatcaatgataaaaattttaagcgatgatatgttaaatataaaaaatgaggatttcgccccactaattctcattaaatggttagagagtactcaacaaccatgcaccgtcgagttacttaaatgcctcagaatatcattgctttccccacaagttataaaatcactttatagtcatcgactggttagttcaatctacgaatgtataacattcttaaacaatatagcattcttggatgaatcatttcctagataccatagcatcgagttgatatctatcggtataagtaattcgcatgataagatttccataaactgctacaatcataaaaaaaatacatgggaaatgatatcttcacgtagatataggtgtagtttcgcagtggccgtcctggataatattatttatatgatgggtggatatgatcagtccccgtatagaagttcaaaggttatagcgtacaatacatgtacaaattcttggatatatgatataccagagctaaaatatcctcgttctaattgtgggggactggctgatgacgaatacatttattgtataggcggcatacgcgatcaggattcatcgttgacatctagtattgatagatggaagccatcaaaaccatattggcagaagtatgctaaaatgcgcgaaccaaaatgtgatatgggggttgcgatgttaaacggattaatatatgttataggtggaatcgttaaaggtgacacgtgtaccgacgcactagagagtttatcagaagatggatggatgaagcatcaacgtcttccaataaaaatgtccaatatgtcgacgattgttcatgatggcaagatttatatatctggaggttacaacaatagtagtgtagttaatgtaatatcgaatttagtccttagctataattcgatatatgatgaatggaccaaattatcatcattaaacattcctagaattaatcccgctctatggtcagcgcataataaattatatgtaggaggaggaatatctgatgatgttcgaactaatacatctgaaacatacgacaaagaaaaagattgttggacattggataatggtcacgtgttaccacgcaattatataatgtataaatgcgaaccgattaaacataaatatccattggaaaaaacacagtacacgaatgattttctaaagtatttggaaagttttataggtagttgatagaacaaaatacataattttgtaaaaataaatcactttttatactaatatgacacgattaccaatacttttgttactaatatcattagtatacgctacaccttttcctcagacatctaaaaaaataggtgatgatgcaactctatcatgtaatcgaaataatacaaatgactacgttgttatgagtgcttggtataaggagcccaattccattattcttttagctgctaaaagcgacgtcttgtattttgataattataccaaggataaaatatcttacgactctccatacgatgatctagttacaactatcacaattaaatcattgactgctagagatgccggtacttatgtatgtgcattctttatgacatcgcctacaaatgacactgataaagtagattatgaagaatactccacagagttgattgtaaatacagatagtgaatcgactatagacataatactatctggatctacacattcaccggaaactagttctgagaaacctgattatatagataattctaattgctcgtcggtattcgaaatcgcgactccggaaccaattactgataatgtagaagatcatacagacaccgtcacatacactagtgatagcattaatacagtaagtgcatcatctggagaatccacaacagacgagactccggaaccaattactgataaagaagatcatacagttacagacactgtctcatacactacagtaagtacatcatctggaattgtcactactaaatcaaccaccgatgatacgtacaatgataatgatacagtaccaccaactactgtaggcggtagtacaacctctattagcaattataaaaccaaggactttgtagaaatatttggtattaccgcattaattatattgtcggccgtggcaatattctgtattacgtattatatatgtaataaacgttcacgtaaatacaaaacagagaacaaagtctagatttttgacttacataaatgtctgggatagtaaaatctatcatattgagcgggccatctggtttaggaaagacagccatagccaaaagactatgggaatatatttggatttgtggtgtcccataccactagatttcctcgtcctatggaacgagaaggtgtcgattaccattacgttaacagagaggccatctggaagggaatagccgccggaaactttctagaacatactgagtttttaggaaatatttacggaacttctaaaactgctgtgaatacagcggctattaataatcgtatttgtgtgatggatctaaacatcgatggcgttagaagtcttaaaaatacgtacctaatgccttactcggtgtatataagacctacctctcttaaaatggttgagaccaagcttcgttgtagaaacactgaagcggatgatgagattcatcgtcgtgtgatgttggcaaaaactgacatggatgaggcaggtgaagccggtctattcgacactattatcattgaagatgatgtgaatttagcatatagtaagttaattcagatactacaggaccgtattagaatgtattttaacactaattagagacttaagacttaaaacttgataattaataatataactcgtttttatatgtggctatttcaacgtctaatgtattagttaaatattaaaacttaccacgtaaaacttaaaatttaaaatgatatttcattgacagatagatcacacattatgaactttcaaggacttgtgttaactgacaattgcaaaaatcaatgggtcgttggaccattaataggaaaaggtggatttggtagtatttatactactaatgacaataattatgtagtaaaaatagagcccaaagctaacggatcattatttaccgaacaggcattttatactagagtacttaaaccatccgttatcgaagaatggaaaaaatctcacaatataaagcacgtaggtcttatcacgtgcaaggcatttggtctatacaaatccattaatgtggaatatcgattcttggtaattaatagattaggtgcagatctagatgcggtgatcagagccaataataatagattaccaaaaaggtcggtgatgttgatcggaatcgaaatcttaaataccatacaatttatgcacgagcaaggatattctcacggagatattaaagcgagtaatatagtcttggatcaaatagataagaataaattatatctagtggattacggattggtttctaaattcatgtctaatggcgaacatgttccatttataagaaatccaaataaaatggataacggtactctagaatttacacctatagattcgcataaaggatacgttgtatctagacgtggagatctagaaacacttggatattgtatgattagatggttgggaggtatcttgccatggactaagatatctgaaacaaagaattgtgcattagtaagtgccacaaaacagaaatatgttaacaatactgcgactttgttaatgaccagtttgcaatatgcacctagagaattgctgcaatatattaccatggtaaactctttgacatattttgaggaacccaattacgacaagtttcggcacatattaatgcagggtgtatattattaagtgtggtgtttggtcgataaaaattaaaaaataacttaatttattattgatctcgtgtgtacaaccgaaatcatggcgatgttttacgcacacgctctcggtgggtacgacgagaatcttcatgcctttcctggaatatcatcgactgttgccaatgatgtcaggaaatattctgttgtgttagtttataataacaagtatgacattgtaaaagacaaatatatgtggtgttacagtcaggtgaacaagagatatattggagcactgctgcctatgtttgagtgcaatgaatatctacaaattggagatccgatccatgatcaagaaggaaatcaaatctctatcatcacatatcgccacaaaaactactatgctctaagcggaatcgggtacgagagtctagacttgtgtttggaaggagtagggattcatcatcacgtacttgaaacaggaaacgctgtatatggaaaagttcaacatgattattctactatcaaagagaaggccaaagaaatgagtacacttagtccaggacctatcatcgattaccacgtctggataggagattgtatctgtcaagttactgctgtggacgtacatggaaaggaaattatgaaaatgagattcaaaaagggtgcggtgcttccgatcccaaatctggtaaaagttaaacttggggagaatgatacagaaaatctttcttctactatatcggcgacaccatcgaggtaaccacctctctggaagacagcgtgaataatgtactcatgaaacgtttggaaactatacgccatatgtggtctgttgtatatgatcattttgatattgtgaatggtaaagaatgctgttatgtgcatacgcatttgtctaatcaaaatcttataccgagtactgtaaaaacaaatttgtacatgaagactatgggatcatgcattcaaatggattccatggaagctctagagtatcttagcgaactgaaggaatcaggtggatggagtcccagaccagaaatgcaggaatttgaatatccagatggagtggaagacactgaatcaattgagagattggtagaggagttcttcaatagatcagaacttcaggctggtgaatcagtcaaatttggtaattctattaatgttaaacatacatctgtttcagctaagcaactaagaacacgtatacggcagcagcttccttctatactctcatcttttaccaacacaaagggtggatatttgttcattggagttgataataatacacacaaagtatttggattcacggtgggttacgactacctcagactgatagagaatgatatagaaaagcatatcaaaagactttgtgttgtgtatttctgtgagaagaaagaggacatcaagtacgcgtgtcgattcatcaaggtatataaacctggggatgaggctacctcgacatacgtgtgcgctatcaaagtggaaagatgctgttgtgctgtgtttgcagattggccagaatcatggtatatggatactaatggtatcaagaagtattctccagatgaatgggtgtcacatataaaattttaattaatgtaatagagaacaaataataaggttgtaatatcatatagacaataactaacaattaattagtaactgttatctcttttttaactaaccaactaactatatacctattaatacatcgtaattatagttcttaacatctattaatcattgattcgcttctttaattttttataaactaacattgttaattgaaaagggataacatgttacagaatataaattatatatggatttttttaaaaaggaaatacttgactggagtatatatttatctcttcattatatagcacgcgtgttttccaatttttccacatcccatataatacaggattataatctcgttcgaacatacgagaaagtggataaaacaatagttgattttttatctaggttgccaaatttattccatattttagaatatggggaaaatattctacatatttattctatggatgatgctaatacgaatattataattttttttctagatagagtattaaatattaataagaacgggtcatttatacacaatctcgggttatcatcatccattaatataaaagaatatgtatatcaattagttaataatgatcatccagataataggataagactaatgcttgaaaatggacgtagaacaagacattttttgtcctatatatcagatacagttaatatctatatatgtattttaataaatcatggattttatatagatgccgaagacagttacggttgtacattattacatagatgtatatatcactataagaaatcagaatcagaatcatacaatgaattaattaagatattgttaaataatggatcagatgtagataaaaaagatacgtacggaaacacaccttttatcctattatgtaaacacgatatcaacaacgtggaattgtttgagatatgtttagagaatgctaatatagactctgtagactttaatagatatacacctcttcattatgtctcatgtcgtaataaatatgattttgtaaagttattaatttctaaaggagcaaatgttaatgcgcgtaataaattcggaactactccattttattgtggaattatacacggtatctcgcttataaaactatatttggaatcagacacagagttagaaatagataatgaacatatagttcgtcatttaataatttttgatgctgttgaatctttagattatctattatccagaggagttattgatattaactatcgtactatatacaacgaaacatctatttacgacgctgtcagttataatgcgtataatacgttggtctatctattaaacaaaaatggtgattttgagacgattactactagtggatgtacatgtatttcggaagcagtcgcaaacaacaacaaaataataatggaagtactattgtctaaacgaccatctttgaaaattatgatacagtctatgatagcaattactaaacataaacagcataatgcagatttattgaaaatgtgtataaaatatactgcgtgtatgaccgattatgatactcttatagatgtacagtcgctacagcaatataaatggtatattttaagatgtttcgatgaaatagatatcatgaagagatgttatataaaaaataaaactgtattccaattagttttttgtatcaaagacattaatactttaatgagatacggtaaacatccttctttcgtgaaatgcactagtctcgacgtatacggaagtcgtgtacgtaatatcatagcatctattagatatcgtcagagattaattagtctattatccaagaagctggatcctggagataaatggtcgtgttttcctaacgaaataaaatataaaatattggaaaactttaacgataacgaactatccacatatctaaaaatcttataaacattattaaaatataaaatctaagtaggataaaatcacactacatcattgtttccttttagtgctcgacagtgtatactatttttaacgctcataaataaaaatgaaaacgatttccgttgttacgttgttatgcgtactacctgctgttgtttattcaacatgtactgtacccactatgaataacgctaaattaacgtctaccgaaacatcgtttaatgataaccagaaagttacgtttacatgtgatcagggatatcattctttggatccaaatgctgtctgtgaaacagataaatggaaatacgaaaatccatgcaaaaaaatgtgcacagtttctgattatgtctctgaactatataataaaccgctatacgaagtgaattccaccatgacactaagttgcaacggcgaaacaaaatattttcgttgcgaagaaaaaaatggaaatacttcttggaatgatactgttacgtgtcctaatgcggaatgtcaacctcttcaattagaacacggatcgtgtcaaccagttaaagaaaaatactcatttggggaatatatgactatcaactgtgatgttggatatgaggttattggtgcttcgtacataagttgtacagctaattcttggaatgttattccatcatgtcaacaaaaatgtgatatgccgtctctatctaacggattaatttccggatctacattttctatcggtggcgttatacatcttagttgtaaaagtggttttacactaacggggtctccatcatccacatgtatcgacggtaaatggaatcccatactcccaatatgtgtacgaactaacgaaaaatttgatccagtggatgatggtcccgacgatgagacagatttgagcaaactctcgaaagacgttgtacaatatgaacaagaaatagaatcgttagaagcaacttatcatataatcatagtggcgttgacaattatgggcgtcatatttttaatctccgttatagtattagtttgttcctgtgacaaaaataatgaccaatataagttccataaattgctaccgtaaatataaatccgttaaaataattaataatttaataacaaacaagtatcaaaagattaaagacttatagctagaatcaattgagatgtcttcttcagtggatgttgatatctacgatgccgttagagcatttttactcaggcactattataacaagagatttattgtgtatggaagaagtaacgccatattacataatatatacaggctatttacaagatgcgccgttataccgttcgatgatatagtacgtactatgccaaatgaatcacgtgttaaacaatgggtgatggatacacttaatggtataatgatgaatgaacgcgatattactgtaagcgttggcaccggaatactattcatggaaatgtttttcgattacaataaaaatagtatcaacaatcaactaatgtatgatataattaatagcgtatctataattctagctaatgagagatatagaagcgcttttaacgacgatggtatatacatccgtagaaatatgattaacaagttgtacggatacgcatctctaactactattggcacgatcgctggaggtgtttgttattatctgttgatgcatctagttagtttgtataaataattatttcaatatactagttaaaattttaagattttaaatgtataaaaaactaataacgtttttatttgtaataggtgcattagcatcctattcgaataatgagtacactccgtttaataaactgagtgtaaaactctatatagatggagtagataatatagaaaattcatatactgatgataataatgaattggtgttaaattttaaagagtacacaatttctattattacagagtcatgcgacgtcggatttgattccatagatatagatgttataaacgactataaaattattgatatgtataccattgactcgtctactattcaacgcagaggtcacacgtgtagaatatctaccaaattatcatgccattatgataagtacccttatattcacaaatatgatggtgatgagcgacaatattctattactgcagagggaaaatgctataaaggaataaaatatgaaataagtatgatcaacgatgatactctattgagaaaacatactcttaaaattggatctacttatatatttgatcgtcatggacatagtaatacatattattcaaaatatgatttttaaaaatttaaaatatattatcacttcagtgacagtagtcaaataacaaacaacaccatgagatatattataattctcgcagttttgttcattaatagtatacatgctaaaataactagttataagtttgaatccgtcaattttgattccaaaattgaatggactggggatggtctatacaatatatcccttaaaaattatggcatcaagacgtggcaaacaatgtatacaaatgtaccagaaggaacatacgacatatccgcatttccaaagaatgatttcgtatctttctgggttaaatttgaacaaggcgattataaagtggaagagtattgtacgggactatgcgtcgaagtaaaaattggaccaccgactgtaacattgactgaatacgacgaccatatcaatttgtacatcgagcatccgtatgctactagaggtagcaaaaagattcctatttacaaacgcggtgacatgtgtgatatctacttgttgtatacggctaacttcacattcggagattctaaagaaccagtaccatatgatatcgatgactacgattgcacgtctacaggttgcagcatagactttgtcacaacagaaaaagtgtgcgtgacagcacagggagccacagaagggtttctcgaaaaaattactccatggagttcgaaagtatgtctgacacctaaaaagagtgtatatacatgcgcaattagatccaaagaagatgttcccaatttcaaggacaaaatggccagagttatcaagagaaaatttaatacacagtctcaatcttatttaactaaatttctcggtagcacatcaaatgatgttaccacttttcttagcatgcttaacttgactaaatattcataactaatttttattaatgatacaaaaacgaaataaaactgcatattatacactggttaacgcccttataggctctaaccattttcaagatgaggtccctgattatagtccttctgttcccctctatcatctactccatgtctattagacgatgtgagaagactgaagaggaaacatggggattgaaaatagggttgtgtataattgccaaagatttctatcccgaaagaactgattgcagtgttcatctcccaactgcaagtgaaggattgataactgaaggcaatggattcagggatatacgaaacaccgataaattataaaaaaagcaatgtgtccgctgtttccgttaataatactattttcgtaactggcggattattcataaataactctaatagcacgatcgtggttaacaatatggaaaaacttgacatttataaagacaaacaatggtcgattatagaaatgcctatggctagggtatatcacggcatcgactcgacatttggaatgttatattttgccggaggtctatccgttaccgaacaatatggtaatttagagaaaaacaacgagatatcttgttacaatcctagaacgaataagtggtttgatatttcatatactatttataagatatccatatcatcattgtgtaaactaaataacgtcttctatgtatttagtaaggacattggatatgtggaaaagtatgatggtgcatggaagttagtacatgatcgtctccccgctataaaggcattatcaacttctccttattgattgaaaatgaaaatataaatagtttttatgtatagcagtattaccctatagttttattgcttactactaacatggatacagatgttacaaatgtagaagatatcataaatgaaatagatagagagaaagaagaaatactaaaaaatgtagaaattgaaaataataaaaacattaacaagaatcatccaagtggatatattagagaagcactcgttattaatactagtagtaatagtgattccattgataaagaagttatagaatgtatctgtcacgatgtaggaatatagatcatatctactaatttttataatcgatacaaaacataaaaaacaactcgttattacatagcaggcatggaatccttcaagtattgttttgataacgatggcaagaaatggattatcggaaatactttatattctggtaattcaatactctataaggtcagaaaaaatttcactagttcgttctacaattacgtaatgaagatagatcacaaatcacacaagccattgttgtctgaaatacgattctatatatctgtattggatcctttgactatcgacaactggacacgggaacgtggtataaagtatttggctattccagatctgtatggaattggagaaaccgatgattatatgttcttcgttataaagaattcgggaagagtattcgccccaaaggatactgaatcagtcttcgaagcatgcgtcactatgataaacacgttagagtttatacactctcaaggatttacccatggaaaaatagaaccgaggaatatactgattagaaataaacgtctttcactaattgactattctagaactaacaaactatacaagagtggaaactcacatatagattacaacgaggacatgataacttcaggaaatatcaattatatgtgtgtagacaatcatcttggagcaacagtttcaagacgaggagatttagaaatgttgggatattgcatgatagaatggttcggtggcaaacttccatggaaaaacgaaagtagtataaaagtaataaaacaaaaaaaagaatataaaaaatttatagctactttctttgaggactgttttcctgaaggaaatgaacctctggaattagttagatatatagaattagtatacacgttagattattctcaaactcctaattatgacagactacgtaaactgtttatacaagattgaaattatattcttttttttatagagtgtggtagtgttacggatatctaatattaatattagactatctctatcgcgctacacgaccaatatcgattactatggatatcttctatgaaaggagagaatgtatttatttctccagcgtcaatctcgtcagtattgacaatactgtattatggagctaatggatccactgctgaacagctatcaaaatatgtagaaacggaggagaacacggataaggttagcgctcagaatatctcattcaaatccatgaataaagtatatgggcgatattctgccgtgtttaaagattcctttttgagaaaaattggcgataagtttcaaactgttgacttcactgattgtcgcactatagatgcaatcaacaagtgtgtagatatctttactgaggggaaaatcaatccactattggatgaaccattgtctcctagcaattagtgccgtatactttaaagcaaaatggttgacgccattcgaaaaggaatttaccagtgattatcccttttacgtatctccgacggaaatggtagacgtaagtatgatgtctatgtacggcaaggcatttaatcacgcatctgtaaaagaatcattcggcaacttttcaatcatagaactgccatatgttggagatactagtatgatggtcattcttccagacaagattgatggattagaatccatagaacaaaatctaacagatacaaattttaagaaatggtgtgactttatggatgctatgtttatagatgttcacattcccaagtttaaggtaacaggctcgtataatctggtggatactctagtaaagtcaggactgacagaggtgttcggttcaactggagattatagcaatatgtgtaatttagatgtgagtgtcgacgctatgatccacaaaacgtatatagatgtcaatgaagagtatacagaagcagctgcagcaacttctgtactagtggcagactgtgcatcaacaattacaaatgagttctgtgcagatcatccgttcatctatgtgattaggcatgttgatggaaaaattcttttcgttggtagatattgctctccgacaactaattgttaaccattttttttaaaaaaaatagaaaaaacatgtggtattagtgcaggtcgttgttcttccaattgcaattggtaagatgacggccaactttagtacccacgtcttttcaccacagcactgtggatgtgacagactgaccagtattgatgacgtcaaacaatgtttgactgaatatatttattggtcgtcctatgcataccgcaacaggcaatgcgctggacaattgtattccacactcctctcttttagagatgatgcggaattagtgttcatcgacattcgcgagctggtaaaaaatatgccgtgggatgatgtcaaagattgtacagaaatcatccgttgttatataccggatgagcaaaaaaccatcagagagatttcggccatcatcggactttgtgcatatgctgctacttactggggaggtgaagaccatcccactagtaacagtctgaacgcattgtttgtgatgcttgagatgctaaattacgtggattataacatcatattccggcgtatgaattgatgagttgtacatcttgacattttctttcttctcttctccctttcttctcttctcccttcctccctcttctccctttcccagaaacaaacttttttacccactataaaataaaatgagtatactacctgttatatttctttctatatttttttattcttcattcgttcagacttttaacgcgtctgaatgtatcgacaaagggcaatattttgcatcattcatggagttagaaaacgagccagtaatcttaccatgtcctcaaataaatacgctatcatccggatataatatattagatattttatgggaaaaacgaggagcggataatgatagaattataccgatagataatggtagcaatatgctaattctgaacccgacacaatcagactctggtatttatatatgcattaccacgaacgaaacctactgtgacatgatgtcgttaaatttgacaatcgtgtctgtctcagaatcaaatatagattttatctcgtatccacaaatagtaaatgagagatctactggcgaaatggtatgtcccaatattaatgcatttattgctagtaacgtaaacgcagatattatatggagcggacatcgacgccttagaaataagagacttaaacaacggacacctggaattattaccatagaagatgttagaaaaaatgatgctggttattatacatgtgttttagaatatatatacggtggcaaaacatataacgtaaccagaattgtaaaattagaggtacgggataaaataataccttctactatgcaattaccagatggcattgtaacttcaataggtagtaatttgactattgcatcgttgagacctcccacaacggatgcagacgtcttttggataagtaatggtatgtattacgaagaagatgatggggacggaaacggtagaataagtgtagcaaataaaatctatatgaccgataagagacgtgttattacatcccggttaaacattaatcctgtcaaggaagaagatgctacaacgtttacgtgtatggcgtttactattcctagcatcagcaaaacagttactgttagtataacgtgaatgtatgttgttacatttccatgtcaattgagtttataagaatttttatacattatcttccaacaaacaattgacgaacgtattgctatgattaactcccacgatactatgcatattattaatcattaacttgcagactatacctagtgctattttgacatactcatgttcttgtgtaattgcggtatctatattattaaagtacgtaaatctagctatagttttattatttaattttagataatataccgtctccttatttttaaaaattgccacatcctttattaaatcatgaatgggaatttctatgtcatcgttagtatattgtgaacaacaagagcagatatctataggaaagggtggaatgcgatacattgatctatgtagttttaaaacacacgcgaactttgaagaatttatataaatcattccatcgatacatccttctatgttgagatgtatatatccaggaattcgtttattaatatcgggaaatgtataaactaaaacattgcccgaaagcggtgcctctatctgcgttatatccgttcttaacttacaaaatgtaaccaatacctttgcatgacttgttttgttcggcaacgttagtttaaacttgacgaatggattaattacaatagcatgatccgcgcatctattaagtttttttactttaacgcccttgtatgtttttacagagactttatctaaatttctagtgcttgtatgtgttataaatataacgggatatagaaccgaatcacctaccttagatacccaattacattttatcagatccagataataaacaaattttgtcgccctaactaattctatattgttatatattttacaattggttatgatatcatgtaataacttggagtctaacgcgcatcgtcgtacgtttatacaattgtgatttagtgtagtatatctacacatgtatttttccgcactatagtattctggactagtgataaaactatcgttatatctatcttcaatgaactcatcgagatattgctctctgtcatattcatacacctgcataaactttctagacatcttacaatccgtgttattttaggatcatatttacatatttacgggtatatcaaagatgttagattagttaatgggaatcgtctataataatgaatattaaacaattatatgaggacttttaccacaaagcatcataaaaatgagtcgtcgtctgatttatgttttaaatatcaaccgcaaatcaactcataaaatacaagagaatgaaatatatacatattttagtcattgcaatatagaccatacttctacagaacttgattttgtagttaaaaactatgatctaaacagacgacaacctgtaactgggtatactgcactacactgctatttgtataataattactttacaaacgatgtactgaagatattattaaatcatggagtggatgtaacgatgaaaaccagtagcggacgtatgcctgtttatatattgcttactagatgttgtaatatttcacatgatgtagtgatagatatgatagacaaagataaaaaccacttattacatagagactattccaacctattactagagtatataaaatctcgttacatgttattaaaggaagaggatatcgatgagaacatagtatccactttattagataagggaatcgatcctaactttaaacaagacggatatacagcgttacattattattatttgtgtctcgcacacgtttataaaccaggtgagtgtagaaaaccgataacgataaaaaaggccaagcgaattatttctttgtttatacaacatggagctaatctaaacgcgttagataattgtggtaatacaccattccatttgtatcttagtattgaaatgtgtaataatattcatatgactaaaatgctgttgacttttaatccgaatttcgaaatatgtaataatcatggattaacgcctatactatgttatataacttccgactacatacaacacgatattcttgttatgttaatacatcactatgaaacaaatgttggagaaatgccgatagatgagcgtcgtatgatcgtattcgagtttatcaaaacatattctacacgtccggcagattcgataacttatttgatgaataggtttaaaaatataaatatttatacccgctatgaaggaaagacattattacacgtagcatgtgaatataataatacacacgtaatagattatcttatacgtatcaacggagatataaatgcgttaaccgacaataacaaacacgctacacaactcattatagataacaaagaaaattccccatataccattaattgtttactgtatatacttagatatattgtagataagaatgtgataagatcgttggtggatcaacttccatctctacctatctttcgtcgcttatcatactagtcatatcctaaatgttgatcatattccaccaaatgattgtgaaagagattgagattaaatcgtctaacaaacaattagtttttatgacattaacatataataaataaattaatcattattgacttaacgatgacgaaagttatcatcatcttaggattcttgattattaatacaaattcattgtctatgaaatgtgaacaaggtgtctcatattataattcacaagaattaaagtgttgtaaactatgtaagccaggaacatattcagatcatcgatgtgataaatacagcgataccatttgtggacattgtccgagtgacacattcacgtcaatatataatcgttctccttggtgtcatagttgtagaggtccatgtggtactaatcgagtagaggtcacaccttgtacacctaccacaaatagaatctgtcattgtgactcgaatagttattgtctccttaaagcttctgatggtaactgtgttacatgtgctcctaaaacaaaatgtggtcgtgggtatggaaagaaaggagaagatgaaatgggtaataccatttgtaagaaatgtcggaagggtacttattcagatattgtatctgactctgatcaatgtaaaccaatgacaagataagacttactcgcatctactggatagacataaaatatcctcctcgtaataatgaaatataaatatacactaattattaatatcaataacaatcgagtattaatatataggtcatttttaaatcccttttgggttccgtcccaaacggcgtttcggtctgcgtcgccgccatggccatgccgagcctctccgcgtgctcctccatcgaggacgacttcaactatggcagctcggtggcgtctgccagcgtgcacatacgaatggcatttctaagaaaagtctacggtatcctttgtctacaatttcttttaacaacggcaacaactgcagtatttttatactttgactgcatgcggacatttatacaagggagtcctgttctaatattggcatcaatgttcggatctataggcttgattttcgcattgactttacacagacataaacatcccctgaatctgtacctgctttgtggatttacactgtcggaatctctaacgctggcctctgttgttactttctatgatgtgcatgtcgttatgcaagctttcatgctgactactgcagcgtttcttgctctgactacatatactctacaatcaaagagagatttcagtaaacttggagcaggattgtttgctgctttgtggattttaattttgtcaggactcttggggatatttgtgcaaaatgagacagtggagctggtcctgtctgcttttggggcccttgtattctgtggattcattatctatgacacgcactcactaatacataagctctcgcctgaagagtatgtgttagcctctatcaatctctacttggatatcatcaatctgttcttgcatctgttgcagcttttggaagtatctaataagaaataaagtttaaaatagaattaataaaaacatataggtcattttttaaacatggattggaaaccaaggtagttagttaatacacacaagatatatttttttcacatcatccacccatgggtaacaccaaggttgttagttaataatatacaagatattttttctcactctgatccatgtaaaccaaggacgagataagacactctcattcctcatccacaacccattaaaaaaatggaaattaaagccctctattagcataaacggctacaggtctaccatcaggttaaccttcgtctaccttcacaatggcctttccttgtgcccagttcagaccctgtcattgccacgctactaaggactccctgaataccgtggccgacgtcagacattgtctgactgaatacatcctgtgggtttctcatagatggacccatagagaaagcgctcatctgttctccgtgtggtctcggaacatattctcacaccgtctcttccgcagataaatgcgaacccgtacccagaaatacctttaactatatcgatgtggaaattaatctgtatcccgtcaacgacacatcgtgtactcggacgaccactaccggtctcagcgaatccatctcaacgtcggaactaactattactatgaatcataaagactgtaatcccgtctttcgtgatggatacttctccgttcttaataaggtagcgacttcaggtttctttacaggagaaaggtgtgcactctgaatttcgagattaaatgcaataacaaagattcttcctccaaacagttaacgaaagcaaagaatgatactatcatgccgcattcggagacagtaactctagtgggcgacatctatatactatatagtaataccaatactcaagactacgaaactgatacaatctcttatcatgtgggtaatgttctcgatgtcgatagccatatgcccggtagttgcgatatacataaactgatcactaattccaaacccacccactttttatagtaagtttttcacccataaataataaatacaataattaatttctcgtaaaagtagaaaatatattctaatttattgcacggtaaggaagtagaatcataaagaacagtactcaatcaatagcaattatgaaacaatatatcgtcctggcatgcatgtgcctggcggcagctgctatgcctgccagtcttcagcaatcatcctcatcctcctcctcgtgtacggaagaagaaaacaaacatcatatgggaatcgatgttattatcaaagtcacaaagcaagaccaaacaccgaccaatgataagatttgccaatccgtaacggaaattacagagtccgagtcagatccagatcccgaggtggaatcagaagatgattccacatcagtcgaggatgtagatcctcctaccacttattactccatcatcggtggaggtctgagaatgaactttggattcaccaaatgtcctcagattaaatccatctcagaatccgctgatggaaacacagtgaatgctagattgtccagcgtgtccccaggacaaggtaaggactcatgaagaagctcttgctatgatcaaagactgtgaggtgtctatcgacatcagatgtagcgaagaagagaaagacagcgacatccagtactcgggtctaacatctctcataagaaagtgagttacgaagatatcatcggttcaacgatcgtcgatacaaaatgtgtcaagaatctagagtttagcgttcgtatcggagacatgtgcaaggaatcatctgaacttgaggtcaaggatggattcaagtatgtcgacggatcggcatctgaaggtgcaaccgatgatacttcactcatcgattcaacaaaactcaaagcgtgtgtctgaatcgataactctattcatctgaaattggatgagtagggttaatcgaacgattcaggcacaccacgaattaaaaaagtgtaccggacactatattccggtttgcaaaacaaaaatgttcttaactacattcacaaaaagttacctctcgcgacttcttctttttctgtctcaatagtgtgatacgattatgacactattcctattcctattcctatttcctttcagagtatcacaaaaatattaaacctctttctgatggtctcataaaaaaagttttacaaaaatatttttattctctttctctctttgatggtctcataaaaaaagttttacaaaaatatttttattctctttctctctttgatggtctcataaaaaaagttttacaaaaatatttttattctctttctctctttgatggtctcataaaaaaagttttacaaaaatatttttattctctttctctctttgatggtctcataaaaaaagttttacaaaaatatttttattctctttctctctttgatggtctcataaaaaaagttttacaaaaatatttttattctctttctctctttgatggtctcataaaaaaagttttacaaaaatatttttattctctttctctctttgatggtctcataaaaaaagttttacaaaaatatttttattctctttctctctttgatggtctcataaaaaaagttttacaaaaatatttttattctctttctctctttgatggtctcataaaaaaagttttacaaaaatatttttattctctttctctctttgatggtctcataaaaaaa

SEQ ID NO: 199 - DNA, 186843 bp, Artificial Sequence
  GLV-2b453
tttttttatgagaccatcaaagagagaaagagaataaaaatatttttgtaaaactttttttatgagaccatcaaagagagaaagagaataaaaatatttttgtaaaactttttttatgagaccatcaaagagagaaagagaataaaaatatttttgtaaaactttttttatgagaccatcaaagagagaaagagaataaaaatatttttgtaaaactttttttatgagaccatcaaagagagaaagagaataaaaatatttttgtaaaactttttttatgagaccatcaaagagagaaagagaataaaaatatttttgtaaaactttttttatgagaccatcaaagagagaaagagaataaaaatatttttgtaaaactttttttatgagaccatcaaagagagaaagagaataaaaatatttttgtaaaactttttttatgagaccatcaaagagagaaagagaataaaaatatttttgtaaaactttttttatgagaccatcaaagagagaaagagaataaaaatatttttgtaaaactttttttatgagaccatcagaaagaggtttaatatttttgtgatactctgaaaggaaataggaataggaataggaatagtgtcataatcgtatcacactattgagacagaaaaagaagaagtcgcgagaggtaactttttgtgaatgtagttaagaacatttttgttttgcaaaccggaatatagtgtccggtacacttttttaattcgtggtgtgcctgaatcgttcgattaaccctactcatccaatttcagatgaatagagttatcgattcagacacacgctttgagttttgttgaatcgatgagtgaagtatcatcggttgcaccttcagatgccgatccgtcgacatacttgaatccatccttgacctcaagttcagatgattccttgcacatgtctccgatacgaacgctaaactctagattcttgacacattttgtatcgacgatcgttgaaccgatgatatcttcgtaactcactttcttatgagagatgttagacccgagtactggatgtcgctgtctttctcttcttcgctacatctgatgtcgatagacacctcacagtctttgatcatagcaagagcttcttcatgagtccttaccttgtcctggggacacgctggacaatctagcattcactgtgtttccatcagcggattctgagatggatttaatctgaggacatttggtgaatccaaagttcattctcagacctccaccgatgatggagtaataagtggtaggaggatctacatcctcgactgatgtggaatcatcttctgattccacctcgggatctggatctgactcggactctgtaatttccgttacggattggcaaatcttatcattggtcggtgtttggtcttgctttgtgactttgataataacatcgattcccatatgatgtttgttttcttcttccgtacacgaggaggaggatgaggatgattgctgaagactggcaggcatagcagctgccgccaggcacatgcatgccaggacgatatattgtttcataattgctattgattgagtactgttctttatgattctacttccttaccgtgcaataaattagaatatattttctacttttacgagaaattaattattgtatttattatttatgggtgaaaaacttactataaaaagtgggtgggtttggaattagtgatcagtttatgtatatcgcaactaccgggcatatggctatcgacatcgagaacattacccacatgataagagattgtatcagtttcgtagtcttgagtattggtattactatatagtatatagatgtcgcccactagagttactgtctccgaatgcggcatgatagtatcattctttgctttcgttaactgtttggaggaagaatctttgttattgcatttaatctcgaaattcagagtgcacacctttctcctgtaaagaaacctgaagtcgctaccttattaagaacggagaagtatccatcacgaaagacgggattacagtctttatgattcatagtaatagttagttccgacgttgagatggattcgctgagaccggtagtggtcgtccgagtacacgacgtgtcgttgacgggatacaggttaatttccacatcgatatagttaaaggtatttctgggtacgggttcgcatttatctgcggaagagacggtgtgagaatatgttccgagaccacacggagaacagatgacgtctccggatactccgtatcctattccacattttgtttgggaaacacatgccttgcatccggatgatcctttgagaagacaataatatccgggagagcattcacagattctattgtgagtcgtgttacacgatcgcgtcttccgttacaacttagacaagcgggtaaatgattattgcgagatgtgaaggtacccgaaccacacggcgtacattgtgtgttagtcttgctatcgcataatctggaagcgtatgttcccggacacaaattatggcgtttgtattcgttgtctttacactttccatcggatggtgcatgcggtgctatatctcttccgtttattattatacatgagagaaacaatatatacgagtataatacggacttcatgatttaataatgtagtaatcgtcgtcttgttcctgtttcctacttctccaatcatatagatattttctttctatcatggataatatttgtaatggttctttccgtacaacatactgtttagatgatattgcgcataatttccggaggcaaatacgatagtctagattgaccgatggtagactctaatttattgagtgctttgtcgacgagtttacttttacgctccatcgatagatggcactgttctatgagatcgtcgtacatgggaaatgaaatgtgtctgtctgaatgtatggctttaagatagctgtgataccgtatacaggtcggtgtcggagattcgaatctctttaaggcgacttatgtcacgatgatggaatctatcttatcgaatgatatatttttcataaatacacttttatagtcctcgtttaaacagaatttactatgtagttccgcgaatgactcgtcccttaataggcagtaggctagtatcttttttacgtagtaatcgtcgtagggagagacatcttgtagaacaacgatttaatcataggtagagatactttcagtctgtggtggatgatgtcattcacaacatccgccttgtatatgatgtttctgttttcaaacaccaagtcgaataccgtctttagtcggaaggttgatgtcgtatccgatgtatgaggcaacattgttgttacaattttgaaaggcggtattatagtattcgtctttctgaatgtcgaacctatctaatagataccgtagtatattgagagtgtatccttgattatgttttatgaatagataaagtagatgttgtccttcttccttttgttcgtgccaattgagtaacattatgagaatatgacctgttgcacaatcgttccatgatgggtgtacaatcaagattattacgtatcctcgtatcggctcctcgagataaaagagcatacaccacacgaggactatgtttggtatactgttgaaggtaagtgtgtaaccgcgttaatgtttgctccataatctattatcgcgtagatgaatcgcttctcggctcgcatcttagtgtgacttaacttgtaataattgctttcgtagaacgtggatatgtgtttacagtagtaatgaagagaagtgagttcatcctcgtcggcgcaattagggtcggatcctttgtacagaacgtaatagtttaagctcccattgaatttatatctaagataacacagcaatagatcggatgatttactaaagtcatcaatggtgtccgttagtatatcaaagatcttgttatcgattgatagtggtcatccttgctatcaaagttacgcatgccgtggtgtaacaatatctttaatacagatggattaaatcgtgtattcatcgtatagcaatgtaatggagagttacctcgtttattcagatcgcagtgtttaataactagcttaaacagatgagacgatgtatccacatcaaagaacgtaaaatacatatgacagacattgttgacagaaacgtgaccttcattcttaccgtcgtccataaatacgttaggtatgtaccacatactgtcgcgaacgatgcgtacaatctcgtccatctcataatgatttactttttcataattaaagatgtgaaagaaaaccgaacaatatatttttttagtaatgtttatgcgagacatataaaataaactccgtgtttatgatgccggtaaatgtttttatcatcttggacggaatcgattttgtaatatgtcatggaaacaaatgaaacaggacattatcgctccatgataaattatttaatggagtaataaagtatctccatgggtaatttcgaaatcaagttatcgtctgtattaatgttgtccactatggagtcgatcctctcattgttctttacagtttctgtaatgatggacgttagttcttttttgtaccatttgatgtcggattctttgcgtatctcaatttgtggcgtttgcttcgtttaaataatatatcaaacatggagacgcctgatatgtagacattcttcattctattaatgtctactctatagcgctttagttccttatgacgaccggcgatatcatactttactttagaaggaaaatcatcatctaggattaaggcgtatctgatacaggcgaataatggttcaggatatagatagcgtatatctctattaaatgcgtcaatcatagtctctagagtgggatggtaactcagtaataaatcaactagcttcgttttgttttctctttggtaactgcttttctggatggccgtattgattatcgagcgtgacactcgctccatattccaataaccgctttgcaaattgtatattattgacatcgaccgcgtaatatagtagagttatcgatcatatctatatcatccatgtacttgcttagtatatcaaatacatctatcagtatggtttcataacagtgatacccgcaattattaaatctcgataatatcagaccgtacatacatagacggccattgttcgatacgtgatttacagccgcgtgtccatattttccacgataaaccttacgacgtttacatcgacgagattattattaacaaagtagtcgtgcagaggatagttgttgtccgttatctaacatgcatcgaacgaccatatcgccgtaatgtaagtagtttatcaacatggcttgtacatcctgttgtctaaatctctttagaatgttatcgatgatgtagtggttatattctctggaatcgtacgaagtaatactacgcattacgtcgacaagagtatgacgtctctcaataagaagattaacgatttccatgtctacattatatggggttactctaaatcgcttgtttagataatatagggctgacgtcgtatactctacacgtgtccacatcctttattaataataatttaacaatctctatatctatggttgagaaagaccagtagtattggatgggtaaagatcctccttcgtctctgccatggatggaaacattgttatcgatcaaacatttaattacatccttggatagagattgagattctctatgagacgatatatagtaatgaagagagttcttacacatatcactgtcgtacatacaggtacgaaatacgtaaccggtgctgtaacattctgatttaagaagccatagcaatacttctggtctcggattaggcgtcgttacgtatatatccaccaatccgagaccattgattgcataattcgtattcttggacggacgtatccgtttatccacaattaggtattttagcagacgtaagtcgatattatccgaatacagatcgaaatcatttatattcgacttgagttcgttagaggaatttgaatagctggatatcagtagatgcacaatctgagattttacgtatctatgcttactgtatactcctagcggagttaatccttcgttgtttctacaaagtctctcgactccgcgagagaacaatcttaatgtctgtatcgcatttattggagacgtaacaatgtagcgcattgtttcctcgtctatctatatgttttgataagttgtgacacgtttcaatttctagttttatttttttgtacgtcacatcttcatccagtagacgacatagaatagtgcactctctaccacaataatccatagctattctggtgctaattattcctatttcacgaaggcaatcattcctcataagatgataaaaagtgtagtggagatttagtatttagcagtgcggatatgatccaagagggtgagatagtcgttctcgttcagaatctttcgcagcataagtagtatgtcgatatacttatcgttgaagactctttataaaagtctatttgtttatatttattgcggatagcagtatttccctataaaaagtatacgtcctgtggtgtctttaatcatgtacatgaatggatggtttatgtagaccttcgtacgatataccatcgaaaagttaatcgtaaatactcctgtaacggccgatgcttctgtatactcctcattaacatctataaacgtcgtatgtagaaatttttctacagtgatagtttcattacacatcttgctaaaatctgcataatatccgaatatattagtaagtcctaaattttctaaaatcggtaccagattatacggttctgtcatttccactttaaactttggcatatacaagtctatacttttagtagataacataccacaccattttttaaatttttcatctgttatatttttttctatgttatatataccttctatgtcgtccggtagtataattaccatactagagtttccctcgtatggaatatcgataatagagaatcctccgaataattcattaatatgtacatattgcaagttattctcggtacccaccatcatatcaacgctggtaactatattcttagaaatataaaacttgtctgtatatgtaagatgtttagaaaatggatatttccacattgctttaaaatggacggcgctaacaactgtcatacgagtattaatggatagcggactagtcaataaggaattaattttaccatttgtcattgtcttaacccattcgttgattagttcctttgtttggttagcattattaaagtttacagtttgaaaatcgtcttttattttttgtaggaaggaggcgtggaactcgatactatcgctaccgtatattttatttgcggtagctagtgtcgcacaatacggaatatctacctccatgtcatcattattgtcatcgggtgtattctcattcatattctctatatattttgatagttgttcagctgtagaaccagctgctccatgatttagaatagataaagtagataaaatagaaactggagaaatcaaaacattttcatccgtgtgttttaagattagttctttaaagatatccatggtatagaccaaacaataacgataacgatatatatcataaataaataatgttaaatttcagtttatgtttgtaccccgtattcatacttaacaaattggtattgcgtacacaatcaatcatattacataccattaataatgcaagcataaaaaattgttagtagatgtttctaaatataggttccgtaagcaaagaatataagaatgaagcggtaatgataaaatcaatcgttatctaaaatgatcatactcatttattttattctattatattaacacatacatttttaacagcaacacattcaatattgtattgttatttttatattatttacacaattaacaatatattattagtttatattactgaattaataatataaaattcccaatcttgtcataaacacacactgagaaacagcataaacacagaatccatcaaaaatgttgataaattatctgatgttgttgttcgctgctatgataatcagatcattcgccgatagtggtaacgctatcgaaacgacattgccagaaattacaaacgctacaacagatattccagctatcagattatgcggtccagagggagatggatattgtttacacggtgactgtatccacgctagagatattgacggtatgtattgtagatgctctcatggttatacaggcattagatgtcagcatgtagtattagtagactatcaacgttcagaaaacccaaacactacaacgtcatatatcccatctcccggtattatgcttgtattagtaggcattattatgtgttgtctattatctgtttataggttcactcgacgaactaaactacctatacaagatatggttgtgccataatttttataaatttttttatgagtatttttacaaaaatgtataaagtgtatgtcttatgtatatttataaaaatgctaagtatgcgatgtatctatgttatttgtatttatctaaacaatacctctacctctagatattatacaaaaattttttatttcggcatattaaagtaaaatctagttaccttgaaaatgaatacagtgggtggttccgtatcaccagtaagaacataatagtcaaatacagtatccgattgagattttgcatacaatactagtctagaaagaaatttgtaatcatcttctgtgacgggagtccatatatctgtatcatcgtctagtttatcagtgtcccatgctatattcctgttatcatcattagttaatgaaaataactctcgtgcttcagaaaagtcaaatattgtatccatacatacatctccaaaactatcgcttatacgtttatctttaacgatacctatacctagatggttatttactaacagacattttccagatctattgactataactcctatagtttccacatcaaccaagtaatgatcatctattgttatataacaataacataactcttttccatttttatcagtatgtatatctatatcaacgtcgtcgttgtagtgaatagtagtcattgatctattatatgaaacggatatgtctagaacggcaattgttttacgtccagttaacactttcgttgatttaaagtctagagtctttgcaaacataatatccttatccgactttatatttcctgtagggtggtataattttattttgcctccacatatcggtgtttccaaatatattactagacaatattccatatagttattagttaagggtacccaattagaacacgtacgcttattatcatcatttggatcgtatttcataaaagttattgtgttatcgatgtcaacacattctacattttttaatcgtctatatagtatttttctgatattttctataatatcagaattgtcttccatcggaagttgtatactatcggaatcagttacatgtttaaataattctctgatgtcattccttatacaatcaaattcattattaaacagtttaatagtctgtagacctttatcgtcgtaaatatccattgtcttattagttacgcttatttttatgtgtttttacgttgctttattatattttataagaatgattgtttgacgaatcacgagaactattaagacacattattaggtatatattataaaaaagtttttgattacgatgttataagaggaaagaggacacattaacatcatacatcaattaactacattcttataacatcgtaatcaaaagaattgcaattttgatgtataacaactgtcaatgggttatggaattgtatattacatattatacggtatgttggtaacgacaaataccggtcggtaattgtctgccggtgtaatagaattatatatatctatctattacaccggccttgtatacataataataagttgtggtagtatgatctccatatttataatttaggactttgtattcagtatttttggaatcataaaaaataaaaaaaagttttactaatttaaaatttaaaaagtatttacatttttttcactgtttagtcgcggatatggaattcgatcctgccaaaatcaatacatcatctatagatcatgtaacaatattacaatacatagatgaaccaaatgatataagactaacagtatgcattatccgaaatattatatcaatatcacaaaaataaatacacatttggctaatcaatttcgggcttggaaaaaacgtatcgccggaagggactatatgactaacttatctagagatacaggaatacaacaatcaaaacttactgaaactatacgtaactgtcaaaaaaatagaaacatatatggtctatatatacactacaatttagttattaattggataaccgatgtgattatcaatcaatattaagagggttggtaaattggtacatagctaataatacctatactccaaatacacccaataatacaacaaccatttctgagttggatatcatcaaaatactggataaatacgaggacgtgtatagagtaagtaaagaaaaagaatgtggaatttgctatgaagttgtttactcaaaacgatagatactttggtttattggattcgtgtactcatatattttgcataacatgcatcaatatatggcatagaacacgaagagaaaccggtgcgtcggataattgtcctatatgccgtacccgttttagaaacataacaatgagcaagttctataagctagttaactaataaataaaaagtttaatttgttgacgacgtatgtcgttattttttctcgtataaaagattaatttgattctaatataatctttagtattggataaatatcaattcaaattaattccattagattatatcataaataaaaatagtagcacgcactacttcagccaaatattcttttttgaaacgccatctatcgtagtgaggacacaagtgaacctataattatcaaatttattagtatcggttacatgaaggactttacgtagagtgacgattccactatctgtggtacgaacggtttcatcttctttgatgccatcacccagatgttctataaacttggtatcctcgtccgatctcatatcctttgccaaccaatacatgtagctaaaattaggcataaatttcacacatcctgaacaatgaaattctccagaagatgttacaatgtctagatttggacatttggtttcaaccgcgttaacatatgagtgaacacacccatacatgaaagcgatgagaaataggattctcatcttgccaaaatatcactagaaaaaatttatttatcagttttaaaggtataaaaaatacttattgttgctcgaatattttgtatttgatggtatacggaagattagaaatgtaggtattatcatcaactgattctatggttttatgtattctatcatgtttcactattgcgttggaaataatatcatatgcttccacatatattttattttgttttaactcataatactcacgtaattctggattattggcatatctatgaataattttagctccatgatcagtaaatattaatgagaacatagtattaccacctaccattatttttttcatctcattcaattcttaattgcaaagatctatataatcattatagcgttgacttatggactctggaatcttagacgatgtacagtcatctataatcatggcatatttaatacattgttttatagcatagtcgttatctacgatgttagatatttctctcaatgaatcaatcacacaatctaatgtaggtttatgacataatagcattttcagcagttcaatgtttttagattcgttgatggcaatggctatacatgtatatccgttatttgatctaatgttgacatctgaaccggattctagcagtaaagatactagagattgtttattatatctaacagccttgtgaagaagtgtttctcctcgtttgtcaatcatgttaatgtctttaagataaggtaggcaaatgtttatagtactaagaattgggcaagcataagacatgtcacaaagacccttttttgtatgtataagtgtaaaaattataacatccatagttggatttacataggtgtccaatcgggatctctccatcatcgagataattgatggcatctcccttccttttttagtagatatttcatcgtgtaagaatcaatattaatatttctaaagtatccgtgtatagcctctttatttaccacagctccatattccactagagggatatcgccgaatgtcatatactcaattagtatatgttggaggacatccgagttcattgttttcaatatcaaagagatggtttccttatcatttctccatagtggtacaatactacacattattccgtgcggctttccattttccaaaaacaatttgaccaaatctaaatctacatctttattgtatctataatcactatttagataatcagccataattcctcgagtgcaacatgttagatcgtctatatatgaataagcagtgttatctattcctttcattaacaatttaacgatgtctatatctatatgagatgacttaatataatattgaagagctgtacaatagtttttatctataaaagacggcttgattccgtgattaattagacatttaacaacttccggacgcacatatgctctcgtatccgactttgaatacagatgagagatgatatacagatgcaatacggtaccgcaatttcgtagttgataatcatcatacgcgtatcagtactcgtcctcataaagaacactgcagccattttctatgaacaaatcaataattttagaaacaggatcattgtcattacataattttctataactgaacgatggttttcacatttaacactcaagtcaaatccatgttctaccaacacctttatcaagtcaacgtctacatttttggatttcatatagctgaatatattaaagttatttatgttgctaaatccagtggcttctagtagagccatcgctatatccttattaactttaacatgtctactatttgtgtattcttctaatggggtaagctgtctccaatttttgcgtaatggattagtgccactgtctagtagtagtttgacgacctcgacattattacaatgctcattaaaaaggtatgcgtgtaaagcattattcttgaattggttcctggtatcattaggatctctgtctttcaacatctgtttaagttcatcaagagccacctcctcattttccaaatagtcaaacattttgactgaatgagctactgtgaactctatacacccacacaactaatgtcattaaatatcatgtcaaaaacttgtacaattattaataaaaataatttagtgtttaaattttaccagttccagattttacacctccgttaatacctccattaaccccactggacgatcctcctccccacattccaccgccaccagatgtataagttttagatcctttattactaccatcatgtccatggataaagacactccacatgccgccactaccccctttagaagacatattaataagacttaaggacaagtttaacaataaaattaatcacgagtaccctactaccaacctacactattatatgattatagtttctatttttacagtaccttgactaaagtttctagtcacaagagcaatactaccaacctacactattatatgattatagtttctatttttataggaacgcgtacgagaaaatcaaatgtctaatttctaacggtagtgttgataaacgattgttatccgcggatacctcctctatcatgtcgtctattttcttactttgttctattaacttattagcattatatattatttgattataaaacttatattgcttattagcccaatctgtaaatatcggattattaacatatcgtttctttgtaggtttatttaacatgtacatcactgtaagcatgtccttaccatttattttaatttgacgcatatccgcaatttctttttcgcagtcggttataaattctatatatgatggatacatgctacatgtgtacttataatcgactaatatgaagtacttgatacatattttcagtaacgatttattattaccacctatgaataagtacctgtgatcgtctaggtaatcaactgttttcttaatacattcgatggttggtaatttactcagaataatttccaatatcttaatatataattctgctatttctgggatatatttatctgccagtataacacaaatagtaatacatgtaaacccatattttgttattatattaatgtctgcgccattatctattaaccattctactaggctgacactatgcgactcaatacaatgataaagtatactacatccatgtttatctattttgtttatatcatcaatatacggcttacaaagttttagtatcgataacacatccaactcacgcatagagaaggtagggaataatggcataatatttattaggttatcatcattgtcattatctacaactaagtttccattttttaaaatatactcgacaactttaggatctctattgccaaatttttgaaaatatttatttatatgcttaaatctatataatgtagctccttcatcaatcatacatttaataacattgatgtatactgtatgataagatacatattctaacaatagatcttgtatagaatctgtatatcttttaagaattgtggatattaggatattattacataaactattacacaattctaaaatataaaacgtatcacggtcgaataatagttgatcaactatataattatcgattttgtgatttttcttcctaaactgtttacgtaaatagttagatagaatattcattagttcatgaccactatagttactatcgaataacgcgtcaaatatttcccgtttaatatcgcatttgtcaagataataatagagtgtggtatgttcacgataagtataataacgcatctctttttcgtgtgaaattaaatagtttattacgtccaaagatgtagcataaccatcttgtgacctagtaataatataataatagagaactgttttacccattctatcatcataatcagtggtgtagtcgtaatcgtaatcgtctaattcatcatcccaattataatattcaccagcacgtctaatctgttctattttgatcttgtatccatactgtatgttgctacatgtaggtattcctttatccaataatagtttaaacacatctacattgggatttgatgttgtagcgtatttttctacaatattaataccatttttgatactatttatttctatacctttcgaaattagtaatttcaataagtctatattgatgttatcagaacatagatattcgaatatatcaaaatcattgatatttttatagtcgactgacgacaataacaaaatcacaacatcgtttttgatattattatttttcttggtaacgtatgcctttaatggagtttcaccatcatactcatataatggatttgcaccactttctatcaatgattgtgcactgctggcatcgatgttaaatgttttacaactatcatagagtatcttatcgttaaccatgattggttgttgatgctatcgcattttttggtttctttcatttcagttatgtatggatttagcacgtttgggaagcatgagctcatatgatttcagtactgtagtgtcagtactattagtttcaataagatcaatctctagatctatagaatcaaaacacgataggtcagaagataatgaatatctgtacgcttcttgttgtactgtaacttctggttttgttagatggttgcatcgtgctttaacgtcaatggtacaaattttatcctcgctttgtgtatcatattcgtccctactataaaattctatattcagattatcatgcgatgtgtatacgctaacggtatcaataaacggagcacaccatttagtcataaccgtaatccaaaaatttttaaagtatatcttaacgaaagaagttgtatcattgtctacggtgtatggtactagatcctcataagtgtatatatctagagtaatgtttaatttattaaatggttgataatatggatcgtcgtggcaatttcctaagatggaaatgagatatagacacgcaataaatctaatcgaagacatggttactccttaaaaaaatacgaataatcaccttggctatttagtaagtgtcatttaacactatactcatattaatccatggactcataatctctatacgggattaacggatgttctatatacggggatgagtagttctcttctttaactttatactttttactaatcatatttagactgatgtatgggtaatagtgtttgaagagctcgttctcatcatcagaataaatcaatatctctgtttttttgttatacagatgtattacagcctcatatattacgtaatagaacgtgtcatctaccttattaactttcaccgcatagttgtttgcaaatacggttaatcctttgacctcgttgatttccgaccaatctgggcgtataatgaatctaaactttaatttcttgtaatcattcgaaataatttttagtttgcatccgtagttatcccctttatgtaactgtaaatttctcaacgcgatatctccattaataatgatgtcgaattcgtgctgtatacccatactgaatggatgaacgaataccgacggcgttaatagtaatttactttttcatctttacatattgggtactagttttactatcataagtttataaattccacaagctactatggaataagccaaccatcttagtataccacacatgtcttaaagtttattaattaattacatgttgttttatatatatcgctacgaatttaaacagagaaatcagtttaggaaaaaaaaaattatctatctacatcatcacgtctctgtattctacgatagagtgctactttaagatgagacatatccgtgtcatcaaaaatatactccattaaaatgattattccggcagcgaacttgatattggatatatcacaacctttgttaatatctacgacaatagacagcagtcccatggttccataaacagtgagtttatctttctttgaagagatattttgtagagatcttataaaactgtcgaatgacatcgcatttatatctttagctaaatcgtatatgttaccatcgtaatatctaaccgcgtctatcttaaacgtttccatcgctttaaagacgtttccgatagatggtctcatttcatcagtcatactgagccaacaaatataatcgtgtataacatctttgatagaatcagactctaaagaaaacgaatcggctttattatacgcattcatgataaacttaatgaaaaatgtttttcgttgtttaagttggatgaatagtatgtcttaataattgttattatttcattaattaatatttagtaacgagtacactctataaaaacgagaatgacataactaatcataactagttatcaaagtgtctaggacgcgtaattttcatatggtatagatcctgtaagcattgtctgtattctggagctattttctctatcgcattagtgagttcagaatatgttataaatttaaatcgaataacgaacataactttagtaaagtcgtctatattaactcttttattttctagccatcgtaataccatgtttaagatagtatattctctagttactacgatctcatcgttgtctagaatatcacatactgaatctacatccaattttagaaattggtctgtgttacatatctcttctatattattgttgatgtattgtcgtagaaaactattacgtagaccattttctttataaaacgaatatatagtactccaattatctttaccgatatatttgcacacataatccattctctcaatcactacatctttaagattttcgttgttaagatatttggctaaactatataattctattagatcatcaacagaatcagtatatatttttctagatccaaagacgaactctttggcgtcctctataatattcccagaaaagatattttcgtgttttagtttatcgagatctgatctgttcatatacgccatgattgtacggtacgttatgataaccgcataaaataaaaatccattttcatttttaaccaatactattcataattgagattgatgtaatactttgttactttgaacgtaaagacagtacacggatccgtatctccaacaagcacgtagtaatcaaatttggtgttgttaaacttcgcaatattcatcaatttagatagaaacttatactcatcatctgttttaggaatccatgtattattaccactttccaacttatcattatcccaggctatgtttcgtccatcatcgttgcgcagagtgaataattcttttgtattcggtagttcaaatatatgatccatgcatagatcggcaaagctattgtagatgtgatttttcctaaatctaatataaaactcgtttactagcaaacactttcctgatttatcgaccaagacacatatggtttctaaatctatcaagtggtggggatccatagttatgacgcagtaacatatattattacattcttgactgtcgctaatatctaaatatttattgttatcgtattggattctgcatatagatggcttgtatgtcaaagatatagaacacataaccaatttatagtcgcgctttacattctcgaatctaaagttaagagatttagaaaacattatatcctcggatgatgttatcactgtttctggagtaggatatattaaagtctttacagatttcgtccgattcaaataaatcactaaataatatcccacattatcatctgttagagtagtatcattaaatctattatattttatgaaagatatatcactgctcacctctatatttcgtacatttttaaactgtttgtataatatctctctgatacaatcagatatatctattgtgtcggtagacgataccgttacatttgaattaatggtgttccattttacaacttttaacaagttgaccaattcatttctaatagtatcaaactctccatgattaaatattttaatagtatccattttatatcactacggacacaaagtagctgacataaaccattgtataatttttatgttttatgtttattagcgtacacattttggaagttccggcttccatgtatttcctggagagcaagtagatgatgaggaaccagatagtttatatccgtacttgcacttaaagtctacattgtcgttgtatgagtatgatcttttaaacccgctagacaagtatccgtttgatattgtaggatgtggacatttaacaatctgacacgtgggtggatcggaccattctcctcctgaacacaggacactagagttaccaatcaacgaatatccactattgcaactataagttacaacgctcccatcggtataaaaatcctcgtatccgttatgtcttccgttggatatagatggaggggattggcatttaacagattcacaaataggtgcctcgggattccataccatagatccagtagatcctaattcacaatacgatttagattcaccgatcaactgatatccgctattacaagagtacgttatactagagccaaagtctactccaccaatatcaagttggccattatcgatatctcgaggcgatgggcatctccgtttaatacattgattaaagagtgtccatccagtacctgtacatttagcatatataggtcccattttttgctttctgtatccaggtagacatagatattctatagtgtctcctatgttgtaattagcattagcatcagtctccacactattcttaaatttcatattaatgggtcgtgacggaatagtacagcatgatagaacgcatcctattcccaacaatgtcaggaacgtcacgctctccaccttcatatttatttatccgtaaaaatgttatcctggacatcgtacaaataataaaaagcccatatatgttcgctattgtagaaattgtttttcacagttgctcaaaaacgatggcagtgacttatgagttacgttacactttggagtctcatctttagtaaacatatcataatattcgatattacgagttgacatatcgaacaaattccaagtatttgattttggataatattcgtattttgcatctgctataattaagatataatcaccgcaagaacacacgaacatctttcctacatggttaaagtacatgtacaattctatccatttgtcttccttaactatatatttgtatagataattacgagtctcgtgagtaattccagtaattacatagatgtcgccgtcgtactctacagcataaactatactatgatgtctaggcatgggagacttttttatccaacgatttttagtgaaacattccacatcgtttaatactacatatttctcatacgtggtataaactccacccattacatatatatcatcgtttacgaataccgacgcgcctgaatatctaggagtaattaagtttggaagtcttatccatttcgaagtgccgtgtttcaaatattctgccacacccgttgaaatagaaaattctaatcctcctattacatataactttccatcgttaacacaagtactaacttctgattttaacgacgacatattagtaaccgttttccattttttcgttttaagatctacccgcgatacggaataaacatgtctattgttaatcatgccgccaataatgtatagacaattatgtaaaacatttgcattatagaattgtctatctgtattaccgactatcgtccaatattctgttctaggagagtaatgggttattgtggatatataatcagagtttttaatgactactatattatgttttataccatttcgtgtcactggctttgtagatttggatatagttaatcccaacaatgatatagcattgcgcatagtattagtcataaacttgggatgtaaaatgttgatgatatctacatcgtttggatttttatgtatccactttaataatatcatagctgtaacatcctcatgatttacgttaacgtcttcgtgggataagatagttgtcagttcatcctttgataattttccaaattctggatcggatgtcaccgcagtaatattgttgattatttctgacatcgacgcattatatagttttttaattccatatcttttagaaaagttaaacatccttatacaatttgtgaaattaatattatgaatcatagtttttacacatagatctactacaggcggaacatcaattattatggcagcaactagtatcatttctacattgtttatggtgatgtttatcttcttccagcgcatatagtctaatagcgattcaaacgcgtgatagtttataccattcaatataatcgcttcatcctttagatggtgatcctgaatgcgtttaaaaaaattatacggagacgccgtaataatttccttattcacttgtataatttccccattgatagaaaatattacgctttccattcttaaagtactataagtaattatagtataatgtaaacgtttatatattcaatatttttataaaaatcattttgacattaattcctttttaaatttccgtctatcatctatagaaacgtattctatgaatttataaaatgcttttacgtgtcctatcgtaggcgatagaaccgctaaaaagcctatcgaatttctacaaaagaatctgttatatggtatagggagagtataaaacattaaatgtccgtacttattaaagtattcagtagccaatcctaactctttcgaatacttattaatggctcttgttctgtacgaatctatttttttgaacaacggacctagtggtatatcttgttctatgtatctaaaataatgtctgactagatccgttagtttaatatccgcagtcatcttgtctagaatggcaaatctaactgcgggtttaggctttagtttagtttctatatctacatctatgtctttatctaacaccaaaaatataatagctaatattttattacaatcatccggatattcttctacgatctcactaactaatgtttctttggttatactagtatagtcactatcggacaaataaagaaaatcagatgatcgatgaataatacatttaaattcatcatctgtaagatttttgagatgtctcattagaatattattagggttagtactcattatcattcggcagctattacttattttattatttttcaccatatagatcaatcattagatcatcaaaatatgtttcaatcatcctaaagagtatggtgaatgactcttcccatctaatttctgaacgttcaccaatgtctctagccactttggcactaatagcgatcattcgcttagcgtcttctatattattaactggttgatttaatctatctagcaatggaccgtcggacagcgtcattctcatgttcttaatcaatgtacatacatcgccgtcatctaccaattcatccaacaacataagctttttaaaatcatcattataataggtttgatcgttgtcatttctccaaagaatatatctaataagtagagtcctcatgcttagttaacaactattttttatgttaaatcaattagtacaccgctatgtttaatacttattcatattttagtttttaggattgagaatcaatacaaaaaattaatgcatcattaattttagaaatacttagtttccacgtagtcaatgaaacatttgaactcatcgtacaggacgttctcgtacaggacgtaactataaaccggtttatatttgttcaagatagatacaaatccgataactttttttacgaattctacgggatccactttaaaagtgtcataccgggttctttttatttttttaaacagatcaatggtgtgatgttgattaggtcttttacgaatttgatatagaatagcgtttacatatcctccataatggtcaatcgccatttgttcgtatgtcataaattctttaattatatgacactgtgtattatttagttcatccttgttcattgttaggaatctatccaaaatggcaattatactagaactataggtgcgttgtatacacatattgatgtgtctgtttatacaatcaatgctactaccttcgggtaaaattgtagcatcatataccatttctagtactttaggttcattattatccattgcagaggacgtcatgatcgaatcataaaaaaatatattatttttatgttattttgttaaaaataatcatcgaatacttcgtaagatactccttcatgaacataatcagttacaaaacgtttatatgaagtaaagtatctacgatttttacaaaagtccggatgcataagtacaaagtacgcgataaacggaataataatagatttatctagtctatctttttctatagctttcatagttagatacatggtctcagaagtaggattatgtaacatcagcttcgataaaatgactgggttatttagtcttacacattcgctcatacatgtatgaccgttaactacagagtctacactaaaatgattgaacaatagatagtctaccattgtttcgtattcagatagtacagcgtagtacatggcatcttcacaaattatatcattgtctaatagatatttgacgcatcttatggatcccacttcaacagccatcttaaaatcggtagaatcatattgctttcctttatcattaataatttctagaacatcatctctatcataaaagatacaaatattaactgtttgatccgtaataacattgctagtcgatagcaatttgttaataagatgcgctgggctcaatgtcttaataagaagtgtaagaggactatctccgaatttgttttgtttattaacatccgttgatggaagtaaaagatctataatgtctacattcttgactgttttagagcatacaatatggagaggtgtatttccatcatgatctggttttgagggactaattcctagtttcatcatccatgagattgtagaagcttttggattgtctgacataagatgtctatgaatatgatttttgccaaatttatccactatcctggcttcgaatccgatggacattatttttttaaacactctttctgaaggatctgtacacgccaacaacggaccacatccttcttcatcaaccgagttgttaatcttggctccatactgtaccaataaatttattctctctatgacttcatcatctgttcccgagagataatatagaggcgttttatgctgtttatcacacgcgtttggatctgcgccgtgcgtcagcagcatcgcgactattctattattattaattttagaagctatatgcaatggataatttccatcatcatccgtctcatttggagagtatcctctatgaagaagttcttcgacaaatcgttcatctagtcctttaattccacaatacgcatgtagaatgtgataattatttccagaaggttcgatagcttgtagcatattcctaaatacatctaaatttttactattatatttggcataaagagatagataatactcggccgacataatgttgtccattgtagtataaaaattaatatttctatttctgtatatttgcaacaatttactctctataacaaatatcataacttagttcttttatgtcaagaaggcactggtttagttcatctataaatgtcacgccataactaccacgcatgccatactcagaattatgataaagatatttatccttggggtgtaggtaatggggattaatctttgttggatcagtctctaagttaacacatgtcacacatgatccatttatagttatatcacacgatgatgatttatgaattgattccggaagatcgctatcgtattttgtggttccacaattcatttccatacatgttattgtcacactaatattatgatgaactttatctagccgctgagtggtaaacaacagaacagatagtttattatctttaccaacaccctcagccgctgccacaaatctctgatccgtatccatgatggtcatgtttatttctagtccgtatccagtcaacactatgttagcatttctgtcgatatagctttcactcatatgacactcaccaataatagtagaattaatgtcgtaatttacaccaatagtgagttcggcggcaaagtaccaataccggtaatcttgtcgaggaggacatatagtattcttgtattctaccgaatacccgagagatgcgatacaaaagagcaagactaatttgtaaaccatcttactcaaaatatgtaacaatagtacgatgcaatgagtaagacaataggaaatctatcttatatacacataattattctatcaattttaccaattagttagtgtaatgttaacaaaaatgtgggagaatctaattagtttttctttacacaattgacgtacatgagtctgagttccttgtttttgctaattatttcatccaatttattattcttgacgatatcgagatcttttgtataggagtcaaacttgtattcaacatgcttttctataatcattttagctatttcggcatcatccaatagtacattttccagattagcagaatagatattaatgtcgtatttgaacagagcctgtaacatctcaatgtctttattatctatagccaatttaatgtccggaatgaagagaagggaattattggtgtttgtcgacgtcatatagtcgagcaagagaatcatcatatccacgtgtccattttttatagtgatgtgaatacaactaaggagaatagccagatcaaaagtagatggtatctctgaaagaaagtaggaaacaatacttacatcattaagcatgacggcatgataaaatgaagttttccatccagttttcccatagaacatcagtctccaatttttcttaacaaacagttttaccgtttgcatgttaccactatcaaccgcataatacaatgcggtgtttcccttgtcatcaaattgtgaatcatccagtccactgaatagcaaaatctttactattttggtatcttccaatgtggctgcctgatgtaatggaaattcattctctagaagatttttcaatgctccagcgttcaacaacgtacatactagacgcacgttattatcagctattgcataatacaaggcactatgtccatggacatccgccttaaatgtatctttactagagagaaagcttttcagctgcttagacttccaagtattaattcgtgacagatccatgtctgaaacgagacgctaattagtgtatattttttcattttttataattttgtcatattgcaccagaattaataatatctttaatagatctgattagtagatacatggctatcgcaaaacaacatatacacatttaataaaaataatatttattaagaaaattcagatttcacgtacccatcaatataaataaaataatgattccttacaccgtacccatattaaggagattccaccttacccataaacaatataaatccagtaatatcatgtctgatgatgaacacaaatggtgtattaaattccagtttttcaggagatgatctcgccgtagctaccataatagtagatgcctctgctacagttccttgttcgtcgacatctatctttgcattctgaaacattttataaatatataatgggtccctagtcatatgtttaaacgacgcattatctggattaaacatactaggagccatcatttcggctatcgacttaatatccctcttattttcgatagaaaatttagggagtttaagattgtacactttattccctaattgagacgaccaatagtctaattttgcagccgtgatagaatctgtgaaatgggtcatattatcacctattgccaggtacatactaatattagcatccttatacggaaggcgtaccatgtcatattctttgtcatcgattgtgattgtatttccttgcaatttagtaactacgttcatcatgggaaccgttttcgtaccgtacttattagtaaaactagcattgcgtgttttagtgatatcaaacggatattgccatatacctttaaaatatatagtattaatgattgcccatagagtattattgtcgagcatattagaatctactacattagacataccggatctacgttctactatagaattaattttattaaccgcatctcgtctaaagtttaatctatataggccgaatctatgatattgttgataatacgacggtttaatgcacacagtattatctacgaaactttgataagttagatcagtgtacgtatatttagatgttttcagcttagctaatcctgatattaattctgtaaatgctggacccagatctctttttctcaaatccatagtcttcaataattctattctagtattacctgatgcaggcaatagcgacataaacatagaaaacgaataaccaaacggtgagaagacaatattatcatcttgaatatttttatacgctactataccggcattggtaaatccttgtagacgataggcggacgctgaacacgctaacgatagtatcaataacgcaatcatgattttatggtattaataattaaccttatttttatgttcggtataaaaaaattattgatgtctacacatccttttgtaattgacatctatatatccttttgtataatcaactctaatcactttaacttttacagttttccctaccagtttatccctatattcaacatatctatccatatgcatcttaacactctctgccaagatagcttcagagtgaggatagtcaaaaagataaatatatagagcataatcattctcgtatactctgccctttattacatcacccgcattgggcaacgaataacaaaatgcaagcatcttgttaacgggctcgtaaattgggataaaaattatgtttttattgtcttatatctattttattcaagagaatattcaggaatttctttttccggttgtatctcgtcgcagtatatatcatttgtacattgtttcatattttttaatagtttacaccttttagtaggactagtatcgtacaattcatagctgtattttgaattccaatcacgcataaaaatatcttccaattgttgacgaagacctaatccatcatccggtgtaatattaatagatgctccacatgtatccgtaaagtaatttcctgtccaatttgaggtacctatataggccgttttatcggttaccatatatttggcatggtttaccctagaatacggaatgggaggatcagcatctggtacaataaatagctttacttctatatttatgtttttagattttagcatagcgatagatcttaaaaagtttctcatgataaacgaagatcgttgccagcaactaatcaatagcttaacggatacttgtctgtctatagcggatcttcttaattcatcttctatataaggccaaaacaaaattttacccgccttcgaataaataatagggataaagttcataacagatacataaacgaatttactcgcatttctaatacatgacaataaagcggttaaatcattggttctttccatagtacatagttgttgcggtgcagaagcaataaatacagagtgtggaacgccgcttacgttaatactaagaggatgatctgtattataatacgacggataaaagtttttccaattatatggtagattgttaactccaagataccagtatacctcaaaaatttgagtgagatccgctgccaagttcctattattgaagatcgcaatacccaattccttgacctgagttagtgatctccaatccatgttagcgcttcctaaataaatatgtgtattatcagatatccaaaattttgtatgaagaactcctcctaggatatttgtaatatctatgtatcgtacttcaactccggccatttgtagtctttcaacatcctttaatggtttgttagatttattaacggctactctaactcgtactcctcttttgggtaattgtacaatctcgtttaatattatcgtgccgaaattcgtacccacttcatccgataaactccaataaaaagatgatatatctagtgtttttgtggtattggatagaatttccctccacatgttaaatgtagacaaatatactttatcaaattgcatacctataggaatagtttctgtaatcactgcgattgtattatccggattcattttatttgttaaaagaataatcctatatcacttcactctattaaaaatccaagtttctatttctttcatgactgattttttaacttcatccgtttccttatgaagatgatgtttggcaccttcataaatttttatttctctattacaatttgcatgttgcatgaaataatatgcacctaaaacatcgctaatcttattgtttgttccctggagtatgagagtcgggggggtgttaatcttggaaattatttttctaaccttgttggtagccttcaagacctgactagcaaatccagccttaattttttcatgattgactaatgggtcgtattggtatttataaactttatccatatctctagatactgattctggacatagctttccgactggcgcatttggtgtgatggttcccataagtttggcagctagcagattcagtcttgaaacagcatctgcattaactagaggagacattagaatcattgctgtaaacaagtttggattatcgtaagaggctagctcccatggaatgacccaataagtagatttaatagttaccacgtgctgtaccaaagtcatcaatcatcattttttcaccattacttcttccatgtccaatatgatcatgtgagaatactaaaattcctaacgatgatatgttttcagctagttcgtcataacgtccagaatgtttaccagctccatgacttatgaatactaatgccttaggatatgtaataggtttccaatatttacaatatatgtaatcattgtccagattgaacatacagtttgcactcatgattcacgttatataactatcaatattaacagttcgtttgatgatcatattatttttatgttttattgataattgtaaaaacatacaattaaatcaatatagaggaaggagacggctactgtcttttgtaagatagtcatggcgactaaattagattatgaggatgctgttttttactttgtggatgatgataaaatatgtagtcgcgactccatcatcgatctaatagatgaatatattacgtggagaaatcatgttatagtgtttaacaaagatattaccagttgtggaagactgtacaaggaattgatgaagttcgatgatgtcgctatacggtactatggtattgataaaattaatgagattgtcgaagctatgagcgaaggagaccactacatcaattttacaaaagtccatgatcaggaaagtttattcgctaccataggaatatgtgctaaaatcactgaacattggggatacaaaaagatttcagaatctagattccaatcattgggaaacattacagatttgatgaccgacgataatataaacatcttgatactttttctagaaaaaaaattgaattgatgatataggggtcttcataacgcataattattacgttagcattctatatccgtgttaaaaaaaattatcctatcatgtatttgagagttttatatgtagcaaacatgatagctgtgatgccaataagctttagatattcacgcgtgctagtgttagggatggtattatctggtggtgaaatgtccgttatataatctacaaaacaatcatcgcatatagtatgcgatagtagagtaaacatttttatagtttttactggattcatacatcgtctacccaattcggttataaatgaaattgtcgccaatcttacacccaaccccttgttatccattagcatagtattaacttcgttatttatgtcataaactgtaaatgattttgtagatgccatatcatacatgatattcatgtccctattataatcattactaactttatcacaatatatgttgataatatctatatatgatctagtctttgtgggcaactgtctatacaagtcgtctaaacgttgtttactcatatagtatcgaacagccatcattacatggtcccgttccgttgatagataatcgagtatgttagtggacttgtcaaatctatataccatattttctggaagtggatatacatagtcgtgatcaacattattgctagcctcatcttctatatcctgtactataccattatctatatcatctacataatctatgatattattacacataaacatcgacaacatactattgtttattatctaagtcctgttgatccaaacccttgatctcctctatttgtactatctagagattgtacttcttccagttctggataatatatacgttgatagattagctgagctattctatctccagtatttacattaaacgtacattttccattattaataagaatgactcctatgtttcccctataatcttcgtctattacaccacctcctatatcaatgccttttagtgacagaccagacctaggagctattctaccatagcagaacttaggcatggacatactaatatctgtcttaattaactgtctttctcctggagggatagtataatcgtaagcgctatacaaatcatatccggcagcacccggcgattgcctagtaggagatttagctctgttagtttccttaacaaatctaactggtgagttaatattcatgttgaacataaaactaatattttatttcaaaattatttaccatcccatatattccatgaataagtgtgatgattgtacacttctatagtatctatatacgatccacgataaaatcctcctatcaatagcagtttattatccactatgatcaattctggattatccctcggataaataggatcatctatcagagtccatgtattgctggattcacaataaaattccgcatttctaccaaccaagaataaccttctaccgaacactaacgcgcatgatttataatgaggataataagtggatggtccaaactgccactgatcatgattgggtagcaaatattctgtagttgtatcagtttcagaatgtcctcccattacgtatataacattgtttatggatgccactgctggattacatctaggtttcagaagactcggcatattaacccaagcagcatccccgtggaaccaacgctcaacagatgtgggatttggtagacctcctactacgtataatttattgttagcgggtatcccgctagcatacagtctggggctattcatcggaggaattggaatccaattgtttgatatataatttaccgctatagcattgttatgtatttcattgttcatccatccaccgatgagatatactacttctccaacatgagtacttgtacacatatggaatatatctataatttgatccatgttcataggatactctatgaatggatacttgtatgatttgcgtggttgtttatcacaatgaaatattttggtacagtctagtatccattttacattatttatacctctgggagaaagataatttgacctgattacatttttgataaggagtagcagatttcctaatttatttcttcgctttatataccacttaatgacaaaatcaactacataatcctcatctggaacatttagttcatcgctttctagaataagtttcatagatagataatcaaaattgtctatgatgtcatcttccagttccaaaaagtgtttggcaataaagtttttagtatgacataagagattggatagtccgtattctatacccatcatgtaacactcgacacaatattcctttctaaaatctcgtaagataaagtttatacaagtgtagatgataaattctacagaggttaatatagaagcacgtaataaattgacgacgttatgactatctatatatacctttccagtatacgagtaaataactatagaagttaaactgtgaatgtcaaggtctagacaaaccctcgtaactggatctttatttttcgtgtatttttgacgtaaatgtgtgcgaaagtaaggagataactttttcaatatcgtagaattgactattatattgcctcctatggcatcaataattgttttgaatttcttagtcatagacaatgctaatatattcttacagtacacagtattgacaaatatcggcatttatgtttctttaaaagtcaacatctagagaaaaatgattatctttttgagacataactcccattttttggtattcacccacacgtttttcgaaaaaattagtttttccttccaatgatatattttccatgaaatcaaacggattggtaacattataaatttttttaaatcccaattcagaaatcaatctatccgcgacgaattctatatatgttttcatcatttcacaattcattcctataagtttaactggaagagccgcagtaagaaattcttgttcaatggatactgcatctgttataatagatctaacggtttcttcactcggtggatgcaataaatgtttaaacatcaaacatgcgaaatcgcagtgcagaccctcgtctctactaattagttcgttggaaaacgtgagtccgggcattaggccacgctttttaagccaaaatatggaagcgaatgatccggaaaagaagattccttctactgcagcaaaggcaataagtctctctccataaccggcgctgtcatgtatccacttttgagcccaatcggccttcttttttacacaaggcatcgtttctatggcattaaagagatagtttttttcattactatctttaacataagtatcgatcaaaagactatacatttccgaatgaatgttttcaatggccatctgaaatccgtagaaacatctagcctcggtaatctgtacttctgtacaaaatcgttccgccaaattttcattcactattccgtcactggctgcaaaaaacgccaatacatgttttataaaatatttttcgtctggtgttagtttattccaatcattgatatctttagatatatctacttcttccactgtccaaaatgatgcctctgcctttttatacatgttccagatgtcatgatattggattgggaaaataacaaatctatttggatttggtgcaaggatgggttccataactaaattaacaataacaataaattttttttcagttatctatatgcctgtacttggattttttgtacatcgatatcgccgcaatcactacaataattacaagtattattgatagcattgttattagtactatcataattaaattatctacattcatgggtgctgaataatcgttattatcatcattatcattttgtaattgtgacatcatactagataaatcgtttgcgagattgttgtgggaagcgggcatggaggatgcattatcattattatttaacgccttccatttggattcacaaatgttacgcacattcaacattttatggaaactataattttgtgaaaacaaataacaagaaaactcgtcatcgttcaaatttttaacgatagtaaaccgattaaacgtcgagctaatttctaacgctagcgactctgttggatatgggtttccagatatatatcttttcagttcccctacgtatctataatcatctgtaggaaatggaagatatttccatttatctactgttcctaatatcatatgtggtggtgtagtagaaccattaagcgcgaaagatgttatttcgcatcgtattttaacttcgcaataatttctggttagataacgcactctaccagtcaagtcaatgatattagcctttacagatatattcatagtagtcgtaacgatgactccatcttttagatgcgatactcctttgtatgtaccagaatcttcgtacctcaaactcgatatatttaaacaagttaatgagatattaacgcgttttatgaatgatgatatataaccagaagttttatcctcggtggctagcgctataaccttatcattataataccaactagtgtgattaatatgtgacacgtcagtgtgggtacaaatatgtacattatcgtctacgtcgtattcgatacatccgcatacagccaacaaatataaaatgacaaatactctaacgccgttcgtacccatcttgatgcggtttaataaatgttttgatttcaatttattgtaaaaaaagattcggttttatactgttcgatattctcattgcttatattttcatctatcatctccacacagtcaaatccgtggttagcatgcacctcatcaaccggtaaaagactatcggactcttctatcattataactctagaatatttaatttggtcattattaatcaagtcaattatcttatttttaacaaacgtgagtattttactcattttttataaaaacttttagaaatatacagactctatcgtgtgtctatatcttctttttatatccaatgtatttatgtctgatttttcttcatttatcatatataatggtccaaattctacacgtgcttcggattcatccagatcattaaggttcttataattgtaacatccttctcttccctcttctacatcttccttcttattcttattcttagcgtcacagaatctaccacagcaggatcccatgacgagcgtcatattaaactaatccattttcaattataatatatgattagtaatgaccattaaaataaaaaatattcttcataaccggcaagaaagtgaaaagttcacattgaaactatgtcagtagtatacatcatgaaatgatgatatatatatactctattttggtggaggattatatgatataattcgtggataatcatttttaagacacatttctttattcgtaaatcttttcacgttaaatgagtgtccatattttgcaatttcttcatatgatggcggtgtacgtggacgaggctgctcctgttcttgttgtggtcgccgactgtcgtgtctgcgtttagatccctccattatcgcgattgcgtagatggagtactattttataccttgtaattaaatttttttattaattaaacgtataaaaacgttccgtatctgtatttaagagccagatttcgtctaatagaacaaatagctacagtaaaaataactagaataattgctacacccactagaaaccacggatcgtaatacggcaatcggttttcgataataggtggaacgtatattttatttaaggacttaacaattgtctgtaaaccacaatttgcttccgcggatcctgtattaactatctgtaaaagcatatgttgaccgggcggagccgaacattctccgatatctaatttctgtatatctataatattattaacctccgcatacgcattacagttcttttctagcttggataccgcactaggtacatcgtctagatctattcctatttcctcagcgatagctcttctatccttttccggaagcaatgaaatcacttcaataaatgattcaaccatgagtgtgaaactaagtcgagaattactcatgcatttgttagttattcggagcgcgcaatttttaaactgtcctataacctctcctatatgaatagcacaagtgacattagtagggatagaatgttgagctaatttttgtaaataactatctataaaaagattatacaaagttttaaactctttagtttccgccatttatccagtctgagaaaatgtctctcataataaatttttccaagaaactaattgggtgaagaatggaaacctttaatctatatttatcacagtctgttttggtacacatgatgaattcttccaatgccgtactaaattcgatatctttttcgatttctggatatgtttttaataaagtatgaacaaagaaatggaaatcgtaataccagttatgtttaactttgaaattgttttttattttcttgttaatgattccagccacttgggaaaagtcaaagtcgtttaatgccgatttaatacgttcattaaaaacaaactttttatcctttagatgaattattattggttcattggaatcaaaaagtaagatattatcgggtttaagatctgcgtgtaaaaagttgtcgcaacagggtagttcgtagattttaatgtataacagagccatctgtaaaaagataaactttatgtattgtaccaaagatttaaatcctaatttgatagctaactcggtatctactttatctgccgaatacagtgctaggggaaaaattataatgtttcctctttcatattcgtagttagttctcttttcatgttcgaaaaagtgaaacatgcggttaaaatagtttataacattaatattactgttaataactgccggataaaagtgggatagtaatttcacgaatttgatactgtcctttctctcgttaaacgcctttaaaaaaactttagaagaatatctcaatgagagttcctgaccatccatagtttgtatcaataatagcaacatatgaagaacacgtttatacagagtatgtaaaaatgttaatttatagtttaatcccatggcccacgcacacacgattaattttttttcatctccctttagattgttgtatagaaatttgggtactgtgaactccgccgtagtttccatgggactatataattttgtggcctcgaatacaaattttactacatagttatctatcttaaagactataccatatcctcctgtagatatgtgataaaaatcgtcgtttataggataaaatcgtttatccttttgttggaaaaaggatgaattaatgtaatcattctcttctatctttagtagtgtttccttattaaaattcttaaaataatttaacaatctaactgacggagcccaattttggtgtaaatctaattgggacattatattgttaaaatacaaacagtctcctaatataacagtatctgataatctatggggagacatccattgatattcaggggatgaatcattggcaacacccatttattgtacaaaaagccccaatttacaaacgaaagtccaggtttgatagagacaaacaattaactattttgtctctgtttttaacacctccacagtttttaatttctttagtaatgaaattattcacaatatcagtatcttctttatctaccagagattttactaacttgataaccttggctgtctcattcaatagggtagtaatatttgtatgtgtgatattgatatctttttgaattgtttcttttagaagtgattctttgatggtgccagcatacgaattacaataatgcagaaactcggttaacatgcaggaattatagtaagccaattccaattgttgcctgtgttgtattagagtgtcaatatgagcaatggtgtccttgcgtttctctgatagaatgcgagcagcgattttggcgttatcatttgacgatatttctggaatgacgaatcctgtttctactaactttttggtaggacaaagtgaaacaatcaagaagatagcttctcctcctatttgtggaagaaattgaactcctctagatgatctactgacgatagtatctccttgacagatattggaccgaattacagaagtacctggaatgtaaagccctgaaaccccctcattttttaagcagattgttgccgtaaatcctgcactatgcccaagatagagagctcctttggtgaatccatctctatgtttcagtttaaccaagaaacagtcagctggtctaaaatttccatctctatctaatacagcatctaacttgatgtcaggaactatgaccggtttaatgttatatgtaacattgagtaaatccttaagttcataatcatcactgtcatcagttatgtacgatccaaacaatgtttctaccggcatagtggatacgaagatgctatccatcagaatgtttccctgattagtattttctatatagctattcttctttaaacgattttccaaatcagtaactatgttcatttttttaggagtaggacgcctagccagtatggaagaggattttctagatcctctcttcaacatctttgatctcgatggaatgcaaaaccccatagtgaaacaaccaacgataaaaataatattgtttttcactttttataattttaccatctgactcatggattcattaatatctttataagagctactaacgtataattctttataactgaactgagatatatacaccggatctatggtttccataattgagtaaatgaatgctcggcaataactaatggcaaatgtatagaacaacgaaattatactagagttgttaaagttaatattttctatgagctgttccaataaattatttgttgtgactgcgttcaagtcataaatcatcttgatactatccagtaaaccgtttttaagttctggaatattatcatcccattgtaaagcccctaattcgactatcgaatatcctgctctgatagcagtttcaatatcgacggacgtcaatactgtaataaaggtggtagtattgtcatcatcgtgataaactacgggaatatggtcgttagtaggtacggtaactttacacaacgcgatatataactttccttttgtaccatttttaacgtagttgggacgtcctgcagggtattgttttgaagaaatgatatcgagaacagatttgatacgatatttgttggattcctgattattcactataatataatctagacagatagatgattcgataaatagagaaggtatatcgttggtaggataatacatccccattccagtattctcggatactctattgatgacactagttaagaacatgtcttctattctagaaaacgaaaacatcctacatggactcattaaaacttctaacgctcctgattgtgtctcgaatgcctcgtacaaggatttcaaggatgccatagattctttgaccaacgatttagaattgcgtttagcatctgatttttttattaaatcgaatggtcggctctctggtttgctaccccaatgataacaatagtcttgtaaagataaaccgcaagaaaatttatacgcatccatccaaataaccctagcaccatcggatgatattaatgtattattatagattttccatccacagttattgggccagtatactgttagcaacggtatatcgaatagattactcatgtaacctactagaatgatagttcgtgtactagtcataatatctttaatccaatctaagaaatttaaaattagattttttacactgttaaagttaacaaaggtattacccggatacgtggatatcatatatggcattggtccattatcagtaatagctccataaactgatacggcgatggtttttatatgtgtttgatctaacgaggaagaaattcgcgcccacaattcatctctagatatgtatttaatatcaaacggtaacacatcaatttcgggacgcgtatatgtttctaaatttttaatccaaatataatgatgacctatatgccctattatcatactgtcaactatagtacacctagagaacttacgatacatctgtttcctgtaatcgttaaattttacaaatctataacatgctaaaccttttgacgacagccattcattaatttctgatatggaatctgtattctcgataccgtatcgttctaaagccagtgctatatctccctgttcgtgggaacgctttcgtataatatcgatcaacggataatctgaagtttttggagaataatatgactcatgatctatttcgtccataaacaatctagacataggaattggaggcgatgatcttaattttgtgcaatgagtcgtcaatcctataacttctaatcttgtaatattcatcatcgacataatactatctatgttatcatcgtatattagtataccatgaccttcttcatttcgtgccaaaatgatatacagtcttaaatagttacgcaatatctcaatagtttcataattgttagctgttttcatcaaggtttgtatcctgtttaacatgatggcgttctataacgtctctattttctatttttaattttttaaatttttaacgatttactgtggctagatacccaatctctctcaaatatttttttagcctcgcttacaagctgtttatctatactattaaaactgacgaatccgtgattttggtaatgggttccgtcgaaatttgccgaagtgatatgaacatattcgtcgtcgactatcaacaattttgtattattctgaatagtgaaaaccttcacagatagatcattttgaacacacaacgcatctagacttttggcggttgccatagaatatacgtcgttcttatcccaattaccaactagaagtctgatcttaactcctctattaatggctgcttctataatggagttgtaaatgtcgggccaatagtagctattaccgtcgacacgtgtagtgggaactatggccaaatgttcaatatctatactagtcttagctgacctgagtttatcaataactacatcggtatctagatctctagaatatcccaataggtgttccggagaatcagtaaagaacactccacctataggattcttaatatgatacgcagtgctaactggcaaacaacaagccgcagagcataaattcaaccatgaattttttgcgctattaaaggctttaaaagtatcaaatcttctacgaagatctgtggccagcgggggataatcagaatatacacctaacgttttaatcgtatgtatagatcctccagtaaatgacgcgtttcctacataacatctttcatcatctgacacccaaaaacaaccgagtagtagtcccacattattttttttatctatattaacggttataaaatttatatccgggcagtgactttgtagctctcccagatttcttttccctcgttcatctagcaaaactattattttaatccctttttcagatgcctcttttagtttatcaaaaataagcgctcccctagtcgtactcagaggattacaacaaaaagatgctatgtatatatatttcttagctagagtgataatttcgttaaaacattcaaatgttgttaaatgatcggatctaaaatccatattttctggtagtgtttctaccagcctacattttgctcccgcaggtaccgatgcaaatggccacatttagttaacataaaaacttatacatcctgttctatcaacgattctagaatatcatcggctatatcgctaaaattttcatcaaagtcgacatcacaacctaactcagtcaatatattaagaagttccatgatgtcatcttcgtctatttctatatccgtatccattgtagattgttgaccgattatcgagtttaaatcattactaatactcaatccttcagaatacaatctgtgtttcattgtaaatttataggcggtgtatttaagttggtagattttcaattatgtattaatatagcaacagtagttcttgctcctccttgattctagcatcctcttcattattttcttctacgtacataaacatgtccaatacgttagacaacacaccgacgatggcggccgctacagacacgaatatgactaaaccgatgaccatttaaaaacccctctctagctttcacttaaactgtatcgatcattcttttagcacatgtataatataaaaacattattctatttcgaatttaggcttccaaaaatttttcatccgtaaaccgataataatatatatagacttgttaatagtcggaataaatagattaatgcttaaactatcatcatctccacgattagagatacaatatttacattctttttgctgtttcgaaactttatcaatacacgttaatacaaacccaggaaggagatattgaaactgaggctgttgaaaatgaaacggtgaatacaataattcagataatgtaaaatcatgattccgtattctgatgatattagaactgctaatggatgtcgatggtatgtatctaggagtatctattttaacaaagcatcgatttgctaatatacaattatccttttgattaattgttattttattcatattcttaaaaggtttcatatttatcaattcttctacattaaaaatttccatttttaatttatgtagccccgcaatactcctcattacgtttcattttttgtctataatatccattttgttcatctcggtacatagattatccaattgagaagcgcatttagtagttttgtacattttaagtttattgacgaatcgtcgaaaactagttatagttaacattttattatttgataccctgatattaatacccctgccgttactattatttataactgatgtaatccacgtaacattggaattaactatcgatagtaatgcatcgacgcttccaaaattgtctattataaactcaccgataatttttttattgcatgttttcatattcattaggattatcaaatctttaatcttattacgattgtatgcgttgatattacaagacgtcattctaaaagacggaggatctccatcaaatgccagacaatcacgtacaaagtacatggaaataggttttgttctattgcgcatcatagatttatatagaacacccgtagaaatactaatttgttttactctataaaatactaatgcatctatttcatcgttttgtataacgtctttccaagtgtcaaattccaaatttttttcattgatagtaccaaattcttctatctctttaactacttgcatagataggtaattacagtgatgcctacatgccgttttttgaaactgaatagatgcgtctagaagcgatgctacgctagtcacaatcaccactttcatatttagaatatatatatgtaaaaatatagtagaatttcattttgtttttttctatgctataaatgaattctcattttgcatctgctcatactccgttttatattaataccaaagaaggaagatatctggttctaaaagccgttaaagtatgcgatgttagaactgtagaatgcgaaggaagtaaagcttcctgcgtactcaaagtagataaaccctcatcgcccgcgtgtgagagaagaccttcgtccccgtccagatgcgagagaatgaataaccctggaaaacaagttccgtttatgaggacggacatgctacaaaatatgttcgcggctaatcgcgataatgtagcttctagacttttgtcctaaaatactattatatccttttcgatattaataaatccgtgtcgtccaggttttttatctctttcagtatgtgaatagataggtattttatctctattcatcatcgaatttaagagatccgataaacattgtttgtattctccagatgtcagcatctgatacaacaatatatgtgcacataaacctctggcacttatttcatgtaccttccccttatcactaaggagaatagtatttgagaaatatgtatacatgatattatcatgaattagatatacagaatttgtaacactctcgaaatcacacgatgtgtcggcgttaagatctaatatatcactcgataacacattttcatctagatacactagacattttttaaagctaaaatagtctttagtagtaacagtaactatgcgattattttcatcgatgatacatttcatcggcatattattacgcttaccatcaaagactataccatgtgtatatctaacgtattctagcatggttgccatacgcgcattaaacttttcaggatctttggatagatcttccaatctatctatttgagaaaacatttttatcatgttcaatagttgaaacgtcggatccactatatagatattatctataaagattttaggaactacgttcatggtatcctggcgaatattaaaactatcaatgatatgattatcgttttcatcttttatcaccatatagtttctaagatatgggattttacttaatataatattatttcccgtgataaattttattagaaaggccaaatctataagaaaagtcctagaattagtctgaagaatatctatatcgccgtatagtatatttggattaattagatatagagaatatgatccgtaacatatacaacttttattatggcgtctaagatattcttccatcaacttattaacatttttgactagggaagatacattatgacgtcccattacttttgccttgtctattactgcgacgttcatagaatttagcatatctcttgccaattcttccattgatgttacattataagaaattttagatgaaattacatttggagctttaatagtaagaactcctaatatgtccgtgtatgtggtcactaatacagattgtagttctataatcgtaaataatttacctatattatatgtttgagtctgtttagaaaagtagctaagtatacgatcttttatttctgatgcagatgtattaacatcggaaaaaaatctttttttattcttttttactaaagatacaaatatgtctttgttaaaaacagttattttctgaatatttctagcttgtaattttaacatatgatattcgttcacactaggtactctgcctaaataggtttctataatctttaatgtaatattaggaaaagtattctgatcaggattcctattcattttgaggatttaaaactctgattattgtctaatatggtctctacgcaaactttttcacagagcgatagagtttttgataactcgtttttcttaagaaatataaaactactgtctccagagctcgctctatcttttattttatctaattcgatacaaactcctgatactggttcagaaagtaattcattaattttcagtcctttatagaagatatttaatatagataatacaaaatcttcagtttttgatatcgatctgattgatcctagaactagatatattaataacgtgctcattaggcagtttatggcagcttgataattagatatagtatattccagttcatatttattagataccgcattgcccagattttgatattctatgaattcctctgaaaataaatccaaaataactagacattctattttttgtggattagtgtactctcttccctctatcatgttcactactggtgtccacgatgataaatatctagagggaatataatatagtccataggatgccaatctagcaatgtcgaataactgtaattttattcttcgctcttcattatgaattgattcttgaggtataaacctaacacaaattatattattagacttttcgtatgtaatgtctttcatgttataagtttttaatcctggaatagaatctattttaatgaggcttttaaacgcagagttctccaacgagtcaaagcataatactctgttgtttttcttatatacgatgttacgattttcttctttgaatggaataggtttttgaattagtttataattacaacataatagataaggaagtgtgcaaatagtacgcggaaaaaacataatagctcccctgttttcatccatggttttaagtaaatgatcactggcttctttagtcaatggatattcgaacattaaccgtttcatcatcattggacagaatccatatttcttaatgtaaagagtgatcaaatcattgtgtttattgtaccatcttgttgtaaatgtgtattcggttatcggatctgctcctttttctattaaagtatcgatgtcgatctcgtctaagaattcaactatatcgacatatttcatttgtatacacataaccattactaacgtagaatgtataggaagagatgtaacgggaacagggtttgttgattcgcaaactattctaatacataattcttctgttaatacgtcttgcacgtaatctattatagatgccaagatatctatataattattttgtaagatgatgttaactatgtgatctatataagtagtgtaataattcatgtatttcgatatatgttccaactctgtctttgtgatgtctagtttcgtaatatctatagcatcctcaaaaaatatattcgcatatattcccaagtcttcagttctatcttctaaaaaatcttcaacgtatggaatataataatctattttacctcttctgatatcattaatgatatagtttttgacactatcttctgtcaattgattcttattcactatatctaagaaacggatagcgtccctaggacgaactactgccattaatatctctattatagcttctggacataattcatctattataccagaattaatgggaactattccgtatctatctaacatagttttaagaaagtcagaatctaagacttgatgttcatatattggttcatacatgaaatgatctctattgatgatagtgactatttcattctctgaaaattggtaactcattctatatatgctttccttgttgatgaaggatagaatatactcaatagaatttgtaccaacaaactgttctcttatgaatcgtatatcatcatctgaaataatcatgtaaggcatacatttaacaattagagacttgtctcctgttatcaatatactattcttgtgataatttatgtgtgaggcaaatttgtccacgttctttaattttgttatagtagatatcaaatccaatggagctacagttcttggcttaaacagatatagtttttctggaacaaattctacaacattattataaaggactttgggtaaataagtgggatgaaatcctattttaattaatgcgatagccttgtcctcgtgcagatatccaaacgcttttgtgatagtatggcattcattgtctagaaacgctctacgaatatctgtgacagatatcatctttagagaatatactagtcgcgttaatagtactacaatttgtattttttaatctatctcaataaaaaaattaatatgtatgattcaatgtataactaaactactaactgttattgataactagaatcagaatctaatgatgacgtacccaagaagtttatctactgccaatttagctgcattatttttagcatctcgtttagattttccatctgccttatcgaatactcttccgtcgatatctacacaggcataaaatgtaggagagttactaggcccaactgattcaatacgaaaagaccaatctctcttagttatttggcagtactcattaataacggtgacagggttagcatctttccaatcaataatttttttagccggaataacatcatcaaaagacttatgatcctctctcattgatttttcgcgggatacatcatctattatgacgtcagccataacatcagcatccggcttatccgcctccgttgtcataaaccaacgaggaggaatatcgtcggagctgtacaccatagcactacgttgaagatcgtacagagctttattaacttctcgcttctccatattaagttgtctagttagttgtgcagcagtagctccttcgattccaatggttttaatagcctcacacacaatctctgcgttagaacgttcgtcgatatagattttagacatttttagagagaactaacacaaccagcaataaaactgaacctactttatcatttttttattcatcatcctctggtggttcgtcgttcctatcaaatgtagctctgattaacccgtcatctataggtgatgctggttctggagattctggaggagatggattattatctggaagaatctctgttatttccttgttttcatgtatcgattgcgttgtaacattaagattgcgaaatgctctaaatttgggaggcttaaagtgttgtttgcaatctctacacgcgtgtctaactagtggaggttcgtcagctgctctagtttgaatcatcatcggcgtagtattcctacttttacagttaggacacggtgtattgtatttctcgtcgagaacgttaaaataatcgttgtaactcacatcctttattttatctatattgtattctactcctttcttaatgcattttataccgaataagagatagcgaaggaattctttttcggtgccgctagtacccttaatcatatcacatagtgttttatattccaaatttgtggcaatagacggtttatttctatacgatagtttgtttctggaatcctttgagtattctataccaatattattctttgattcgaatttagtttcttcgatattagattttgtattacctatattcttgatgtagtactttgatgatttttccatggcccattctattaagtcttccaagttggcatcatccacatattgtgatagtaattctcggatatcagtagcggctaccgccattgatgtttgttcattggatgagtaactactaatgtatacattttccatttataacacttatgtattaactttgttcatttatattttttcattattatgttgatattaacaaaagtgaatatatatatatgttaataattgtattgtggttatacggctacaattttataatgagtgaaagtcagtgtccgatgatcaatgacgatagctttactctgaaaagaaagtatcaaatcgatagtgcggagtcaacaataaaaatggataagaagaggataaagtttcagaatagagccaaaatggtaaaagaaataaatcagacaataagagcagcacaaactcattacgagacattgaaactaggatacataaaatttaagagaatgattaggactactactctagaagatatagcaccatctattccaaataatcagaaaacttataaactattctcggacatttcagccatcggcaaagcatcacagaatccgagtaagatggtatatgctctgctgctttacatgtttcccaatttgtttggagatgatcatagattcattcgttatagaatgcatccaatgagtaaaatcaaacacaagatcttctctcctttcaaacttaatcttattagaatattagtggaagaaagattctataataatgaatgcagatctaataaatggaaaataattggaacacaagttgataaaatgttgatagctgaatctgataaatatacaatagatgcaaggtataacctaaaacccatgtatagaatcaagggagaatctgaagaagataccctcttcatcaaacagatggtagaacaatgtgtgacatcccaggaattggtggaaaaagtgttgaagatactgtttagagatttgttcaagagtggagaatacaaagcgtacagatacgatgatgatgtagaaaatggattcattggattggatacactaaaattaaacattgttcatgatatagttgaaccatgtatgcctgttcgtaggccagtggctaagatactgtgtaaagaaatggtaaataaatactttgagaatccgctacatattattggtaaaaatcttcaagagtgcattgactttgttagtgaataggcatttcatctttctccaatactaattcaaattgttaaattaataatggatagtataaatagttattagttataagatagtaaaaataattattagaataagagtgtagtatcatagataactctcttctataaaaatggattttattcgtagaaagtatcttatatacacagtagaaaataatatagattttttaaaggatgatacattaagtaaagtaaacaattttaccctcaatcatgtactagctctcaagtatctagttagcaattttcctcaacacgttattactaaggatgtattagctaataccaatttttttgttttcatacatatggtacgatgttgtaaagtgtacgaagcggttttacgacacgcatttgatgcacccacgttgtacgttaaagcattgactaagaattatttatcgtttagtaacacaatacaatcgtacaaggaaaccgtgcataaactaacacaagatgaaaaatttttagaggttgccgaatacatggacgaattaggagaacttataggcgtaaattatgacttagttcttaatccattatttcacggaggggaacccatcaaagatatggaaatcatttttttaaaactgtttaagaaaacagacttcaaagttgttaaaaaattaagtgttataagattacttatttgggcatacctaagcaagaaagatacaggcatagagtttgcggataatgatagacaagatatatatactctatttcaacaaactggtagaatcgtccatagcaatctaacagaaacgtttagagattatatctttcccggagataagactagctattgggtgtggttaaacgaaagtatagctaatgatgcggatatcgttcttaatagacacgccattaccatgtatgataaaattcttagttatatatactctgagataaaacaaggacgcgttaataaaaacatgcttaagttagtttatatctttgagcctgaaaaagatatcagagaacttctgctagaaatcatatatgatattcctggagatatcctatctattattgatgcaaaaaacgacgattggaaaaaatattttattagtttttataaagctaattttattaacggtaatacatttattagtgatagaacgtttaacgaggacttattcagagttgttgttcaaatagatcccgaatatttcgataatgaacgaattatgtctttattctctacgagtgctgcggacattaaacgatttgatgagttagatattaataacagttatatatctaatataatttatgaggtgaacgatatcacattagatacaatggatgatatgaagaagtgtcaaatctttaacgaggatacgtcgtattatgttaaggaatacaatacatacctgtttttgcacgagtcggatcccatggtcatagagaacggaatactaaagaaactgtcatctataaaatccaagagtagacggctgaacttgtttagcaaaaacattttaaaatattatttagacggacaattggctcgtctaggtcttgtgttagatgattataaaggagacttgttagttaaaatgataaaccatcttaagtctgtggaggatgtatccgcattcgttcgattttctacagataaaaaccctagtattcttccatcgctaatcaaaactattttagctagttataatatttccatcatcgtcttatttcaaaggtttttgagagataatctatatcatgtagaagaattcttggataaaagcatccatctaaccaagacggataagaaatatatacttcaattgataagacacggtagatcatagaacagaccaaatatattattaataatttggtatatacatagatataattatcacacatttttgataaatgggaactgctgcaacaattcagactcccaccaaattaatgaataaagaaaatgcagaaatgattttggaaaaaattgttgatcatatagttatgtatattagtgacgaatcaagtgattcagaaaataatcctgaatatattgattttcgtaacagatacgaagactatagatctctcattataaaaagtgatcacgagtttgtaaagctatgtaaaaatcatgcggagaaaagttctccagaaacgcaacaaatgattatcaaacacatatacgaacaatatcttattccagtatctgaagtactattaaaacctataatgtccatgggtgacataattacatataacggatgtaaagacaatgaatggatgctagaacaactctctaccctaaactttaacaatctccgcacatggaactcatgtagcataggcaatgtaacgcgtctgttttatacattttttagttatctgatgaaagataaactaaatatataagtataatcccattctaatactttaacctgatgtattagcatcttattagaatattaacctaactaaaagacataacataaaaactcattacatagttgataaaaagcggtaggatataaatattatggctgccaccgttccgcgttttgacgacgtgtacaaaaatgcacaaagaagaattctagatcaagaaacattttttagtagaggtctaagtagaccgttaatgaaaaacacatatctatttgataattacgcgtatggatggataccagaaactgcaatttggagtagtagatacgcaaacttagatgcaagtgactattatcccatttcgttgggattacttaaaaagttcgagtttctcatgtctctatataaaggtcctattccagtatacgaagaaaaagtaaatactgaattcattgctaatggatctttctccggtagatacgtatcatatcttagaaagttttctgctcttccaacaaacgagtttattagttttttgttactgacttccattccaatctataatatcttgttctggtttaaaaatactcagtttgatattactaaacacacattattcagatacgtctatacagataatgccaaacacctggcgttggctaggtatatgtatcaaacaggagactataagcctttgtttagtcgtctcaaagagaattatatatttaccggtcccgttccaatatgtatcaaagatatagatcaccctaatcttagtagagcaagaagtccatccgattatgagacattagctaatattagtactatattgtactttaccaagtatgatccggtattaatgtttttattgttttacgtacctgggtattcaattactacaaaaattactccagccgtagaatatctaatggataaactgaatctaacaaagagcgacgtacaactgttgtaaattattttatgcttcgtaaaatgtaggttttgaaccaaacattctttcaaagaatgagatgcataaaactttattatccaatagattgactatttcggacgtcaatcgtttaaagtaaacttcgtaaaatattctttgatcactgccgagtttaaaacttctatcgataattgtttcatatgttttaatatttacaagttttttggtccatggtccattaggacaaatatatgcaaaataatatcgttctccaagttctatagtctctggattatttttattatattcagtaaccaaatacatattagggttatctgcggatttataatttgagtgatgcattcgactcaacataaataattctagaggagacgatctactatcaaattcggatcgtaaatctgtttctaaagaacggagaatatctatacatacctgattagaattcatccgtccttcagacaacatctcagacagtctggttttgtacatcttaatcatattcttatgaaacttggaaacatctcttctagtttcactagtacctttattaattctctcaggtacagattttgaattcgacgatgctgagtatttcatcgttgtatatttcttcttcgattgcataatcagattcttatataccgcctcaaactctattttaaaattattaaacaatactctattattaatcagtcgttctaactctttcgctatttctatagacttatctacatcttgactgtctatctctgtaaacacggagtcggtatctccatacacgctacgaaaacgaaatctgtaatctataggcaacgatgttttcacaatcggattaatatctctatcgtccatataaaatggattacttaatggattggcaaaccgtaacataccgttagataactctgctccatttagtaccgattctagatacaagatcattctacgtcctatggatgtgcaactcttagccgaagcgtatgagtatagagcactatttctaaatcccatcagaccatatactgagttggctactatcttgtacgtatattgcatggaatcatagatggccttttcagttgaactggtagcctgttttagcatctttttatatctggctctctctgccaaaaatgttcttaatagtctaggaatggttccttctatcgatctatcgaaaattgctatttcagagatgaggttcggtagtctaggttcacaatgaaccgtaatatatctaggaggtggatatttctgaagcaatagctgattatttatttcttcttccaatctattggtactaacaacgacaccgactaatgtttccggagatagatttccaaagatacacacattaggatacagactgttataatcaaagattaatacattattactaaacattttttgttttggagcaaataccttaccgccttcataaggaaacttttgttttgtttctgatctaactaagatagttttagtttccaacaatagctttaacagtggacccttgatgactgtactcgctctatattcgaataccatggattgaggaagcacatatgttgacgcacccgcgtctgtttttgtttctactccataatactcccacaaatactgacacaaacaagcatcatgaatacagtatctagccatatctaaagctatgtttagattataatccttatacatctgagctaaatcaacgtcatcctttccgaaagataatttatatgtatcattaggtaaagtaggacataatagtacgactttaaatccattttcccaaatatctttacgaattactttacatataatatcctcatcaacagtcacataattacctgtggttaaaacctttgcaaatgcagcggctttgcctttcgcgtctgtagtatcgtcaccgatgaacgtcatttctctaactcctctatttaatactttacccatgcaactgaacgcgttcttggatatagaatccaatttgtacgaatccaatttttcaaatttttgaatgaatgaatatagatcgaaaaatatagttccattattgttattaacgtgaaacgtagtattggccatgccgcctactcccttatgactagactgatttctctcataaatacagagatgtacagcttcctttttgtccggagatctaaagataattttctctcctgttaataactctagacgattagtaatatatctcagatcaaagttatgtccgttaaaggtaacgacgtagtcgaacgttagttccaacaattgtttagctattcgtaacaaaactatttcagaacatagaactagttctcgttcgtaatccatttccattagtgactgtatcctcaaacatcctctatcgacggcttcttgtatttcctgttccgttaacatctcttcattaatgagcgtaaacaataatcgtttaccacttaaatcgatataacagtaacttgtatgcgagattgggttaataaatacagaaggaaacttcttatcgaagtgacactctatatctagaaataagtacgatcttgggatatcgaatctaggtatttttttagcgaaacagttacgtggatcgtcacaatgataacatccattgttaatctttgtcaaatattgctcgtccaacgagtaacatccgtctggagatatcccgttagaaatataaaaccaactaatattgagaaattcatccatggtggcattttgtatgctgcgtttctttggctcttctatcaaccacatatctgcgacggagcattttctatctttaatatctagattataacttattgtctcgtcaatgtctatagttctcatctttcccaacggcctcgcattaaatggaggaggagacaatgactgatatatttcgtccgtcactacgtaataaaagtaatgaggaaatcgtataaatacggtctcaccatttcgacatctggatttcagatataaaaatctgttttcaccgtgactttcaaaccaattaatgcaccgaacatccatttatagaatttagaaatatattttcatttaaatgaatcccaaacattggggaagagccgtatggaccattatttttatagtactttcgcaagcgggtttagacggcaacatagaagcgtgtaaacgaaaactatatactatagttagcactcttccatgtcctgcatgtagacggcacgcgactatcgctatagaggacaataatgtcatgtctagcgatgatctgaattatatttattattttttcatcagattatttaacaatttggcatctgatcccaaatacgcgatcgatgtgacaaaggttaaccctttataaacttaacccattataaaacttatgattagtcacaactgaaataaccgcgtgattattttttggtataattctacacggcatggtttctgtgactatgaattcaacccccgttacattagtgaaatctttaacaaacagcaagggttcgtcaaagacataaaactcattgtttacaatcgaaatagaccccctatcacacttaaaataaaaaatatccttatcctttaccaccaaataaaattctgattggtcaatgtgaatgtattcacttaacagttccacaaatttatttattaactccgaggcacatacatcgtcggtattttttatggcaaactttactcttccagcatccgtttctaaaaaaatattaacgagttccatttatatcatccaatattattgaaatgacgttgatggacagatgatacaaataagaaggtacggtacctttgtccaccatctcctccaattcatgctctattttgtcattaactttaatgtatgaaaacagtacgccacatgcttccatgacagtgtgtaacactttggatacaaaatgtttgacattagtataattgttcaagactgtcaatctataatagatagtagctataatatattctatgatggtattgaagaagatgacaaccttggcatattgatcatttaacacagacatggtatcaacagatagcttgaatgaaagagaatcagtaattggaataagcgtcttctcgatagagtgtccgtataccaacatgtctgatattttgatgtattccattaaattatttagttttttctttttattctcgttaaacagcatttctgtcaacggaccccaacatcgttgaccgattaagttttgattgatttttccgtgtaaggcgtatctagtcagatcgtatagcctatccaataatccatcatctgtgcgtagatcacatcgtacactttttaattctctatagaagagcgacagacatctggagcaattacagacagcaatttctttattctctacagatgtaagatacttgaagacattcctatgatgatgcagaattttggataacacggtattgatggtatctgttaccataattcctttgatggctgatagtgtcagagcacaagatttccaatctttgacaatttttagcaccattatctttgttttgatatctatatcagacagcatggtgcgtctgacaacacagggattaagacggaaagatgaaatgattctctcaacatcttcaatagataccttgctattttttctggcattatctatatgtgcgagaatatcctctagagaatcagtatcctttttgatgatagtggatctcaatgacatgggacgtttaaaccttcttattctatcaccagattgcatggtgatttgtcttctttcttttatcataatgtaatctctaaattcatcggcaaattgtctatatctaaaatcataatatgagatgtttacctctacaaatatctgttcgtccaatgttagagtatttacatcagttttgtattccaaattaaacatggcaacggatttaattttatattcctctattaagtcctcgtcgataataacagaatgtagataatcatttaatccatcgtacatggttggaagatgcttgttgacaaaatctttaattgtcttgatgaaggtgggactatatctaacatcttgattaataaaatttataacattgtccataggatactttgtaactagttttatacacatctcttcatcggtaagtttagacagaatatcgtgaacaggtggtatattatattcatcagatatacgaagaacaatgtccaaatctatattgtttaatatattatatagatgtagcgtagctcctacaggaatatctttaactaagtcaatgatttcatcaaccgttagatctattttaaagttaatcatataggcattgatttttaaaaggtatgtagccttgactacattctcattaattaaccattccaagtcactgtgtgtaagaagattatattctatcataagcttgactacatttggtcccgataccattaaagaattcttatgatataaggaaacagcttttaggtactcatctactctacaagaattttggagagccttaacgatatcagtgacgtttattatttcaggaggaaaaaacctaacattgagaatatcggaattaatagcttccagatacagtgattttggcaatagtccgtgtaatccataatccagtaacacgagctggtgcttgctagacaccttttcaatgtttaatttttttgaaataagctttgataaagccttcctcgcaaattccggatacatgaacatgtcggcgacatgattaagtattgttttttcattattttctcaataccccaatagatgatagaatatcacccaatgcgtccatgttgtctatttccaacaggtcgctatatccaccaatagaagtttttccaaaaaagattctaggaacagttctaccaccagtaatttgttcaaaatagtcacgcaattcattttcgggtttaaattctttaatatcgacaatttcatacgctcctcttttgaaactaaacttatttagaatatccagtgcatttctacaaaaaggacatgtatacttgacaaaaattgtcactttgttattggccaacctttgttgtacaaattcctcggccattttaatatttaagtgatataaaactatctcgacttatttaactctttagtcgagatatatggacgcagatagctatatgatagccaactacagaaggcaaacgctataaaaaacataattacgacgagcatatttataaatatttttattcagcattacttgatatagtaatattaggcacagtcaaacattcaaccactctcgatacattaactctctcattttctttaacaaattctgcaatatcttcgtaaaaagattcttgaaactttttagaatatctatcgactctagatgaaatagcgttcgtcaacatactatgttttgtatacataaaggcgcccattttaacagtttctagtgacaaaatgctagcgatcctaggatcctttagaatcacatagattgacgattcgtctctcttagtaactctagtaaaataatcatacaatctagtacgcgaaataatattatccttgacttgaggagatctaaacaatctagttttgagaacatcgataagttcatcgggaatgacatacatactatctttaatagaactcttttcatccagttgaatggattcgtccttaaccaactgattaatgagatcttctattttatcattttccagatgatatgtatgtccattaaagttaaattgtgtagcgcttctttttagtctagcagccaatactttaacatcactaatatcgatatacaaaggagatgatttatctatggtattaagaattcgtttttcgacatccgtcaaaaccaattcctttttgcctgtatcatccagttttccatcctttgtaaagaaattattttctactagactattaataagactgataaggattcctccataattgcacaatccaaactttttcacaaaactagactttacaagatctacaggaatgcgtacttcaggttttttagcttgtgattttttcttttgcggacattttctagtaaccaactcatctaccatttcattgattttagcagtgaaataagctttcaatgcacgggcactgatactattgaaaacgagttgatcttcaaattccgccatttaagttcaccaaacaacttttaaatacaaatatatcaatagtagtagaataagaactataaaaaaaataataattaaccaataccaaccccaacaaccggtattattagttgatgtgactgttttctcatcacttagaacagatttaacaatttctataaagtctgtcaaatcatcttccggagaccccataaatacaccaaatatagcggcgtacaacttatccatttatacattgaatattggcttttctttatcgctatcttcatcatattcatcatcaatatcaacaagtcccagattacgagccagatcttcttctacattttcagtcattgatacacgttcactatctccagagagtccgataacgttagccaccacttctctatcaatgattagtttcttgagcgcgaaagtaatttttgtttccgttccggatctatagaagacgataggtgtgataattgccttagccaattgtctttctcttttactgagtgattctagttcaccttctatagatctgagaatggatgattctccagtcgaaacatattctaccatggatccgtttaatttgttgatgaagatggattcatccttaaatgttttctctgtaatagtttccaccgaaagactatgcaaagaatttggaatgcgttccttgtgcttaatgtttccatagacggcttctagaagttgatacaacataggactagccgcggtaacttttatttttagaaagtatccatcgcttctatcttgtttagatttatttttataaagtttagtctctccttccaacataataaaagtggaagtcatttgactagataaactatcagtaagttttatagagatagacgaacaattagcgtattgagaagcatttagtgtaacgtattcgatacattttgcattagatttactaatcgattttgcatactctataacacccgcacaagtctgtagagaatcgctagatgcagtaggtcttggtgaagtttcaactctcttcttgattaccttactcatgattaaacctaaataattgtactttgtaatataatgatatatattttcactttatctcatttgagaataaaaatgtttttgtttaaccactgcatgatgtacagatttcggaatcgcaaaccaccagtggttttattttatccttgtccaatgtgaattgaatgggagcggatgcgggtttcgtacgtagatagtacattcccgtttttagaccgagactccatccgtaaaaatgcatactcgttagtttggaataactcggatctgctatatggatattcatagattgactttgatcgatgaaggctcccctgtctgcagccatttttatgatcgtcttttgtggaatttcccaaatagttttataaactcgcttaatatcttctggaaggtttgtattctgaatggatccaccatctgccataatcctattcttgatctcatcattccataattttctctcggttaaaactctaaggagatgcggattaactacttgaaattctccagacaatactctccgagtgtaaatattactggtatacggttccaccgactcattatttcccaaaatttgagcagttgatgcagtcggcataggtgccaccaataaactatttctaagaccgtatgttctgattttatcttttagaggttcccaattccaaagatccgacggtacaacattccaaagatcatattgtagaataccgttactggcgtacgatcctacatatgtatcgtatggtccttccttctcagctagttcacaactcgcctctaatgcaccgtaataaatggtttcgaagatcttcttatttagatcttgtgcttccaggctatcaaatggataatttaagagaataaacgcgtccgctaatccttgaacaccaataccgataggtctatgtctcttattagagatttcagcttctggaataggataataattaatatctataattttattgagatttctgacaattactttgaccacatccttcagtttgagaaaatcaaatcgcccatctattacaaacatgttcaaggcaacagatgccagattacaaacggctacctcattagcatccgcatattgtattatctcagtgcaaagattactacacttgatagttcctaaattttgttgattactctttttgttacacgcatccttataaagaatgaatggagtaccagtttcaatctgagattctataatcgctttccagacgactcgagcctttattatagatttgtatctcctttctctttcgtatagtgtatacaatcgttcgaactcgtctccccaaacattgtccaatccaggacattcatccggacacatcaacgaccactctccgtcatccttcactcgtttcataaagagatcaggaatccaaagagctataaatagatctctggttctatgttcctcgtttcctgtattctttttaagatcgaggaacgccataatatcagaatgccacggttccaagtatatggccataactccaggccgtttgtttcctccctgatctatgtatctagcggtgttattataaactctcaacattggaataataccgtttgatataccattggtaccggagatatagcttccactggcacgaatattactaattgatagacctattccccctgccattttagagattaatgcgcatcgttttaacgtgtcatagataccctctatgctatcatcgatcatgttaagtagaaaacagctagacatttggtgacgactagttcccgcattaaataaggtaggagaagcgtgcgtaaaccatttttcagaaagtagattgtacgtctcaatagctgagtctatatcccattgatgaattcctactgcgacacgcattaacatgtgctgaggtctttcaacgatcttgttgtttattttcaacaagtaggatttttccaaagttttaaaaccaaaatagttgtatgaaaagtctcgttcgtaaataataaccgagttgagtttatccttatatttgttaactatatccatggtgatacttgaaataatcggagaatgtttcccatttttaggattaacatagttgaataaatcctccatcacttcactaaatagtttttttgtttccttgtgtagatttgatacggctattctggcggctagaatggcataatccggatgttgtgtagtacaagtggctgctatttcggctgccagagtgtccaattctaccgttgttactccattatatattccttgaataaccttcatagctattttaataggatctatatgatccgtgtttaagccataacataattttctaatacgagacgtgattttatcaaacatgacattttccttgtatccatttcgtttaatgacaaacatttttgttggtgtaataaaaaaattatttaacttttcattaatagggatttgacgtatgtagcgtacaaaatgatcgttcctggtatatagataaagagtcctatatatttgaaaatcgttacggctcgattaaactttaatgattgcatagtgaatatatcattaggatttaactccttgactatcatggcggcgccagaaattaccatcaaaagcattaatacagttatgccgatcgcagttaaaacggttatagcatccaccatttatatctaaaaattagatcaaagaatatgtgacaaagtcctagttgtatactgagaattgacgaaacaatgtttcttacatatttttttcttattagtaactgacttaatagtaggaactggaaagctagacttgattattctataagtatagatacccttccagataatgttctctttgataaaagttccagaaaatgtagaattttttaaaaagttatcttttgctattaccaagattgtgtttagacgcttattattaatatgagtgatgaaatccacaccgcctctagatatcgcctttatttccacattagatggtaaatccaatagtgaaactatctttttaggaatgtatggactcgcgtttagaggagtgaacgtcttgggcgtcggaaaggatgattcgtcaaacgaataaacaatttcacaaatggatgttaatgtattagtaggaaattttttgacgctagtggaattgaagattctaatggatgatgttctacctatttcatccgataacatgttaatttccgacaccaacggttttaatatttcgatgatatacggtagtctctctttcggacttatatagcttattccacaatacgagtcattatatactccaaaaaacaaaataactagtataaaatctgtatcgaatgggaaaaacgaaattatcgacataggtatagaatccggaacattgaacgtattaatacttaattctttttctgtggtaagtaccgataggttattgacattgtatggttttaaatattctataacttgagacttgatagatattagtgatgaattgaaaattatttttatcaccacgtgtgtttcaggatcatcgtcgacgcccgtcaaccaaccgaatggagtaaaataaatatcattaatatatgctctagatattagtatttttattaatcctttgattatcatcttctcgtaggcgaatgattccatgatcaagagtgatttgagaacatcctccggagtattaatgggcttagtaaacagtccatcgttgcaataataaaagttatccaagttaaaggatattatgcattcgtttaaagatatcacctcatctgacggagacaattttttggtaggttttagagactttgaagctacttgtttaacaaagttattcatcgtcgtctactattctatttaattttgtagttaatttatcacatatcacattaattgactttttggtccatttttccatacgtttatattcttttaatcctgcgttatccgtttccgttatatccagggatagatcttgcaagttaaatagaatgctcttaaataatgtcattttcttatccgctaaaaatttaaagaatgtataaacctttttcagagatttgaaactcttaggtggtgtcctagtacacaatatcataaacaaactaataaacattccacattcagattccaacagctgattaacttccacattaatacagcctattttcgctccaaatgtacattcgaaaaatctgaataaaacatcgatgtcacaatttgtattatccaatacagaatgtttgtgattcgtgttaaaaccatcggagaaggaatagaaataaaaattattatagtggtggaattcagttggaatattgcctccggagtcataaaaggatactaaacattgttttttatcataaattacacatttccaatgagacaaataacaaaatccaaacattacaaatctagaggtagaacttttaattttgtctttaagtatatacgataagatatgtttattcataaacgcgtcaaatttttcatgaatcgctaaggagtttaagaatctcatgtcaaattgtcctatataatccacttcggatccataagcaaactgagagactaagttcttaatacttcgattgctcatccaggctcctctctcaggctctattttcatcttgacgacctttggattttcaccagtatgtattcctttacgtgataaatcatcgattttcaaatccatttgtgagaagtctatcgccttagatactttttcccgtagtcgaggtttaaaaaaatacgctaacggtatactagtaggtaactcaaagacatcatatatagaatggtaacgcgtctttaactcgtcggttaactctttcttttgatcgagttcgtcgctactattgggtctgctcaggtgccccgactctactagttccaacatcataccgataggaatacaagacactttgccggcggttgtagatttatcatatttttccactacatatccgttacaatttgttaaaaatttagatacatctatattgctacataatccagctagtgaatatatatgacataataaattggtaaatcctagttctggtattttactaattactaaatctgtatatctttccatttatcatggaaaagaatttaccagatatcttcttttttccaaactgcgttaatgtattctcttacaaatattcacaagatgaattcagtaatatgagtaaaacggaacgtgatagtttctcattggccgtgtttccagttataaaacatagatggcataacgcacacgttgtaaaacataaaggaatatacaaagttagtacagaagcacgtggaaaaaaagtatctcctccatcactaggaaaacccgcacacataaacctaaccgcgaagcaatatatatacagtgaacacacaataagctttgaatgttatagttttctaaaatgtataacaaatacagaaatcaattcgttcgatgagtatatattaagaggactattagaagctggtaatagtttacagatattttccaattccgtaggtaaacgaacagatactataggtgtactagggaataagtatccatttagcaaaattccattggcctcattaactcctaaagcacaacgagagatattttcagcgtggatttctcatagacctgtagttttaactggaggaaccggagtgggtaagacgtcacaggtacccaagttattgctttggtttaattatttatttggtggattctctactctagataaaattactgactttcacgaaagaccagtcattctatctcttcctaggatagctttagttagattgcatagcaataccattttaaaatcattgggatttaaggtactagatggatctcctatttctttacggtacggatctataccggaagaattaataaacaaacaaccaaaaaaatatggaattgtattttctacccataagttatctctaacaaaactatttagttatggcactcttattatagacgaagttcatgagcatgatcaaataggagatattattatagcagtagcgagaaagcatcatacgaaaatagattctatgtttttaatgactgccacattagaggatgaccgagaacggctaaaagtatttttacctaatcccgcatttatacatattcctggagatacactgtttaaaattagcgaggtatttattcataataagataaatccatcttccagaatggcatacatagaagaagaaaagagaaatttagttactgctatacagatgtatactcctcctgatggatcatccggtatagtctttgtggcatccgttgcacagtgtcacgaatataaatcatatttagaaaaaagattaccgtatgatatgtatattattcatggtaaggtcttagatatagacgaaatattagaaaaagtgtattcatcacctaatgtatcgataattatttctactccttatttggaatccagcgttactatacgcaatgttacacacatttatgatatgggtagagtttttgtccccgctccttttggaggatcgcaacaatttatttctaaatctatgagagatcaacgaaaaggaagagtaggaagagttaatcctggtacatacgtctatttctatgatctgtcttatatgaagtctatacagcgaatagattcagaatttctacataattatatattgtacgctaataagtttaatctaacactccccgaagatttgtttataatccctacaaatttggatattctatggcgtacaaaggaatatatagactcgttcgatattagtacagaaacatggaataaattattatccaattattatatgaagatgatagagtatgctaaactttatgtactaagtcctattctcgctgaggagttggataactttgagaggacgggagaattaactagtattgtacgagaagccattttatctctaaatttacgaattaagattttaaattttaaacataaagatgatgatacgtatatacacttttgtaaaatattattcggtgtctataacggaacaaacgctactatatattatcatagacctctaacgggatatatgaatatgatttcagatactatatttgttcctgtagataataactaaaaatcaaactctaatgaccacatctttttttagagatgaaaaattttccacatctccttttgtagacacgactaaacattttgcagaaaaaagtttattagtgtttagataatcgtatacttcatcagtgtagatagtaaatgtgaacagataaaaggtattcttgctcaatagattggtaaattccatagaatatattaatcctttcttcttgagatcccacatcatttcaaccagagacgttttatccaatgatttacctcgtactataccacatacaaaactagattttgcagtgacgtcgtacctggtattcctaccaaacaaaattttacttttagttcttttagaaaattctaaggtagaatctctatttgccaatatgtcatctatggaattaccactagcaaaaaatgatagaaatatatattgatacatcgcagctggttttgatctactatactttaaaaacgaatcagattccataattgcctgtatatcatcagctgaaaaactatgttttacacgtattccttcggcatttctttttaatgatatatcttgtttagacaatgataaagttatcatgtccatgagagacgcgtctccgtatcgtataaatatttcattagatgttagacgcttcattaggggtatacttctataaggtttcttaatcagtccatcattggttgcgtcaagaactactatcggatgttgttgggtatctctagtgttacacatggccttactaaagtttgggtaaataactatgatatctctattaattatagatgcatatatttcattcgtcaaggatattagtatcgacttgctatcgtcattaatacgtgtaatgtaatcatataaatcatgcgatagccaaggaaaatttaaatagatgttcatcatataatcgtcgctataattcatattaatacgttgacattgactaatttgtaatatagcctcgccacgaagaaagctctcgtattcagtttcatcgataaaggataccgttaaatataactggttgccgatagtctcatagtctattaagtggtaagtttcgtacaaatacagaatccctaaaatattatctaatgttggattaatctttaccataactgtataaaatggagacggagtcataactattttaccgtttgtacttactggaatagatgaaggaataatctccggacatgctggtaaagacccaaatgtctgtttgaagaaatccaatgttccaggtcctaatctcttaacaaaaattacgatattcgatcccgatatcctttgcattctatttaccagcatatcacgaactatattaagattatctatcatgtctattctcccaccgttatataaatcgcctccgctaagaaacgttagtatatccatacaatggaatacttcatttctaaaatagtattcgttttctaattctttaatgtgaaatcgtatactagaaagggaaaaattatctttgagttttccgttagaaaagaaccacgaaactaatgttctgattgcgtccgattccgttgctgaattaatggatttacaccaaaaactcatataacttctagatgtagaagcattcgctaaaaaattagtagaatcaaaggatataagtagatgttccaacaagtgagcaattcccaagatttcatctatatcattctcgaatccgaaattagaaattcccaagtagatatcctttttcatccgatcgttgatgaaaatacgaactttattcggtaagacaatcatttactaaggagtaaaataggaagtaatgttcgtatgtcgttatcatcgtataaattaaaggtgtgttttttaccattaagtgacattataattttaccaatattggaattataatataggtgtatttgcgcactcgcgacggttgatgcatcggtaaatatagctgtatctaatgttctagtcggtatttcatcatttcgctgtctaataatagcgttttctctatctgtttccattacagctgcctgaagtttattggtcggataatatgtaaaataataagaaatacatacgaataacaaaaataaaataagatataataaagatgccatttagagatctaattttgtttaacttgtccaaattcctacttacagaagatgaggaatcgttggagatagtgtcttccttatgtagaggatttgaaatatcttataatgacttgataacttactttccagataggaaataccataaatatatttataaagtatttgaacatgtagatttatcggaggaattaagtatggaattccatgatacaactctgagagatttagtctatcttagattgtacaagtattccaagtgtatacggccgtgttataaattaggagataatctaaaaggcatagttgttataaaggacaggaatatttatattagggaagcaaatgatgacttgatagaatatctcctcaaggaatacactcctcagatttatacatattctaatgagcgcgtccccataactggttcaaaattaattctttgtggattttctcaagttacatttatggcgtatacaacgtcgcatataacaacaaataaaaaggtagatgttctcgtttccaaaaaatgtatagatgaactagtcgatccaataaattatcaaatacttcaaaatttatttgataaaggaagcggaacaataaacaaaatactcaggaagatattttattcggtaacaggtggccaaactccataggtagctttttctatttcggattttagaatttccaaattcaccagcgatttatcggttttggtgaaatccaaggatttattaatgtccacaaatgccatttgttttgtctgtggattgtatttgaaaatggaaacgatgtagttagatagatgcgctgcaaagtttcctattagggttccgcgctttacgtcacccagcatacttgaatcaccatcctttaaaaaaaatgataagatatcaacatggagtatatcatactcggattttaattcttctactgcatcactgacattttcacaaatactacaatacggtttaccgaaaataatcagtacgttcttcatttatgggtatcaaaaacttaaaatcgttactgctggaaaataaatcactgacgatattagatgataatttatacaaagtatacaatggaatatttgtggatacaatgagtatttatatagccgtcgccaattgtgtcagaaacttagaagagttaactacggtattcataaaatacgtaaacggatgggtaaaaaagggagggcatgtaaccctttttatcgatagaggaagtataaaaattaaacaagacgttagagacaagagacgtaaatattctaaattaaccaaggacagaaaaatgttagaattagaaaagtgtacatccgaaatacaaaatgttaccggatttatggaagaagaaataaaggcagaaatgcaattaaaaatcgataaactcacatttcaaatatatttatctgattctgataacataaaaatatcattgaatgagatactaacacatttcaacaataatgagaatgttacattattttattgtgatgaacgagacgcagaattcgttatgtgtctcgaggctaaaacacatttctctaccacaggagaatggccgttgataataagtaccgatcaggatactatgctatttgcatctgctgataatcatcctaagatgataaaaaacttaactcaactgtttaaatttgttccctcggcagaggataactatttagcaaaattaacggcgttagtgaatggatgtgatttctttcctggactctatggggcatctataacacccaccaacttaaacaaaatacaattgtttagtgattttacaatcgataatatagtcactagtttggcaattaaaaattattatagaaagactaactctaccgtagacgtgcgtaatattgttacgtttataaacgattacgctaatttagacgatgtctactcgtatattcctccttgtcaatgcactgttcaagaatttatattttccgcattagatgaaaaatggaatgaatttaaatcatcttatttagaaagcgtgccgttaccctgccaattaatgtacgcgttagaaccacgcaaggagattgatgtttcagaagttaaaactttatcatcttatatagatttcgaaaatactaaatcagatatcgatgttataaaatctatatcctcgatcttcggatattctaacgaaaactgtaacacgatagtattcggcatctataaggataatttactactgagtataaataattcattttactttaacgatagtctgttaataaccaatactaaaagtgataatataataaatataggttactagattaaaaatggtgttccaactcgtgtgctctacatgcggtaaagatatttctcacgaacgatataaattgattatacgaaaaaaatcattaaaggatgtactcgtcagtgtaaagaacgaatgttgtaggttaaaattatctacacaaatagaacctcaacgtaacttaacagtgcaacctctattggatataaactaatatggatccggttaattttatcaagacatatgcgcctagaggttctattatttttattaattataccatgtcattaacaagtcatttgaatccatcgatagaaaaacatgtgggtatttattatggtacgttattatcggaacacttggtagttgaatctacctatagaaaaggagttcgaatagtcccattggatagtttttttgaaggatatcttagtgcaaaagtatacatgttagagaatattcaagttatgaaaatagcagctgatacgtcattaactttattgggtattccgtatggatttggtcataatagaatgtattgttttaaattggtagctgactgttataaaaatgccggtattgatacatcgtctaaacgaatattgggcaaagatatttttctgagccaaaacttcacagacgataatagatggataaagatatatgattctaataatttaacattttggcaaattgattaccttaaagggtgagttaatatgcataactactcctccgttgttttttccctcgttctttttcttaacgttgtttgccatcactctcataatgtaaagatattctaaaatggtaaacttttgcatatcggacgcagaaattggtataaatgttgtaattgtattatttcccgtcaatggactagtcacagctccatcagttttatatcctttagagtatttctcactcgtgtctaacattctagagcattccatgatctgtttatcgttgatattggccggaaagatagattttttattttttattatattactattggcaattgtagatataacttctggtaaatatttttctaccttttcaatctcttctattttcaagccggctatatattctgctatattgttgctagtatcaataccttttctggctaagaagtcatatgtggtattcactatatcagttttaactggtagttccattagcctttccacttctgcagaataatcagaaattggttctttaccagaaaatccagctactataataggctcaccgatgatcattggcaaaatcctatattgtaccagattaatgagagcatatttcatttccaataattctgctagttcttgagacattgatttatttgatgaatctagttggttctctagatactctaccatttctgccgcatacaataacttgttagataaaatcagggttatcaaagtgtttagcgtggctagaatagtgggcttgcatgtattaaagaatgcggtagtatgagtaaaccgttttaacgaattatatagtctccagaaatctgtggcgttacatacatgagccgaatgacatcgaagattgtccaatatttttaatagctgctctttgtccattatttctatatttgactcgcaacaattgtagataccattaatcaccgattcctttttcgatgccggacaatagcacaattgtttagctttggactctatgtattcagaattaatagatatatctctcaatacagattgcactatacattttgaaactatgtcaaaaattgtagaacgacgctgttctgcagccatttaactttaaataatttacaaaaatttaaaatgagcatccgtataaaaatcgataaactgcgccaaattgtggcatatttttcagagttcagtgaagaagtgtctataaatgtagactcgacggatgagttaatgtatatttttgccgccttgggcggatctgtaaacatttgggcaattatacctctaagtgcatcagtgttttaccgaggagccgaaaatattgtgtttaatcttcctgtgtccaaggtaaaatcgtgtttgtgtagttttcacaatgatgccatcatagatatagaacctgatctggaaaataatctagtaaaactttctagttatcatgtagtaagtgtcgattgtaacaaggaactgatgcctattaggacagatactactatttgtctaagtatagatcaaaagaaatcttacgtgtttaattttcacaagtatgaagaaaaatgttgtggtagaaccgtcattcatctagaatggttgttgggctttatcaagtgtattagtcagcatcagcatctggctattatgtttaaagatgacaatattattatgaagactcctggtaatactgatgcgttttccagggaatattctatgactgaatgttctcaagaactacaaaagttttctttcaaaatagctatctcgtctctcaacaaactacgaggattcaaaaagagagtcaatgtttttgaaactagaatcgtaatggataatgacgataacattttaggaatgttgttttcggatagagttcaatcctttaagatcaacatctttatggcgtttttagattaatactttcaatgagataaatatgggtggcggagtaagtgttgagctccctaaacgggatccgcctccgggagtacccactgatgagatgttattaaacgtggataaaatgcatgacgtgatagctcccgctaagcttttagaatatgtgcatataggaccactagcaaaagataaagaggataaagtaaagaaaagatatccagagtttagattagtcaacacaggacccggtggtctttcggcattgttaagacaatcgtataatggaaccgcacccaattgctgtcgcacttttaatcgtactcattattggaagaaggatggaaagatatcagataagtatgaagagggtgcagtattagaatcgtgttggccagacgttcacgacactggaaaatgcgatgttgatttattcgactggtgtcagggggatacgttcgatagaaacatatgccatcagtggatcggttcagcctttaataggagtaatagaactgtagagggtcaacaatcgttaataaatctgtataataagatgcaaacattatgtagtaaagatgctagtgtaccaatatgcgaatcatttttgcattatttacgcgcacacaatacagaagatagcaaagagatgatcgattatattctaagacaacagtctgcggactttaaacagaaatatatgagatgtagttatcccactagagataagttagaagagtcattaaaatatgcggaacctcgagaatgttgggatccagagtgttcgaatgccaatgttaatttcttactaacacgtaattataataatttaggactttgcaatattgtacgatgtaataccagcgtgaacaacttacagatggataaaacttcctcattaagattgtcatgtggattaagcaatagtgatagattttctactgttcccgtcaatagagcaaaagtagttcaacataatattaaacactcgttcgacctaaaattgcatttgatcagtttattatctctcttggtaatatggatactaattgtagctatttaaatgggtgccgcggcaagcatacagacgacggtgaatacactcagcgaacgtatctcgtctaaattagaacaagaagcgaacgctagtgctcaaacaaaatgtgatatagaaatcggaaatttttatatccgacaaaaccatggatgtaacctcactgttaaaaatatgtgctctgcggacgcggatgctcagttggatgctgtgttatcagccgctacagaaacatatagtggattaacaccggaacaaaaagcatacgtgccagctatgtttactgctgcgttaaacattcagacgagtgtaaacactgttgttagagattttgaaaattatgtgaaacagacttgtaattctagcgcggtcgtcgataacaaattaaagatacaaaacgtaatcatagatgaatgttacggagccccaggatctccaacaaatttggaatttattaatacaggatctagcaaaggaaattgtgccattaaagcgttgatgcaattgacgactaaggccactactcaaatagcacctagacaagttgctggtacaggagttcagttttatatgattgttatcggtgttataatattggcagcgttgtttatgtactatgccaagcgtatgttgttcacatccaccaatgataaaatcaaacttattttagccaataaggaaaacgtccattggactacttacatggacacattctttagaacttctccgatggttattgctaccacggatatgcaaaactgaaaatatattgataatattttaatagattaacatggaagttatcgctgatcgtctagacgatatagtgaaacaaaatatagcggatgaaaaatttgtagattttgttatacacggtctagagcatcaatgtcctgctatacttcgaccattaattaggttgtttattgatatactattatttgttatagtaatttatatttttacggtacgtctagtaagtagaaattatcaaatgttgttggtggtgctagtcatcacattaactattttttattactttatactataatagtactagactgacttctaacaaacatctcacctgccataaataaatgcttgatattaaagtcttctatttctaacactattccatctgtggaaaataatactctgacattatcgctaattgacacatcggtgagtgatatgcctataaagtaataatcttctttgggcacatataccagtgtaccaggttctaacaacctatttactggtgctcctgtagcatactttttctttaccttgagaatatccatcgtttgcttggtcaatagcgatatgtgattttttatcaaccactcaaaaaagtaattggagtgttcatatcctctacgggctattgtctcatggccgtgtatgaaatttaagtaacacgactgtggtagatttgttctatagagccgattgccgcaaatagatagaactaccaatatgtctgtacaaatgttaaacattaattgattaacagaaaaaacaatgttcgttctgggaatagaaaccagatcaaaacaaaattcgttagaatatatgccacgtttatacatggaatataaaataactacagtttgaaaaataacagtatcatttaaacatttaacttgcggggttaatctcacaactttactgtttttgaactgttcaaaatatagcatcgatccgtgagaaatacgtttagccgcctttaatagaggaaatcccaccgcctttctggatctcaccaacgacgatagttctgaccagcaactcatttcttcatcatccacctgttttaacatataataggcaggagatagatatccgtcattgcaatattccttctcgtaggcacacaatctaatattgataaaatctccattctcttctctgcatttattatcttgtctcggtggctgattaggctgtggtcttggtttaggccttggtctatcgttgttgaatctattttggtcattaaatctttcatttcttcctggtatatttttatcacctcgtttggttggatttttgtctatattatcgtttgtaacatcggtacgggtattcatttatcacaaaaaaaacttctctaaatgagtctactgctagaaaacctcatcgaagaagataccatattttttgcaggaagtatatctgagtatgatgatttacaaatggttattgccggcgcaaaatccaaatttccaagatctatgctttctatttttaatatagtacctagaacgatgtcaaaatatgagttggagttgattcataacgaaaatatcacaggagcaatgtttaccacaatgtataatataagaaacaatttgggtctaggagatgataaactaactattgaagccattgaaaactatttcttggatcctaacaatgaagttatgcctcttattattaataatacggatatgactgccgtcattcctaaaaaaagtggtaggagaaagaataagaacatggttatcttccgtcaaggatcatcacctatcttgtgcattttcgaaactcgtaaaaagattaatatttataaagaaaatatggaatccgcgtcgactgagtatacacctatcggagacaacaaggctttgatatctaaatatgcgggaattaatgtcctgaatgtgtattctccttccacatccataagattgaatgccatttacggattcaccaataaaaataaactagagaaacttagtactaataaggaactagaatcgtatagttctagccctcttcaagaacccattaggttaaatgattttctgggactattggaatgtgttaaaaagaatattcctctaacagatattccgacaaaggattgattactataaatggagaatgttcctaatgtatactttaatcctgtgtttatagagcccacgtttaaacattctttattaagtgtttataaacacagattaatagttttatttgaagtattcgttgtattcattctaatatatgtattttttagatctgaattaaatatgttcttcatgcctaaacgaaaaatacccgatcctattgatagattacgacgtgctaatctagcgtgtgaagacgataaattaatgatctatggattaccatggatgacaactcaaacatctgcgttatcaataaatagtaaaccgatagtgtataaagattgtgcaaagcttttgcgatcaataaatggatcacaaccagtatctcttaacgatgttcttcgcagatgatgattcattttttaagtatttggctagtcaagatgatgaatcttcattatctgatatattgcaaatcactcaatatctagactttctgttattattattgatccaatcaaaaaataaattagaagctgtgggtcattgttatgaatctctttcagaggaatacagacaattgacaaaattcacagactttcaagattttaaaaaactgtttaacaaggtccctattgttacagatggaagggtcaaacttaataaaggatatttgttcgactttgtgattagtttgatgcgattcaaaaaagaatcctctctagctaccaccgcaatagatcctgttagatacatagatcctcgtcgtgatatcgcattttctaacgtgatggatatattaaagtcgaataaagtgaacaataattaattctttattgtcatcatgaacggcggacatattcagttgataatcggccccatgttttcaggtaaaagtacagaattaattagacgagttagacgttatcaaatagctcaatataaatgcgtgactataaaatattctaacgataatagatacggaacgggactatggacgcatgataagaataattttgaagcattggaagcaactaaactatgtgatgtcttggaatcaattacagatttctccgtgataggtatcgatgaaggacagttctttccagacattgtttaattctgtgagcgtatggcaaacggtaccgagctcaaaaattgaaaaactagcgtctttttttgctcgaagtcgaccaccatgagtgctcctaaactcctctctctgggctgtatcttcttccccttgctactttttcagcaggcccgggctcaattcccaagacagtgtgccactgttgaggctttgagaagtggtatgtgttgcccagacctgtcccctgtgtctgggcctgggacagaccgctgtggctcatcatcagggaggggcagatgtgaggcagtgactgcagactcccggccccacagccctcagtatccccatgatggcagagatgatcgggaggtctggcccttgcgcttcttcaataggacatgtcactgcaacggcaatttctcaggacacaactgtgggacgtgccgtcctggctggagaggagctgcctgtgaccagagggttctcatagtcaggagaaatcttctggacttaagtaaagaagaaaagaaccactttgtccgggccctggatatggcaaagcgcacaactcaccctttatttgtcattgccaccaggagatcagaagaaatactggggccagatggcaacacgccacaatttgagaacatttccatttataactactttgtttggacacactattactcagtcaaaaagactttccttggggtaggacaggaaagctttggtgaagtggatttctctcatgagggaccagcttttctcacatggcacaggtaccacctcctgcgtctggagaaagacatgcaggaaatgttgcaagagccttctttctcccttccttactggaattttgcaacggggaaaaatgtctgtgatatctgcacggatgacttgatgggatccagaagcaactttgattccactctaataagcccaaactctgtcttttctcaatggcgagtggtctgtgactccttggaagattatgataccctgggaacactttgtaacagcaccgaggatgggccaattaggagaaatccagctggaaatgtggccagaccaatggtgcaacgtcttcctgaaccacaggatgtcgctcagtgcttggaagttggtttatttgacacgcctcctttttattccaactctacaaacagtttccgaaacacagtggaaggttacagtgaccccacgggaaagtatgaccctgctgttcgaagtcttcacaatttggctcatctattcctgaatggaacagggggacaaacccatttgtctccaaatgatcctatttttgtcctcctgcacaccttcacagatgcagtctttgatgaatggctgaggagatacaatgctgatatatccacatttccattggaaaatgcccctattggacataatagacaatacaacatggtgccattctggcccccagtcaccaacacagaaatgtttgttactgctccagacaacctgggatacacttatgaaattcaatggccaagtcgggagtttagtgtacctgagataattgccatagcagtagttggcgctttgttactggttgcactcatttttgggactgcttcttatctgattcgtgccagacgcagtatggatgaagctaaccagcctctcctcactgatcagtatcaatgctatgctgaagaatatgaaaaactccagaatcctaatcagtctgtggtctaattaattaattaatttttatcgatctaattcaacaatgtctggagagctcggtttggaattagtgaaagcttaaaaattgaaattttattttttttttttggaatataaataagctcgaagtcgaccaccatgttcttggctgttttgtattgccttctgtggagtttccagatctctgatggccattttcctcgagcctgtgcctcctctaagaacttgttggcaaaagaatgctgcccaccatggatgggtgatgggagtccctgcggccagctttcaggcagaggttcctgccaggatatccttctgtccagtgcaccatctggacctcagttccccttcaaaggggtggatgaccgtgagtcctggccctctgtgttttataataggacctgccagtgctcaggcaacttcatgggtttcaactgcggaaactgtaagtttggatttgggggcccaaattgtacagagaagcgagtcttgattagaagaaacatttttgatttgagtgtctccgaaaagaataagttcttttcttacctcactttagcaaaacatactatcagctcagtctatgtcatccccacaggcacctatggccaaatgaacaatgggtcaacacccatgtttaatgatatcaacatctacgacctctttgtatggatgcattactatgtgtcaagggacacactgcttgggggctctgaaatatggagggacattgattttgcccatgaagcaccagggtttctgccttggcacagacttttcttgttattgtgggaacaagaaattcgagaactaactggggatgagaacttcactgttccatactgggattggagagatgcagaaaactgtgacatttgcacagatgagtacttgggaggtcgtcaccctgaaaatcctaacttactcagcccagcatccttcttctcctcctggcagatcatttgtagcagatcagaagagtataatagccatcaggttttatgcgatggaacacctgagggaccactattacgtaatcctggaaaccatgacaaagccaaaacccccaggctcccatcttcagcagatgtggaattttgtctgagtttgacccagtatgaatctggatcaatggatagaactgccaatttcagctttagaaacacactggaaggatttgccagtccactcacagggatagcagatccttctcaaagtagcatgcacaatgccttacatatctttatgaatggaacaatgtcccaagtacagggatcggccaacgatcccatttttcttcttcaccatgcttttgtggacagtatttttgaacaatggctgcgaaggcaccgccctcttttggaagtttacccagaagccaatgcacctatcggccataacagagactcttacatggttcctttcataccgctctatagaaatggtgatttcttcataacatccaaggatctgggatatgactacagctacctccaagagtcagatccaggcttttacagaaattatattgagccttacttggaacaagccagtcgtatctggccatggcttcttggggcagcactggtgggagctgttattgctgcagctctctctgggcttagcagtaggctatgccttcagaagaagaagaagaagaagcaaccccaggaggaaaggcagccactcctcatggacaaagacgactaccacagcttgctgtatcagagccatctgtgattaattaatttttatcgatctaattcaacaatgtctggagagctcggatccttctgtgagcgtatggcaaacgaaggaaaaatagttatagtagccgcactcgatgggacatttcaacgtaaaccgtttaataatattttgaatcttattccattatctgaaatggtggtaaaactaactgctgtgtgtatgaaatgctttaaggaggcttccttttctaaacgattgggtgaggaaaccgagatagagataataggaggtaatgatatgtatcaatcggtgtgtagaaagtgttacgtcggctcataatattatattttttatctaaaaaactaaaaataaacattgattaaattttaatataatacttaaaaatggatgttgtgtcgttagataaaccgtttatgtattttgaggaaattgataatgagttagattacgaaccagaaagtgcaaatgaggtcgcaaaaaaactgccgtatcaaggacagttaaaactattactaggagaattattttttcttagtaagttacagcgacacggtatattagatggtgccaccgtagtgtatataggatcggctcctggtacacatatacgttatttgagagatcatttctataatttaggagtgatcatcaaatggatgctaattgacggccgccatcatgatcctattttaaatggattgcgtgatgtaactctagtgactcggttcgttgatgaggaatatctacgatccatcaaaaaacaactgcatccttctaagattattttaatttctgatgtgagatccaaacgaggaggaaatgaacctagtacggcggatttactaagtaattacgctctacaaaatgtcatgattagtattttaaaccccgtggcgtctagtcttaaatggagatgcccgtttccagatcaatggatcaaggacttttatatcccacacggtaataaaatgttacaaccttttgctccttcatattcagctgaaatgagattattaagtatttataccggtgagaacatgagactgactcgagttaccaaattagacgctgtaaattatgaaaaaaagatgtactaccttaataagatcgtccgtaacaaagtagttgttaactttgattatcctaatcaggaatatgactattttcacatgtactttatgctgaggaccgtgtactgcaataaaacatttcctactactaaagcaaaggtactatttctacaacaatctatatttcgtttcttaaatattccaacaacatcaactgaaaaagttagtcatgaaccaatacaacgtaaaatatctagcaaaaattctatgtctaaaaacagaaatagcaagagatccgtacgcggtaataaatagaaacgtactactgagatatactaccgatatagagtataatgatttagttactttaataaccgttagacataaaattgattctatgaaaactgtgtttcaggtatttaacgaatcatccataaattatactccggttgatgatgattatggagaaccaatcattataacatcgtatcttcaaaaaggtcataacaagtttcctgtaaattttctatacatagatgtggtaatatctgacttatttcctagctttgttagactagatactacagaaactaatatagttaatagtgtactacaaacaggcgatggtaaaaagactcttcgtcttcccaaaatgttagagacggaaatagttgtcaagattctctatcgccctaatataccattaaaaattgttagatttttccgcaataacatggtaactggagtagagatagccgatagatctgttatttcagtcgctgattaatcaattagtagagatgagataagaacattataataatcaataatatatcttatatcttatatcttatatcttatatcttgtttagaaaaatgctaatattaaaatagctaacgctagtaatccaatcggaagccatttgatatctataatagggtatctaatttcctgatttaaatagcggacagctatattctcggtagctactcgtttggaatcacaaacattatttacatctaatttactatctgtaatggaaacgtttcccaatgaaatggtacaatccgatacattgcattttgttatatttttttttaaagaggctggtaacaacgcatcgcttcgtttacatggctcgtaccaacaataatagggtaatcttgtatctattcctatccgtactatgcttttatcaggataaatacatttacatcgtatatcgtctttgttagcatcacagaatgcataaatttgttcgtccgtcatgataaaaatttaaagtgtaaatataactattatttttatagttgtaataaaaagggaaatttaattgtatactttcggttctttaaaagaaactgacttgataaaaatggctgtaatctctaaggttacgtatagtctatatgatcaaaaagagattaatgctacagatattatcattagtcatgttaaaaatgacgacgatatcggtaccgttaaagatggtagactaggtgctatggatggggcattatgtaagacttgtgggaaaacggaattggaatgtttcggtcactggggtaaagtaagtatttataaaactcatatagttaagcctgaatttatttcagaaattattcgtttactgaatcatatatgtattcactgcggattattgcgttcacgagaaccgtattccgacgatattaacctaaaagagttatcgggacacgctcttaggagattaaaggataaaatattatccaagaaaaagtcatgttggaacagtgaatgtatgcaaccgtatcaaaaaattactttttcaaagaaaaaggtttgtttcgtcaacaagttggatgatattaacgttcctaattctctcatctatcaaaagttaatttctattcatgaaaagttttggccattattagaaattcatcaatatccagctaacttattttatacagactactttcccatccctccgttgattattagaccggctattagtttttggatagatagtatacccaaagagaccaatgaattaacttacttattaggtatgatcgttaagaattgtaacttgaatgctgatgaacaggttatccagaaggcggtaatagaatacgatgatattaaaattatttctaataacactaccagtatcaatttatcatatattacatccggcaaaaataatatgattagaagttatatcgtcgcccgacgaaaagatcagaccgctagatctgtaattggtcccagtacatctatcaccgttaatgaggtaggaatgcccgcatatattagaaatacacttacagaaaagatatttgttaatgcctttacagtggataaagttaaacaactattagcgtcaaaccaagttaaattttactttaataaacgattaaaccaattaacaagaatacgccaaggaaagtttattaaaaataaaatacatttattgcctggtgattgggtagaagtagctgttcaagaatatacaagtattatttttggaagacagccgtctctacatagatacaacgtcatcgcttcatctatcagagctaccgaaggagatactatcaaaatatctcccggaattgccaactctcaaaatgctgatttcgacggggatgaggaatggatgatattagaacaaaatcctaaagctgtaattgaacaaagtattcttatgtatccgacgacgttactcaaacacgatattcatggagcccccgtttatggatctattcaagatgaaatcgtagcagcgtattcattgtttaggatacaagatctttgtttagatgaagtattgaacatcttggggaaatatggaagagagttcgatcctaaaggtaaatgtaaattcagcggtaaagatatctatacttacttgataggtgaaaagattaattatccgggtctcttaaaggatggtgaaattattgcaaacgacgtagatagtaattttgttgtggctatgaggcatctgtcattggctggactcttatccgatcataagtcgaacgtggaaggtatcaactttattatcaagtcatcttatgtttttaagagatatctatctatttacggttttggggtgacattcaaagatctgagaccaaattcgacgttcactaataaattggaggccatcaacgtagaaaaaatagaacttatcaaagaagcatacgccaaatatctcaacgatgtaagagacgggaaaatagttccattatctaaagctttagaggcggactatgtggaatccatgttatccaacttgacaaatcttaatatccgagagatagaagaacatatgagacaaacgctgatagatgatccagataataacctcctgaaaatggccaaagcgggttataaagtaaatcccacagaactaatgtatattctaggtacgtatggacaacaaaggattgatggtgaaccagcagagactcgagtattgggtagagttttaccttactatcttccagactctaaggatccagaaggaagaggttatattcttaattctttaacaaaaggattaacgggttctcaatattacttttcgatgctggttgcaagatctcaatctactgatatcgtctgtgaaacatcacgtaccggaacactggctagaaaaatcattaaaaagatggaggatatggtggtcgacggatacggacaagtagttataggtaatacgctcatcaagtacgccgccaattataccaaaattctaggctcagtatgtaaacctgtagatcttatctatccagatgagtccatgacttggtatttggaaattagtgctctgtggaataaaataaaacagggattcgtttactctcagaaacagaaacttgcaaagaagacattggcgccgtttaatttcctagtattcgtcaaacccaccactgaggataatgctattaaggttaaggatctgtacgatatgattcataacgtcattgatgatgtgagagagaaatacttctttacggtatctaatatagattttatggagtatatattcttgacgcatcttaatccttctagaattagaattacaaaagaaacggctatcactatctttgaaaagttctatgaaaaactcaattatactctaggtggtggaactcctattggaattatttctgcacaggtattgtctgagaagtttacacaacaagccctgtccagttttcacactactgaaaaaagtggtgccgtcaaacaaaaacttggtttcaacgagtttaataacttgactaatttgagtaagaataagaccgaaattatcactctggtatccgatgatatctctaaacttcaatctgttaagattaatttcgaatttgtatgtttgggagaattaaatccagacatcactcttcgaaaagaaacagataggtatgtagtagatataatagtcaatagattatacatcaagagagcagaaataaccgaattagtcgtcgaatatatgattgaacgatttatctcctttagcgtcattgtaaaggaatggggtatggaaacattcattgaggatgaggataatattagatttactgtctacctaaatttcgttgaaccggaagaattgaatcttagtaagtttatgatggttcttccgggtgccgccaacaagggaaagattagtaaattcaagattcctatctctgactatacgggttatgacgacttcaatcaaacaaaaaagctcaataagatgactgtagaactcatgaatctaaaagaattgggttctttcgatttggaaaacgtcaacgtgtatcctggagtatggaatacatacgatatcttcggtatcgaggccgctcgtgaatacttgtgcgaagccatgttaaacacctatggagaagggttcgattatctgtatcagccttgtgatcttctcgctagtttactatgtgctagttacgaaccagaatcagtgaataaattcaagttcggcgcagctagtactcttaagagagctacgttcggagacaataaagcattgttaaacgcggctcttcataaaaagtcagaacctattaacgataatagtagctgccacttttttagcaaggtccctaatataggaactggatattacaaatactttatcgacttgggtcttctcatgagaatggaaaggaaactatctgataagatatcttctcaaaagatcaaggaaatggaagaaacagaagacttttaattcttatcaataacatatttttctatgatctgtcttttaaacgatggattttccacaaatgcgcctctcaagtccctcatagaatgatacacgtataaaaaatatagcataggcaatgactccttatttttagacattagatatgccaaaatcatagccccgcttctatttactcccgcagcacaatgaaccaacacgggctcgtttcgttgatcacatttagataaaaaggcggttacgtcgtcaaaatatttactaatatcggtagttgtatcatctaccaacggtatatgaataatattaatattagagttaggtaatgtatatttatccatcgtcaaatttaaaacatatttgaacttaacttcagatgatggtgcatccatagcatttttataatttcccaaatacacattattggttacccttgtcattatagtgggagatttggctttgtgcatatctccagttgaacgtagtagtaagtatttatacaaacttttcttatccatttataacgtacaaatggataaaactactttatcggtaaacgcgtgtaatttagaatacgttagagaaaaggctatagtaggcgtacaagcagccaaaacatcaacacttatattctttgttattatattggcaattagtgcgctattactctggtttcagacgtctgataatccagtctttaatgaattaacgagatatatgcgaattaaaaatacggttaacgattggaaatcattaacggatagcaaaacaaaattagaaagtgatagaggtagacttctagccgctggtaaggatgatatattcgacttcaaatgtgtggatttcggcgcctattttatagctatgcgattggataagaaaacatatctgccgcaagctattaggcgaggtactggagacgcgtggatggttaaaaaggcggcaaaggtcgatccatctgctcaacaattttgtcagtatttgataaaacacaagtctaataatgttattacttgtggtaatgagatgttaaatgaattaggttatagcggttattttatgtcaccgcattggtgttccgattttagtaatatggaatagtgttagataaatgcggtaacgaatgttcctgtaaggaaccataacagcttagatttaacgttaaagatgagcataaacataataaacaaaattacaatcaaacttataacattaatatcaaacaatccaaaaaatgaaatcagtggagtagtaaacgcgtacataactcctggataacgtttagcagctgccgttcctattctagaccaaaaatttggtttcatgttttcgaaacggtattctgcaacaagtcggggatcgtgttctacatatttggcggcattatccagtatctgcctattgatcttcatttcgttttcgattctggctatttcaaaataaaatcccgatgatagacctccagactttataatttcatctacgatgttcagcgccgtagtaactctaataatataggctgataagctaacatcataccctcctgtatatgtgaatatggcatgatttttgtccattacaagctcggttttaactttattgcctgtaataatttctctcatctgtaggatatctatttttttgtcatgcattgccttcaagacgggacgaagaaacgtaatatcctcaataacgttatcgttttctacaataactacatattctacctttttattttctaactcggtaaaaaaattagaatcccatagggctaaatgtctagcgatatttcttttcgtttcctctgtacacatagtgttacaaaaccctgaaaagaagtgagtatacttgtcatcatttctaatgtttcctccagtccactgtataaacgcataatccttgtaatgatctggatcatccttgactaccacaacatttcttttttctggcataacttcgttgtcctttacatcatcgaacttctgatcattaatatgctcatgaacattaggaaatgtttctgatggaggtctatcaataactggcacaacaataacaggagttttcaccgccgccatttagttattgaaattaatcatatacaactctttaatacgagttatattttcgtctatccattgtttcacatttacatatttcgacaaaaagatataaaatgcgtattccaatgcttctctgtttaatgaattactaaaatatacaaacacgtcactgtctggcaataaatgatatcttagaatattgtaacaatttattttgtattgcacatgttcgtgatctatgagttcttcttcgaatggcataggatctccgaatctgaaaacgtataaataggagttagaataataatatttgagagtattggtaatatataaactctttagcggtataattagtttttttctctcaatttctatttttagatgtgatggaaaaatgactaattttgtagcattagtatcatgaactctaatcaaaatcttaatatcttcgtcacacgttagctctttgaagtttttaagagatgcatcagttggttctacagatggagtaggtgcaacaattttttgttctacacatgtatgtactggagccattgttttaactataatggtgcttgtatcgaaaaactttaatgcagatagcggaagctcttcgccgcgactttctacgtcgtaattgggttctaacgccgatctctgaatggatactagttttctaagttctaatgtgattctctgaaaatgtaaatccaattcctccggcattatagatgtgtatacatcggtaaataaaactatagtatccaacgatcccttctcgcaaattctagtcttaaccaaaaaatcgtatataaccacggagatggcgtatttaagagtggattcttctaccgttttgttcttggatgtcatataggaaactataaagtccgcactactgttaagaatgattactaacgcaactatatagttcaaattaagcattttggaaacataaaataactctgtagacgatacttgactttcgaataagtttgcagacaaacgaagaaagaacagacctctcttaatttcagaagaaaactttttttcgtattcctgacgtctagagtttatatcaataagaaagttaagaattagtcggttaatgttgtatttcattacccaagtttgagatttcataatattatcaaaagacatgataatattaaagataaagcgctgactatgaacgaaatagctatatggttcgctcaagaatatagtcttgttaaacgtggaaacgataactgtatttttaatcacgtcagcggcatctaaattaaatataggtatatttattccacacactctacaatatgccacaccatcttcataataaataaattcgttagcaaaattattaattttagtgaaatagttagcgtcaactttcatagcttccttcaatctaatttgatgctcacacggtgcgaattccactctaacatcccttttccatgcctcaggttcatcgatctctataatatctagttttttgcgtttcacaaacacaggctcgtctctcgcgatgagatctgtatagtaactatgtaaatgataactagatagaaagatgtagctatatagatgacgatcctttaagagaggtataataactttaccccaatcagatagactgttgttatggtcttcggaaaaagaatttttataaatttttccagtattttccaaatatacgtacttaacatctaaaaaatccttaatgataataggaatggataatccgtctattttataaagaaatacatatcgcacattatacttttttttggaaatgggaataccgatgtgtctacataaatatgcaaagtctaaatattttttagagaatcttagttggtccaaattcttttccaagtacggtaatagatttttcatattgaacggtatcttcttaatctctggttctagttccgcattaaatgatgaaactaagtcactatttttataactaacgattacatcacctctaacatcatcatttaccagaatactgatcttcttttgtcgtaaatacatgtctaatgtgttaaaaaaaagatcatacaagttatacgtcatttcatctgtggtattcttgtcattgaaggataaactcgtactaatctcttctttaacagcctgttcaaatttatatcctatatacgaaaaaatagcaaccagtgtttgatcatccgcgtcaatattctgttctatcgtagtgtataacaatcgtatatcttcttctgtgatagtcgatacgttataaaggttgataacgaaaatatttttatttcgtgaaataaagtcatcgtaggattttggacttatattcgcgtctagtagatatgcttttatttttggaatgatctcaattagaatagtctctttagagtccatttaaagttacaaacaactaggaaattggtttatgatgtataatttttttagtttttatagattctttattctatacttaaaaaatgaaaataaatacaaaggttcttgagggttgtgttaaattgaaagcgagaaataatcataaattatttcattatcgcgatatccgttaagtttgtatcgtaatggcgtggtcaattacgaataaagcggatactagtagcttcacaaagatggctgaaatcagagctcatctaaaaaatagcgctgaaaataaagataaaaacgaggatattttcccggaagatgtaataattccatctactaagcccaaaaccaaacgagccactactcctcgtaaaccagcggctactaaaagatcaaccaaaaaggaggaagtggaagaagaagtagttatagaggaatatcatcaaacaactgaaaaaaattctccatctcctggagtcagcgacattgtagaaagcgtggccgctgtagagctcgatgatagcgacggggatgatgaacctatggtacaagttgaagctggtaaagtaaatcatagtgctagaagcgatctctctgacctaaaggtggctaccgacaatatcgttaaagatcttaagaaaattattactagaatctctgcagtatcgacggttctagaggatgttcaagcagctggtatctctagacaatttacttctatgactaaagctattacaacactatctgatctagtcaccgagggaaaatctaaagttgttcgtaaaaaagttaaaacttgtaagaagtaaatgcgtgcacttttttataaagatggtaaactctttaccgataataattttttaaatcctgtatcagacgataatccagcgtatgaggttttgcaacatgttaaaattcctactcatttaacagatgtagtagtatatgaacaaacgtgggaggaggcgttaactagattaatttttgtgggaagcgattcaaaaggacgtagacaatacttttacggaaaaatgcatgtacagaatcgcaacgctaaaagagatcgtatttttgttagagtatataacgttatgaaacgaattaattgttttataaacaaaaatataaagaaatcgtccacagattccaattatcagttggcggtttttatgttaatggaaactatgttttttattagatttggtaaaatgaaatatcttaaggagaatgaaacagtagggttattaacactaaaaaataaacacatagaaataagtcccgatgaaatagttatcaagtttgtaggaaaggacaaagtttcacatgaatttgttgttcataagtctaatagactatataaaccgctattgaaactgacggatgattctagtcccgaagaatttctgttcaacaaactaagtgaacgaaaggtatatgaatgtatcaaacagtttggtattagaatcaaggatctccgaacgtatggagtcaattatacgtttttatataatttttggacaaatgtaaagtccatatctcctcttccatcaccaaaaaagttaatagcattaactatcaaacaaactgctgaagtggtaggtcatactccatcaatttcaaaaagagcttatatggcaacgactattttagaaatggtaaaggataaaaattttttagatgtagtatctaaaactacgttcgatgaattcctatctatagtcgtagatcacgttaaatcatctacggatggatgatatagatctttacacaaataattacaagaccgataaatggaaatggataagcgtatgaaatctctcgcaatgacagctttcttcggagagctaagcacattagatattatggcattgataatgtctatatttaaacgccatccaaacaataccattttttcagtggataaggatggtcagtttatgattgatttcgaatacgataattataaggcttctcaatatttggatctgaccctcactccgatatctggagatgaatgcaagactcacgcatcgagtatagccgaacaattggcgtgtgtggatattattaaagaggatattagcgaatatatcaaaactactccccgtcttaaacgatttataaaaaaataccgcaatagatcagatactcgcatcagtcgagatacagaaaagcttaaaatagctctagctaaaggcatagattacgaatatataaaagacgcttgttaataagtaaatgaaaaaaaactagtcgtttataataaaacacgatatggatgccaacgtagtatcatcttctactattgcgacgtatatagacgctttagcgaagaatgcttcagaattagaacagaggtctaccgcatacgaaataaataatgaattggaactagtatttattaagccgccattgattactttgacaaatgtagtgaatatctctacgattcaggaatcgtttattcgatttaccgttactaataaggaaggtgttaaaattagaactaagattccattatctaaggtacatggtctagatgtaaaaaatgtacagttagtagatgctatagataacatagtttgggaaaagaaatcattagtgacggaaaatcgtcttcacaaagaatgcttgttgagactatcgacagaggaacgtcatatatttttggattacaagaaatatggatcctctatccgactagaattagtcaatcttattcaagcaaaaacaaaaaactttacgatagactttaagctaaaatattttctaggatccggtgcccaatctaaaagttctttgttgcacgctattaatcatccaaagtcaaggcctaatacatctctggaaatagaattcacacctagagacaatgaaacagttccatatgatgaactaataaaggaattgacgactctctcgcgtcatatatttatggcttctccagagaatgtaattctttctccgcctattaacgcgcctataaaaacctttatgttgcctaaacaagatatagtaggtttggatctggaaaatctatatgccgtaactaagactgacggcattcctataactatcagagttacatcaaacgggttgtattgttattttacacatcttggttatattattagatatcctgttaagagaataatagattccgaagtagtagtctttggtgaggcagttaaggataagaactggaccgtatatctcattaagctaatagagcctgtgaatgcaatcaatgatagactagaagaaagtaagtatgttgaatctaaactagtggatatttgtgatcggatagtattcaagtcaaagaaatacgaaggtccgtttactacaactagtgaagtcgtcgatatgttatctacatatttaccaaagcaaccagaaggtgttattctgttctattcaaagggacctaaatctaacattgattttaaaattaaaaaggaaaatactatagaccaaactgcaaatgtagtatttaggtacatgtccagtgaaccaattatctttggagaatcgtctatctttgtagagtataagaaatttagcaacgataaaggctttcctaaagaatatggttctggtaagattgtgttatataacggcgttaattatctaaataatatctattgtttggaatatattaatacacataatgaagtgggtattaagtccgtggttgtacctattaagtttatagcagaattcttagttaatggagaaatacttaaacctagaattgataaaaccatgaaatatattaactcagaagattattatggaaatcaacataatatcatagtcgaacatttaagagatcaaagcatcaaaataggagatatctttaacgaggataaactatcggatgtgggacatcaatacgccaataatgataaatttagattaaatccagaagttagttattttacgaataaacgaactagaggaccgttgggaattttatcaaactacgtcaagactcttcttatttctatgtattgttccaaaacatttttagacgattccaacaaacgaaaggtattggcgattgattttggaaacggtgctgacctggaaaaatacttttatggagagattgcgttattggtagcgacggatccggatgctgatgctatagctagaggaaatgaaagatacaacaaattaaactctggaattaaaaccaagtactacaaatttgactacattcaggaaactattcgatccgatacatttgtctctagtgtcagagaagtattctattttggaaagtttaatatcatcgactggcagtttgctatccattattcttttcatccgagacattatgctaccgtcatgaataacttatccgaactaactgcttctggaggcaaggtattaatcactaccatggacggagacaaattatcaaaattaacagataaaaagacttttataattcataagaatttacctagtagcgaaaactatatgtctgtagaaaaaatagctgatgatagaatagtggtatataatccatcaacaatgtctactccaatgactgaatacattatcaaaaagaacgatatagtcagagtgtttaacgaatacggatttgttcttgtagataacgttgatttcgctacaattatagaacgaagtaaaaagtttattaatggcgcatctacaatggaagatagaccgtctacaaaaaactttttcgaactaaatagaggagccattaaatgtgaaggtttagatgtcgaagacttacttagttactatgttgtttatgtcttttctaagcggtaaataataatatggtatgggttctgatatccccgttctaaatgcattaaataattccaatagagcgatttttgttcctataggaccttccaactgtggatactctgtattgttaatagatatattaatacttttgtcgggtaacagaggttctacgtcttctaaaaataaaagttttataacatctggcctgttcataaataaaaacttggcgattctatatatactcttattatcaaatctagccattgtcttatagatgtgagctactgtaggtgtaccatttgattttctttctaatactatatatttctctcgaagaagttcttgcacatcatctgggaataaaatactactgttgagtaaatcagttattttttttatatcgatattgatggacatttttatagttaaggataataagtatcccaaagtcgataacgacgataacgaagtatttatacttttaggaaatcacaatgactttatcagattaaaattaacaaaattaaaggagcatgtatttttttctgaatatattgtgactccagatacatatggatctttatgcgtcgaattaaatgggtctagttttcagcacggtggtagatatatagaggtggaggaatttatagatgctggaagacaagttagatggtgttctacatccaatcatatatctaaagatatacccgaagatatgcacactgataaatttgtcatttatgatatatacacttttgacgctttcaagaataaacgattggtattcgtacaggtacctccgtcgttaggagatgatagtcatttgactaatccgttattgtctccgtattatcgtaattcagtagccagacaaatggtcaataatatgatttttaatcaagattcatttttaaaatatttattagaacatctgattagaagccactatagagtttctaaacatataacaatagttagatacaaggataccgaagaattaaatctaacgagaatatgttataatagagataagtttaaggcgtttgtattcgcttggtttaacggcgtttcggaaaatgaaaaggtactagatacgtataaaaaggtatctaatttgatataatgaattcagtgactgtatcacacgcgccatatactattacttatcacgatgattgggaaccagtaatgagtcaattggtagagttttataacgaagtagccagttggctgctacgagacgagacgtcgcctattcctgataagttctttatacagttgaaacaaccgcttagaaataaacgagtatgtgtgtgcggtatagatccgtatccgaaagatggaactggtgtaccgttcgaatcaccaaattttacaaaaaaatcaattaaggagatagcttcatctatatctagattaaccggagtaattgattataaaggttataaccttaatataatagacggggttataccctggaattattacttaagttgtaaattaggagaaacaaaaagtcacgcgatctactgggataagatttccaagttactgctgcagcatataactaaacacgttagtgttctttattgtttgggtaaaacagatttctcgaatatacgggcaaagttagaatccccggtaactaccatagtcggatatcatccagcggctagagaccgccaattcgagaaagatagatcatttgaaattatcaacgttttactggaattagacaacaaggcacctataaattgggctcaagggtttatttattaatgctttagtgaaattttaacttgtgttctaaatggatgcggctattagaggtaatgatgttatctttgttcttaagactataggtgtcccgtcagcgtgcagacaaaatgaagatccaagatttgtagaagcatttaaatgcgacgagttagaaagatatattgagaataatccagaatgtacactattcgaaagtcttagggatgaggaagcatactctatagtcagaattttcatggatgtagatttagacgcgtgtctagacgaaatagattatttaacggctattcaagattttattatcgaggtgtcaaactgtgtagctagattcgcgtttacagaatgcggtgccattcatgaaaatgtaataaaatccatgagatctaatttttcattgactaagtctacaaatagagataaaacaagttttcatattatctttttagacacgtataccactatggatacattgatagctatgaaacgaacactattagaattaagtagatcatctgaaaatccactaaccagatcgatagacactgccgtatataggagaaaaacaactcttcgggttgtaggtactaggaaaaatccaaattgcgacactattcatgtaatgcaaccaccgcatgataatatagaagattacctattcacttacgtggatatgaacaacaatagttattacttttctctacaacaacgattggaggatttagttcctgataagttatgggaaccagggtttatttcattcgaagacgctataaaaagagtttcaaaaatattcattaattctataataaactttaatgatctcgatgaaaataattttacaacggtaccactggtcatagattacgtaacaccttgtgcattatgtaaaaaacgatcgcataaacatccgcatcaactatcgttggaaaatggtgctattagaatttacaaaactggtaatccacatagttgtaaagttaaaattgttccgttggatggtaataaactgtttaatattgcacaaagaattttagacactaactctgttttattaaccgaacgaggagaccatatagtttggattaataattcatggaaatttaacagcgaagaacccttgataacaaaactaattttgtcaataagacatcaactacctaaggaatattcaagcgaattactctgtccgaggaaacgaaagactgtagaagctaacatacgagacatgttagtagattcagtggagaccgatacctatccggataaacttccgtttaaaaatggtgtattggacctggtagacggaatgttttactctggagatgatgctaaaaaatatacgtgtactgtatcaaccggatttaaatttgacgatacaaagttcgtcgaagacagtccagaaatggaagagttaatgaatatcattaacgatatccaaccattaacggatgaaaataagaaaaatagagagctatatgaaaaaacattatctagttgtttatgcggtgctaccaaaggatgtttaacattcttttttggagaaactgcaactggaaagtcgacaaccaaacgtttgttaaagtctgctatcggtgacctgtttgttgagacgggtcaaacaattttaacagatgtattggataaaggacctaatccatttatcgctaacatgcatttgaaaagatctgtattctgtagcgaactacctgattttgcatgtagtgggtcaaagaaaatcagatctgataatattaaaaagttgacagaaccttgtgtcattggaagaccgtgtttctccaataaaattaataatagaaaccatgcgacaatcattatcgatactaattacaaacctgtttttgataggatagataacgcattaatgagaagaattgccgtcgtgcgattcagaacacacttttctcaaccttctggtagagaggctgctgaaaataatgacgcgtacgataaagtcaaactattagacgaggggttagatggtaaaatacaaaataatagatatagattcgcatttctatacttgttggtgaaatggtacagaaaatatcatgttcctattatgaaactatatcctacacccgaagagattcctgactttgcattctatctcaaaataggtactctgttagtatctagctctgtaaagcatattccattaatgacggacctctccaaaaagggatatatattgtacgataatgtggttactcttccgttgactactttccaacagaaaatatccaagtattttaattctagactatttggacacgatatagagagcttcatcaatagacataagaaatttgccaatgttagtgatgaatatctgcaatatatattcatagaggatatttcatctccgtaaatatatgctcatatatttatagaagatatcacatatctaaatgaataccggaatcatagatttatttgataatcatgttgatagtataccaactatattacctcatcagttagctactctagattatctagttagaactatcatagatgagaacagaagcgtgttattgttccatattatgggatcaggtaaaacaataatcgctttgttgttcgccttggtagcttccagatttaaaaaggtttacattctagtgccgaacatcaacatcttaaaaattttcaattataatatgggtgtagctatgaacttgtttaatgacgaattcatagctgagaatatctttattcattccacaacaagtttttattctcttaattataacgataacgtcattaattataacggattatctcgctacaataactctatttttatcgttgatgaggcacataatatctttgggaataatactggagaacttatgaccgtgataaaaaataaaaacaagattccttttttactattgtctggatctcccattactaacacacctaatactctgggtcatattatagatttaatgtccgaagagacgatagattttggtgaaattattagtcgtggtaagaaagtaattcagacacttcttaacgaacgcggtgtgaatgtacttaaggatttgcttaaaggaagaatatcatattacgaaatgcctgataaagatctaccaacgataagatatcacggacgtaagtttctagatactagagtagtatattgtcacatgtctaaacttcaagagagagattatatgattactagacgacagctatgttatcatgaaatgtttgataaaaatatgtataacgtgtcaatggcagtattgggacaacttaatctgatgaataatttagatactttatttcaggaacaggataaggaattgtacccaaatctgaaaataaataatggcgtgttatacggagaagaattggtaacgttaaacattagttccaaatttaaatactttattaatcggatacagacactcaacggaaaacattttatatacttttctaattctacatatggcggattggtaattaaatatatcatgctcagtaatggatattctgaatataatggttctcagggaactaatccacatatgataaacggcaaaccaaaaacatttgctatcgttactagtaaaatgaaatcgtctttagaggatctattagatgtgtataattctcctgaaaacgatgatggtagtcaattgatgtttttgttttcatcaaacattatgtccgaatcctatactctaaaagaggtaaggcatatttggtttatgactatcccagatactttttctcaatacaaccaaattcttggacgatctattagaaaattctcttacgccgatatttctgaaccagttaatgtatatcttttagccgccgtatattccgatttcaatgacgaagtgacgtcattaaacgattacacacaggatgaattaattaatgttttaccatttgacatcaaaaagctgttgtatctaaaatttaagacgaaagaaacgaatagaatatactctattcttcaagagatgtctgaaacgtattctcttccaccacatccatcaattgtaaaagttttattgggagaattggtcagacaatttttttataataattctcgtattaagtataacgataccaagttacttaaaatggttacatcagttataaaaaataaagaagacgctaggaattacatagatgatattgtaaacggtcacttctttgtatcgaataaagtatttgataaatctcttttatacaaatacgaaaacgatattattacagtaccgtttagactttcctacgaaccatttgtttggggagttaactttcgtaaagaatataacgtggtatcttctccataaaactgatgagatatataaagaaataaatgtcgagctttgttaccaatggatacctttccgttacattggaaccacacgagctgacgttagacataaaaactaatattaggaatgccgtatataagacgtatctccatagagaaattagtggtaaaatggccaagaaaatagaaattcgtgaagacgtggaattacctctcggcgaaatagttaataattctgtagttataaacgttccgtgtgtaataacctacgcgtattatcacgttggggatatagtcagaggaacattaaacatcgaagatgaatcaaatgtaactattcaatgtggagatttaatctgtaaactaagtagagattcgggtactgtatcatttagcgattcaaagtactgcttttttcgaaatggtaatgcgtatgacaatggcagcgaagtcactgccgttctaatggaggctcaacaaggtatcgaatctagttttgtttttctcgcgaatatcgtcgactcataaaaaagagaatagcggtaagtataaacacgaatactatggcaataattgcgaatgttttattctcttcgatatatttttgataatatgaaaaacatgtctctctcaaatcggacaaccatctcataaaatagttctcgcgcgctggagaggtagttgccgctcgtataatctctccagaataatatacttgcgtgtcgtcgttcaatttatacggatttctatagttctctgttatataatgcggtttgccctcatgattagacgacgacaatagtgttctaaatttagatagttgatcagaatgaatgtttattggcgttggaaaaattatccatacagcgtctgcagagtggttgatagttgttcctagatatgtaaaataatccaacttactaggcagcaaattgtctagataaaatactgaatcaaacggtgcagacgtattggcggatctaatggaatccaattgattaactatcttttgaaaatatacatttttatgatccaatacttgtaagaatatagaaataatgataagtccatcatcgtgtttttttgcctcttcataagaactatattttttcttattccaatgaacaagattaatctctccagagtatttgtacacatctatcaagtgattggatccataatcgtcttcctttccccaatatatatgtagtgatgataacacatattcattggggagaaaccctccacttatatatcctcctttaaaattaatccttactagttttccagtgttctggatagtggttggtttcgactcattataatgtatgtctaacggcttcaatcgcgcgttagaaattgcttttttagtttctatattaataggagatagttgttgcggcatagtaaaaatgaaatgataactgtttaaaaatagctcttagtatgggaattacaatggatgaggaagtgatatttgaaactcctagagaattaatatctattaaacgaataaaagatattccaagatcaaaagacacgcatgtgtttgctgcgtgtataacaagtgacggatatccgttaataggagctagaagaacttcattcgcgttccaggcgatattatctcaacaaaattcagattctatctttagagtatccactaaactattacggtttatgtactacaatgaactaagagaaatctttagacggttgagaaaaggttctatcaacaatatcgatcctcactttgaagagttaatattattgggtggtaaactagataaaaaggaatctattaaagattgtttaagaagagaattaaaagaggaaagtgatgaacgtataacagtaaaagaatttggaaatgtaattctaaaacttacaacacgggataaattatttaataaagtatatataagttattgcatggcgtgttttattaatcaatcgttggaggatttatcgcatactagtatttacaatgtagaaattagaaagattaaatcattaaatgattgtattaacgacgataaatacgaatatctgtcttatatttataatatgctagttaatagtaaatgaacttttacagatctagtataattagtcagattattaagtataatagacgactagctaagtctattatttgcgaggatgactctcaaattattacactcacggcattcgttaaccaatgcctatggtgtcataaacgagtatccgtgtccgctattttattaactactgataacaaaatattagtatgtaacagacgagatagttttctctattctgaaataattagaactagaaacatgtttagaaagaaacgattatttctgaattattccaattatttgaacaaacaggaaagaagtatactatcgtcatttttttctctagatccagctactactgataatgatagaatagatgctatttatccgggtggcatacccaaaaggggtgagaatgttccagagtgtttatccagggaaattaaagaagaagttaatatagacaattcttttgtattcatagacactcggttttttattcatggcatcatagaagataccattattaataaattttttgaggtaatcttctttgtcggaagaatatctctaacgagtgatcaaatcattgatacatttaaaagtaatcatgaaatcaaggatctaatatttttagatccgaattcaggtaatggactccaatacgaaattgcaaaatatgctctagatactgcaaaacttaaatgttacggccatagaggatgttattatgaatcattaaaaaaattaactgaggatgattgattagaaaatataaattaatttaccatcgtgtatttttataacgggattgtccggcatatcatgtagatagttaccgtctacatcgtatactcgaccatctacgcctttaaatcctctatttattgacattaatctattagaattggaataccaaatattagtaccctcaattagtttattggtaatattttttttagacgatagatcgatggctcttgaaaccaaggttttccaaccggactcattgtcgatcggtgagaagtctttttcattagcatgaatccattctaatgatgtatgtttaaacactctaaacaattggacaaattcttttgatttgctttgaatgatttcaaataggtcttcgtctacagtaggcataccattagataatctagccattataaagtgcacgtttacatatctacgttctggaggagtaagaacgtgactattgagacgaatggctcttcctactatctgacgaagagacgcctcgttccatgtcatatctaaaatgaagatatcattaattgagaaaaaactaataccctcgcctccactagaagagaatacgcatgttttaatgcattctccgttagtgtttgattcttggttaaactcagccaccgccttgattctagtatcttttgttctagatgagaactctatattagagataccaaagactttgaaatatagtaataagatttctattcctgactgattaacaaatggttcaaagactagacatttaccatgggatgctaatattcccaaacatacatctataaatttgacgcttttctcttttaattcagtaaatagagagatatcagccgcactagcatcccctttcaatagttctccctttttaaaggtatctaatgcggatttagaaaactctctatctcttaatgaatttttaaaatcattatatagtgttgctatctcttgcgcgtattcgcccggatcacgattttgtctttcaggaaagctatcgaacgtaaacgtagtagccatacgtctcagaattctaaatgatgatatacctgtttttatttcagcgagtttagccttttgataaatttcttcttgctttttcgacatattaacgtatcgcattaatactgttttcttagcgaatgatgcagacccttctacgtcatcaaaaatagaaaactcgttattaactatatacgaacatagtcctcctagtttggagactaattctttttcatcgactagacgtttattctcaaatagtgattggtgttgtaaggatcctggtcgtagtaagttaaccaacatggtgaattcttgcacactattgacgataggtgtagccgataaacaaatcatcttatggttttttaacgcaatggtcttagataaaaaattatatactgaacgagtaggacggatcttaccatcttctttgattaatgatttagaaatgaagttatgacattcatcaatgatgacgcatattctactcttggaattaatagttttgatattagtaaaaaatttatttctaaaattttgatcatcgtaattaataaaaatacaatccttcgttatctctggagcgtatctgagtatagtgttcatccaaggatcttctatcaaagcctttttcaccaataagataatagcccaattcgtataaatatccttaagatgtttgagaatatatacagtagtcattgttttaccgacacccgtttcatggaacaataaaagagaatgcatactgtctaatcctaagaaaactcttgctacaaaatgttgataatccttgaggcgtactacgtccgaccccatcatttcaacgggcatattagtagttctgcgtaaggcataatcgatataggccgcgtgtgatttactcatttatgagtgataagtaataactatgttttaaaaatcacagcagtagtttaactagtcttctctgatgtttgttttcgatactttttgaatcagaagtcatactagaataaagcaacgagtgaacgtaatagagagcttcgtatactctattcgaaaactctaagaacttattaatgaattccgtatccactggattgtttaaaatactaaattgaacactgttcacatccttccaagaagaagacttagtgacggacttaacatgagacataaataaatccaaattttttttacaaacatcactagccaccataatggcgctatctttcaaccagctatcgcttacgcattttagcagtctaacatttttaaagagactacaatatattctcatagtatcgattacacctctaccgaataaagttggaagtttaataatacaatatttttcgtttacaaaatcaaataatggtcgaaacacgtcgaaggttaacatcttataatcgctaatgtatagattgttttcagtgagatgattattagatttaatagcatctcgttcacgtttgaacagtttattgcgtgcgctgaggtcggcaactacggcgtccgctttagtactcctcccataatactttacgctattaatctttaaaatttcatagactttatctagatcgctttctggtaacatgatatcatgtgtaaaaagttttaacatgtcggtcggcattctatttagatcattaactctagaaatctgaagaaagtaattagctccgtattccagactaggtaatgggcttttacctagagacagattaagttctggcaatgtttcataaaatggaagaaggacatgcgttccctcccggatattttttacaatttcatccatttacaactctatagtttgttttcattattattagttattatctcccataatcttggtaatacttaccccttgatcgtaagataccttatacaggtcattacatacaactaccaattgtttttgtacataatagattggatggttgacatccatggtggaataaactactcgaacagatagtttatctttccccctagatacattagccgtaatagttgtcggcctaaagaatatctttggtgtaaagttaaaagttagggttcttgttccattattgctttttgtcagtagttcattataaattctcgagatgggtccgttctctgaatatagaacatcatttccaaatctaacttctagtctagaaataatatcggtcttattcttaaaatctattcccttgatgaagggatcgttaatgaacaaatccttggcctttgattcggctgatctattatctccgttatagacgttacgttgactagtccaaagacttacaggaatagatgtatcgatgatgttgatactatgtgatatgtgagcaaagattgttctcttagtggcatcactatatgttccagtaatggcggaaaactttttagaaatgttatatataaaagaattttttcgtgttccaaacattagcagattagtatgaagataaacactcatattatcaggaacattatcaatttttacatacacatcagcatcttgaatagaaacgataccatcttctggaacctctacgatctcggcagactccggataaccagtcggtgggccatcgctaacaataactagatcatccaacaatctactcacatatgcatctatataatctttttcatcttgtgagtaccctggatacgaaataaatttattatccgtatttccataataaggtttagtataaacagagagagatgttgccgcatgaacttcagttacagtcgccgttggttggtttatttgacctattactctcctaggtttctctataaacgatggtttaatttgtacattcttaaccatatatccaataaagctcaattcaggaacataaacaaattctttgttgaacgtttcaaagtcgaacgaagagtcacgaataacgatatcggatactggattgaaggttaccgttacggtaatttttgaatcggatagtttaagactgctgaatgtatcttccacatcaaacggagttttaatataaacgtatactgtagatggttctttaatagtgtcattaggagttaggccaatagaaatatcattaagttcactagaatatccagagtgtttcaaagcaattgtattattgatacaattattatataattcttcgccctcaatttcccaaataacaccgttacacgaagagatagatacgtgattaatacatttatatccaacatatggtacgtaactgaatcttcccatacctttaacttctggaagttccaaactcagaaccaaatgattaagcgcagtaatatactgatccctaatttcgaagctagcgatagcctgattgtctggaccatcgtttgtcataactccggatagagaaatatattgcggcatatataaagttggaatttgactatcgactgcgaagacattagaccgtttaatagagtcatccccaccgatcaaagaattaatgatagtattattcattttctatttaaaatggaaaaagcttacaataaactccgtagagaaatatctataatttgtgagttttccttaaagtaacagcttccgtaaacgccgtctttatctcttagtaggtttattgtatttatgaccttttccttatcttcatagaatactaaaggcaacaaagaaatttttggttcttctctaagagctacgtgagacttaaccatagaagccaacgaatccctacatattttagaacagaaataccctacttcaccacccttgtatgtctcaatactaataggtctaaaaaccaaatcttgattacaaaaccaacacttatcaattacactatttgtcttaatagacacatctgccatagatttataatactttggtagtatacaagcgagtgcttcttctttagcgggcttaaagactgctttaggtgctgaaataaccacatctggaaggcttactcgcttagccatttaattacggaactatttttttatacttctaatgagcaagtagaaaacctctcatctacaaaaacgtactcgtgtccataatcctctaccatagttacacgttttttagatctcatatgtgctaaaaagttttcccatactaattggttactattatttttcgtataatttttaacagtttgaggttttagatttttagttacagaagtgatatcgaatattttatccaaaaagaatgaataattaattgtcttagaaggagtgttttcttggcaaaagaataccaagtgcttaaatatttctactacttcattaatcttttctgtactcagattcagtttctcatcttttacttgattgattatttcaaagactaacttataatcctttttatttattctctcgttagccttaagaaaactagatacaaaatttgcatctacatcatccgtggatatttgatttttttccatgatatccaagagttccgagataatttctccagaacattgatgagacaataatctccgcaatacatttctcaaatgaataagtttattagacacgtggaagtttgactttttttgtacctttgtacatttttgaaataccgactcgcaaaaaatacaatattcatatccttgttcagatactataccgttatgtctacaaccgctacataatcgtagattcatgttaacactctacgtatctcgtcgtccaatattttatataaaaacattttatttctagacgttgccagaaaatcctgtaatatttttagttttttgggctgtgaataaagtatcgccctaatattgttaccgtcttccgccaatatagtagttaaattatccgcacatgcagaagaacaccgcttaggcggattcagtacaatgttatatttttcgtaccaactcatttaaatatcataatctaaaatagttctgtaatatgtctagcgctaatatattgatcataatcctgtgcataaattaagatacaacaatgtctcgaaatcatcgacatggcttcttccatagttagaagatcgtcgtcaaagttagcaacgtgattcatcaacatttgctgttttgaggcagcaaatactgaaccgtcgccattcaaccattcataaaaaccatcgtctgaatccattgataatttcttgtactggtttttgagagctcgcatcaatctagcatttctagctcccggattgaaaacagaaagaggatcgtacatccagggtccattttctgtaaatagaatcgtataatgtcccttcaagaagatatcagacgatccacaatcaaagaattggtctccgagtttgtaacaaactgcggactttaacctatacatgataccgtttagcataatttctggtgatacgtcaatcggagtatcatctattagagatctaaagccggtgtaacattctccaccaaacatattcttattctgacgtcgttctacataaaacatcattgctccattaacgataacaggggaatgaacagcactacccatcacattagttcccaatggatcaatgtgtgtaactccagaacatcttccatagcctatgttaggaggagcgaacaccactcttccactattgccatcgaatgccatagaataaatatccttggaattgatagaaatcggactgtcggatgttgtgatcatcttcataggattaacaactatgtatggtgccgcctgaagtttcatatcgtaactgatgccgtttataggtctagccacagaaaccaacgtaggtctaaatccaactatagacaaaatagaagccaatatctgttcctcatctgtcataacttgagagcatccagtatgaataatcttcattagatggggatctaccgcatcatcatcgttacaataaaaaattcccattctaatgttcataattgcttttctaatcatggtatgcatgtttgctctctgaatctctgtggaaattagatctgatacacctgtaatcactatcggattatcctccgtaagacgattaaccaacaacatataattataagactttacttttctaaattcataaagttgctggattaggctataggtgtctccatgtacatacgcgttctcgagcgcaggaagtttaataccgaatagtgccatcagaataggatgaatatagtaattagtttctggttttctataaataaaagacaaatcttgtgaactagacatatcggtaaaatgcatggattggaatcgtgtagtcgacagaagaatatgatgattagatggagagtatattttatctaactctttgagttggtcaccgattctaggactagctcgagaatgaataagtactaaaggatgagtacatttcacagaaacactagcattgttcaatgtgctctttacatgggtaaggagttgaaatagctcgtttctatttgttctgacaatatttagtttattcataatgttaagcatatcctgaatagtaaagttagatgtgtcatacttgttagtagttagatatttagcaattgcattcccatcatttctcaatctcgtactccaatcatgcgtggatgctacttcgtcgatggaaaccatacaatcctttttgataggctgttgagattgattatttcctgcacgtttaggtttggtacgttgatttctagcccctgcggatataaagtcatcgtctacaatttgggacaatgaattgcatacactacaagacaaagatttatcagaagtgtgaatatgatcttcatctaccaaagaaagagtttgattagtataactagattttagtcctgcgttagatgttaaaaaaacatcgctattgaccacggcttccattatttatattcgtagtttttactcgaaagcgtgattttaatatccaatcttattacttttggaatcgttcaaaacctttgactaattgtagaatttgatctattgccctacgcgtatactcccttgcatcatatacgttcgtcaccagatcgtttgtttcggcctgaagttggtgcatatctctttcaacattcgacatgagatccttaagggccatatcgtctagattttgttgagatgctgctcctggatttggattttgttgtgctgttgtacatactgtaccaccagtaggtgtaggagtacatacagtggccacaataggaggttgaggaggtgtaaccgttggagtagtacaagaaatatttccatccgattgttgtgtacatgtagttgttggtaacgtctgagaaggttgggtagatggcggtgtcgtcgtcttttgatctttattaaatttagagataatatcctgaacagcattgctcggcgtcaacgctggaaggagtgaactcgccggcgcatcagtatctgcagacagccaatcaaaaagattagacatatcagatgatgtattagtttgttgtcgtggttttggtgtaggagcagtactactaggtagaagaataggagccggtgtagctgttggaaccggctgtggagttatatgaatagttggttgtagcggttggataggctgtctgctggcggccatcatattatctctagctagttgttctcgcaactgtctttgataatacgactcttgagactttagtcctatttcaatcgcttcatcctttttcgtatccggatccttttcttcagaataatagattgacgactttggtgtagaggattctgccagcctctgtgagaacttgttaaagaagtccatttaaggctttaaaattgaattgcgattataagattaaatggcagacacagacgatattatcgactatgaatccgatgatctcaccgaatacgaggatgatgaagaagaggaagaagatggagagtcactagaaactagtgatatagatcccaaatcttcttataagattgtagaatcagcatccactcatatagaagatgcgcattccaatcttaaacatatagggaatcatatatctgctcttaaacgacgctatactagacgtataagtctatttgaaatagcgggtataatagcagaaagctataacttgcttcaacgaggaagattacctctagtttcagaattttctgacgaaacgatgaagcaaaatatgctacatgtaattatacaagagatagaggagggttcttgtcctatagtcatcgaaaagaacggagaattgttgtcggtaaacgattttgacaaagatggtctaaaattccatctagactatattatcaaaatttggaaacttcaaaaacgatattagaatttatacgaatatcgttctctaaatgtcacaatcaagtctcgcatgttcagcaatttattgtcgtactttatatcgtgttcattaacgatattttgcaaaatagtaatgattctatcttccttcgatagatattcttcagagattattgtcttatattctttcttgttatccgatatgaatttgataagactttgaacattattgatacccgtctgtttaattttttctacagatattttagttttggcagattctatcgtatctgtcaatagacatccaacatcgacattcgacgtcaattgtctataaatcaacgtataaattttagaaataacattagcgaattgttgtgcattgatgtcgttattctgaaacagtatgattttaggtagcattttcttaacaaagagaacgtatttattgttactcagttgaacagatgatatatccagattactaacgcatctgattccgtataccaaactttcagaagaaatggtatacaattgtttgtattcattcaatgtctctttttcagaaattagtttagagtcgaatactgcaataattttcaagagatagttttcatcagataagattttatttagtgtagatatgataaaactattgttttgttggagaacttgatacgccgcgttctctgtagtcgacgctctcaaatgggaaacaatctccattatttttttggaatcggatactatatcttcggtatcttgacgcagtctagtatacatagagttaagagagattagagtttgtacattaagcaacatgtctctaaatgtggctacaaacttttcctttttcacatcatctagtttattatataccgatttcacaacggcaccagatttaaggaaccagaatgaaaaactctgataactacaatatttcatcatagttacgattttatcatcttctatagttggtgtaatagcgcatacctttttctccaagactggaaccaacgtcataaaaatgtttaaatcaaaatccatatcaacatctgatgcgctaagaccagtctcgcgttcaagattatctttactaatggtgacgaactcatcgtataaaactctaagtttgtccattatttatttacagatttagttgtttaatttatttgtgctcttccagagttgggatagtatttttctaacgtcggtattatattattaggatctacgttcatatgtatcataatattaatcatccacgttttgataaatctatctttagcttctgaaataacgtatttaaacaaaggagaaaaatatttagctacggcatcagacgcaataacattttttgtaaatgtaacgtatttagacgacagatcttcgttaaaaagttttccatctatgtagaatccatcggttgttaacaccattcccgcgtcagattgaataggagtttgaatagtttgttttggaaatagatccttcaataacttatagttgggtgggaaaaaatcgattttatcactagactctttcttttttactatcattacctcatgaactatttcttgaatgagtatatgtattttctttcctatatcggacgcgttcattggaaaatataccatgtcgttaactataagaatatttttatcctcgtttacaaactgaataatatcagatgtagttcgtaaacgaactatatcatcaccagcacaacatctaactatatgatatccactagtttcctttagccgtttattatcttgttccatattagcagtcattccatcatttaagaaggcgtcaaagataatagggagaaatgacattttggattctgttacgactttaccaaaattaaggatatacggacttactatctttttctcaacgtcaatttgatgaacacacgatgaaaatgtgcttctatgagattgatcatgtagaaaacaacaagggatacaatatttccgcatatcatgaaatatattaagaaatcccaccttattatatttccccaaaggatccatgcacgtaaacattatgccgttatcattaataaagacttctttctcatcggatctgtaaaagttgttactgatttttttcattccaggatctagataattaataatgatgggttttctattcttattctttgtattttggcatatcctagaccagtaaacagtttccactttggtaaaatcagcagacttttgaacgctattaaacatggcattaatggcaataactaaaaatgtaaaatatttttctatgttaggaatatggtttttcactttaatagatatatggtttttggccaaaatgatagatatttttttatccgaggatagtaaaatattattagtcgccgtctctataaaaatgaagctagtctcgatatccaattttattctagaattgataggagtcgccaaatgtaccttatacgttatatctcccttgatgcgttccatttgtgtatctatatcggacacaagatctgtaaatagttttacgttattaatcatcacggtatcgccgtcgctagataacgctaatgtaccatccaagtcccaaatggagagatttaactgttcatcgtttagaataaaatgattaccggtcatattaataaagtgttcatcgtatctagataacaacgacttataattaatgtccaagtcttgaactcgctgaatgatcttttttaacccagttagttttagattggtacgaaatatattgttaaactttgattctacagtaatgtccaaatctagttgtggaaatacttccatcaacattgtttcaaacttgataatattattatctacatcttcgtacgatccaaattccggaatagatgtatcgcacgctctggccacccagataaccaaaaagtcacacgctccaggatatacattgtataaaaagctatcgttttttagtagggtttttttctgcgtgtatacgaagggattaaaaatagtattatcaacgtaactatattccaaattattcttatgagaatagataataatatcgtccttaatatctaacaaatttcctaaatatccctttaattgagtcattcgaagcgtcaatagaatatgtctcttaactatttccggctgttgtatatttaaatgacttcgtaaaaaataatatatgggcgacttctcatctatgtaatcatatggagtgagatatagggctcgttctacctcctgccccttacccacctgtaataccaattgcggacttactatatatcgcatatttatatcgtggggtaaagtgaaaatctactaccgatgatgtaagtcttacaatgttcgaaccagtaccagatcttaatttggaggcctccgtagaactaggggaggtaaatatagatcaaacaacacctatgataaaggagaatagcggttttatatcccgcagtagacgtctattcgcccatagatctaaggatgatgagagaaaactagcactacgattctttttacaaagactttattttttagatcatagagagattcattatttgttcagatgcgttgacgctgtaaaagacgtcactattaccaaaaaaaataacattatcgtggcgccttatatagcacttttaactatcgcatcaaaaggatgcaaacttacagaaacaatgattgaagcattctttccagaactatataatgaacatagtaagaaatttaaattcaactctcaagtatccatcatccaagaaaaactcggataccagtttggaaactatcacgtttatgattttgaaccgtattactctacagtagctctggctattcgagatgaacattcatctggcatttttaatatccgtcaagagagttatctggtaagttcattatctgaaataacatatagattttatctaattaatctaaaatctgatcttgttcaatggagtgctagtacgggcgctgtaattaatcaaatggtaaatactgtattgattacagtgtatgaaaagttacaactggtcatagaaaatgattcacaatttacatgttcattggctgtggaatcaaaacttccaataaaattacttaaagatagaaatgaattatttacaaaattcattaacgagttaaaaaagaccagttcattcaagataagcaaacgcgataaggatacgctactaaaatattttacttaggactggagttagaatttatagacgactcatttcgtttatcattgttactattattactattactatcattattagtgttggcattattagtattcttcttgtcatcttgttcagaaatatacagcaatgctatacctaatactaaatacattatcatgctcgcaatggctctaacaacaacgaaccaaaatgaatttggtcgtagcttttgttcacaaaaatacataaagaaatgtctacataaatctatggcgccattggctacttgaaatagcgccagtcctcctacagattttaatatagctgtataacatgacatttattcatcatcaaaagagacagagtcaccatctgtcatatttagattttttttcatgtgttcaaagtatcctctactcatttcattataatagtttatcatacttagaattttaggacggatcaatgagtaagacttgactagatcgtcagtagtaatttgtgcatcgtctattctgcatccgcttcgtcgaataatgtatagcatcgctttgagattctccatagctatcaagtctttatacaatgacatggaaatatctgtgaatactttatacttctccaacatcgatgccttaacatcatcgcctactttagcattgaaaatacgttctattgtgtagatggatgtagcaagatttttaaacaacaatgccatcttacacgatgattgcctcaagtctccaatcgtttgtttagaacgattagctacagagtccaatgcttggctgactagcatattattatctttagaaattgtattcttcaatgaggcgtttatcatatctgtgatttcgttagtcatattacagtctgactgggttgtaatgttatccaacatatcacctatggatacggtacacgtaccagcatttgtaataatcctatctaagatgttgtatggcattgcgcagaaaatatcttctcctgtaatatctccactctcgataaatctactcagattattcttaaatgccttattctctggagaaaagatatcagtgtccatcatttcattaatagtatacgcagaaaagataccacgagtatcaattctatccaagatacttatcggttccgagtcacagataatggtttcctctccttcgggagatcctgcatagaaatatctaggacaatagtttctatactgtctgtaactctgataatctctaaagtcactaactgataccatgaaattgagaagatcaaacgctgaagtaattaatttttctgcctcgtttttactacaactagttttcatcaatgtagtgacgatgtattgtttagttacttttggtctaatactgatgatagagatattattgcttcccataatggatcttctagtagtcaccttaaagcccattgatgcgaatagcagatagataaagtcttggtatgactcctttctaatatagtacggactacctttgtcacccaactttatacccacataagccataacaacctctttaatagccgtttcatgaggtttatcagccatgagcctgagtagttggaagaatctcatgaatcccgtctcagaaagtcctatatgcatgatagatttatctttcctgggaaactctcgtatagtcatagatgaaatactctttaaagtttctgaaataagattagtaacagtcttacctccgactactctaggtaacaaacaaactctaataggtgttttctctgcggagataatatcagaaaggatagagcaataagtagtattattgtgattataaagaccgaatacataacaggtagaatttataaacatcatgtcctgaaggtttttagacttgtattcctcgtaatccataccgtcccaaaacatggatttggtaactttgatagccgtagatctttgttccttcgccaacaggttaaagaaattaataaagaatttgttgtttctatttatgtccacaaattgcacgtttggaagcgccacggttacattcactgcagcattttgaggatcgcgagtatgaagtacgatgttattgtttactggtatatctggaaagaaatctaccagtctaggaataagagattgatatcgcatagaaatagtaaagtttataatctcatcatcgaagagcattttgttaccattgtaataaatatccactctgtcatatgtataaatgaagtactgttcaaacatgatgagatgtttatatgttggcatagtagtgagatcgacgtttggtaatggcaatgtattaagattaactccataatgtctagcagcatctgcgatgttataagcgtcgtcaaagcggggtcgatcttgtattgttatatattgtctaacacctataagattatcaaaatcttgtctgcttaatacaccgttaacaatttttgccttgaattcttttattggtgcattaataacatccttatagaggatgttaaacaaataagtgttatcaaagttaagatctggatatttcttttctgctagaacatccattgagtcggagccatctggtttaatataaccaccgataaatctagctctgtattctgtatccgtcaatctaatattaagaaggtgttgagtgaaaggtggaagatcgtaaaagctgtgagtattaatgataggattagtttccgaactaatgttaattggggtattaataatatctatatttccagcgttaagtgtaacattaaacagttttaattcacgtgacgtggtatcaattaaataattaatgcccaatttggatatagcagcctgaagctcatcttgtttagttacggatcctaatgagttattaagcaatatatcgaacggatgaacgaaggttgttttaagttggtcacatactttgtaatctagacatagatgcggaagaacggtagaaactatacgaaataaatattcagagtcctctaattgatcaagagtaactattgacttaataggcatcatttatttagtattaaatgacgaccgtaccagtgacggatatacaaaacgatttaattacagagttttcagaagataattatccatctaacaaaaattatgaaataactcttcgtcaaatgtctattctaactcacgttaacaacgtggtagatagagaacataatgccgccgtagtgtcatctccagaggaaatatcctcacaacttaatgaagatctatttccagatgatgattcaccggccactattatcgaacgagtacaacctcatactactattattgacgatactccacctcctacgtttcgtagagagttattaatatcggaacaacgtcaacaacgagaaaaaagatttaatattacagtatcgaaaaatgctgaagcaataatggaatctagatctatgataacttctataccaacacaaacaccatccttgggagtagtttatgataaagataaaagaattcagatgttagaggatgaagtggttaatcttagaaatcaacgatctaatacaaaatcatctgataatttagataattttaccaaaatactatttggtaagactccgtacaaatcaacagaagttaataagcgtatagccatcgttaattatgcaaatttgaacgggtcccccttatcagtcgaggacttggatgtttgttcggaggatgaaatagatagaatctataaaacgattaaacaatatcacgaaagtagaaaacgaaaaattatcgtcactaacgtgattattattgtcataaacattatcgagcaggcattgctaaaactcggatttgaagaaatcaaaggactgagtaccgatatcacttcagaaattatcgatgtggagatcggagatgactgcgatgctgtagcatctaaactaggaatcggtaacagtccggttcttaatattgtattgtttatactcaagatattcgttaaacgaattaaaattatttaatttaatacattcccatatccagacaacaatcgtctggattaatctgttcctgtcgtctcataccggacgacatattaatctttttattagtgggcatctttttagatggtttctttttcccagcattaactgagtcgatacctagaagatcgtgattgatctctccgaccattccacgaacttctaattggccgtctctgacggtaccataaactattttaccagcattagtaacagcttggacaatctgaccatccatcgcattgtacgatgtagtagtaactgttgttctacgtctaggagcaccagaagtatttttggagcccttggatgttgatgtagaagaagacgaggattttgattttggtttacatgtaatacattttgaactctttgattttgtatcacatgcgccggcagtcacatctgtttgagaattaagattattgttgcctcctttgacggctgcatctccaccgatttgcgctagtagatttttaagctgtggtgtaatcttattaactgtttcgatataatcatcgtaactgcttctaacggctaaattttttttatccgccatttagaagctaaaaatatttttatttatgcagaagatttaactagattatacaatgaactaatatgatccttttccagattatttacaaacttggtattttttggttctggaggaggcgaatttaaattcggacttggattcggattttgtaagttcttgatcttattatacatcgagtataggatggcgacagtaactgctacacaaataccgatcaaaagaagaataccaatcatttattgacaataacttcactattgatcaagtatgcaatatatcatcttttcactaaataagtagtaataatgattcaacaatgtcgagatatatggacgataataatttagttcatggaaatatcgctatgattggtgtgaatgactccgctaactctgtggggtgcgcagtgctttccccacatagaataaattagcattccgactgtgataataataccaagtataaacgccataatactcaatactttccatgtacgagtgggactggtagacttactaaagtcaataaaggcgaagatacacgaaagaatcaaaagaatgattccagcgattagcacgccggaaaaataatttccaatcataagcatcatgtccatttaactaataaaaattttaaatcgccgaatgaacaaagtggaatataaaccatataaaaacaatagtttgtactgcaaaaataatatctatttttgttttcgaagatatggtaaaattaaatagtagtacacagcatgttataactaacagcagcaacggctcgtaattacttatcatttactagacgaaaaggtggtgggatattttcttgctcaaataatacgaatatatcacccatccattttatgcgatgtttatatactctaatctttaatagatctatagacgacgggtttaccaacaatatagattttatcgattcatctaatttaaacccttccttaaacgtgaatgatctattatctggcataacgatgaccctacctgatgaatcggacaatgtactgggccatgtagaataaattatcaacgaattatcgtctacgaacatttatatcatttgttttaattttaggacgcgaataaatggatataaaatagaaaataacagatattacaaccagtgttatggccgcgcccaaccaggtaggcagttttattttatcttttactacaggttctcctggatgtacgtcaccaacggcggacgtagttctagtacaattagacgtaagttccgcttgggaattttttaacgctaaagagttaacgttaatcgtgcacccaacgtatttacatctagttcgttgaacatcttgattataatataaccattttctatctctagattcgtcagtgcactcatgtaaccaacataccctaggtcctaaatatttatctccggaattagattttggataattcgcgcaccaacaatttctatttcctttatgatcgttacaaaagacgtataatgccgtatccccaaaagtaaaataatcaggacgaataattctaataaactcagaacaatatctcgcatccatatgtttggagcaaatatcggaataagtagacatagccggtttccgttttgcacgtaaccattctaaacaattggggtttccaggatcgtttctacaaaatccagtcatgaaatcgtcacaatgttctgtcttgtaattattattaaatatttttggacagtgtttggtatttgtcttagaacaacattttgccacgctatcactatcgcccaggagataatccttttttataaaatgacatcgttgcccggatgctatataatcagtagcgtgttttaaatccttaatatattcaggagttacctcgttctgataatagattaatgatccaggacgaaatttgaaagaactacatggttctccatgaattaatacatattgtttagcaaattcaggaactataaaactactacaatgatctatcgacataccatctatcaaacaaaacttgggtttaatttctcccggagatgtttcataatagtacgtataactttcttctgcaaacttaacagctctattatattcaggataattaaaacctaattccatatatttgtctcgtatatctgctattcctggtgctattttgattctattaagagtaacagctgcccccattcttaataatcgtcagtatttaaactgttaaatgttggtatatcaacatctaccttatttcccgcagtataaggtttgttgcaggtatactgttcaggaatggttacatttatacttcttctatagtcctgtctttcgatgttcatcacatatgcaaagaacagaataaacaaaataatgtaagaaataatattaaatatctgtgaattcgtaaatacattgattgccataataattacagcagctacaatacatacaatagacattcccacagtgttgccattacctccacgatacatttgagttactaagcaataggtaataactaagctagtaagaggcaatagaaaagatgagataaatatcatcaatatagagattagaggagggctatatagagccaagacgaacaaaatcaaaccgagtaacgttctaacatcattatttttgaagattcccaaataatcattcattcctccataatcgttttgcatcatacctccatctttaggcataaacgattgctgctgttcctctgtaaataaatctttatcaagcactccagcacccgcagagaagtcgtcaagcatattgtaatatcttaaataactcatttatatattaaaaaatgtcactattaaagatggagtataatctttatgccgaactaaaaaaaatgacttgtggtcaacccctaagtctttttaacgaagacggggatttcgtagaagttgaaccgggatcatcctttaagtttctgatacctaagggattttacgcctctccttccgtaaagacgagtctagtattcgagacattaacaacgaccgataataaaatcactagtatcaatccaacaaatgcgccaaagttatatcctcttcaacgcaaagtcgtatctgaagtagtttctaatatgaggaaaatgatcgaatcaaaacgtcctctatacattactcttcacttggcgtgtggatttggtaagactattaccacgtgttatcttatggctacacacggtagaaaaaccgtcatttgcgtacccaataaaatgttaatacatcaatggaagacacaggtagaggcagtcggattggaacataagatatccatagatggagtaagtagtctattaaaggaactaaagactcaaagtccggatgtattaatagtagtcagtagacatctgacaaacgatgccttttgtaaatatatcaataagcattatgatttgttcatcttggatgaatcacatacgtataatctgatgaacaatacagcagttacaagatttttagcgtattatcctccgatgatgtgttattttttaactgctacacctagaccatctaaccgaatttattgtaacagtattattaatattgccaagttatccaatctaaaaaaaactatctatgcagtagatagtttttttgagccatattccacagataatattagacatatggtaaaacgactagatggaccatctaataaatatcatatatataccgagaagttattatctgtagacgagcctagaaatcaacttattcttgataccctggtagaagaattcaagtcaggaactattaatcgcattttagttattactaaactacgtgaacatatggtattattctacaaacgattattagattttttcggaccagaggttgtatttataggagacgcccaaaatagacgtactccagatatggtcaaatcaatcaaggaactaaatagatttatattcgtatccaccttattttattccggtactggtttagatattcctagtttggattcgttgttcatttgctcggcagtaatcaacaatatgcaaatagagcaattactagggagggtatgtcgagaaacagaactattagataggacggtatatgtatttcctaacacatccatcaaagaaataaagtacatgataggaaatttcatgcaacgaattattagtctgtctgtagataaactaggatttaaacaaaaaagttatcggaaacatcaagaatccgatcccacttctgcatgtacaacatcatccagagaagaacgtgtattaaatagaatatttaactcgcaaaatcgttaagaagtttaagcgacgatccgcatgctgcgcaggccagtgtattacccctcatagtattaatataatccaatgatacttttgtgatgtcggaaatcttaaccaatttagactgacaggcagaacacgtcatgcaatcatcatcgtcatcgataactgtagtcttgggcttctttttgcgactcttcattccggaacgcacattggtgctatccatttaggtagtaaaaaataagtcagaatatgccctataacacgatcgtgcaaaacctggtatatcgtctctatctttatcacaatatagtgtatcgacatttttattattattgacctcgtttatcttggaacatggaatgggaacatttttgttatcaacggccatctttgccttaattccagatgttgtaaaattataactaaacagtctatcatcgacacaaatgaaattcttgtttagacgtttgtagtttacgtatgcggctcgttcgcgtctcattttttcagatattgcaggtactataatattaaaaataagaatgaaataacataggattaaaaataaagttatcatgacttctagcgctgatttaactaacttaaaagaattacttagtctgtacaaaagtttgagattttcagattctgcggctatagaaaagtataattctttggtagaatggggaacatctacttactggaaaataggcgtgcaaaaggtagctaatgtcgagacgtcaatatctgattattatgatgaggtaaaaaataaaccgtttaatattgatccgggctattacattttcttaccggtatattttgggagcgtctttatttattcgaagggtaaaaatatggtagaacttggatctggaaactcttttcaaataccagatgatatgcgaagtgcgtgtaacaaagtattagacagcgataacggaatagactttctgagatttgttttgttaaacaatagatggataatggaagatgctatatcaaaatatcagtctccagttaatatatttaaactagctagtgagtacggattaaacatacccaaatatttagaaattgaaatagaggaagacacattatttgacgacgagttatactctattatagaacgctctttcgatgataaatttccaaaaatatccatatcgtatattaagttgggagaacttagacggcaagttgtagactttttcaaattctcattcatgtatattgagtccatcaaggtagatcgtataggagataatatttttattcctagcgttataacaaaatcaggaaaaaagatattagtaaaagatgtagaccatttaatacgatccaaggttagagaacatacatttgtaaaagtaaaaaagaaaaacacattttccattttatacgactatgatggaaacggaacagaaactagaggagaagtaataaaacgaattatagacactataggacgagactattatgttaacggaaagtatttctctaaggttggtagtgcaggcttaaagcaattgactaataaattagatattaatgagtgcgcaactgtcgatgagttagttgatgagattaataaatccggaactgtaaaacgaaaaataaaaaaccaatcagcatttgatttaagcagagaatgtttgggatatccagaagcggattttataacgttagttaataacatgcggttcaaaatagaaaattgtaaggttgtaaatttcaatattgaaaatactaattgtttaaataacccgagtattgaaactatatatggaaactttaaccagttcgtctcaatctttaatgtcgtcaccgatgtcaaaaaaagattattcgagtgaaataatatgcgcctttgatataggtgcaaaaaatcctgccagaactgttttagaagtcaaggataactccgttagggtattggatatatcaaaattagactggagttctgattgggaaaggcgcatagctaaagatttgtcacaatatgaatacactacagttcttctagaacgtcagcctagaaggtcgccgtatgttaaatttatctattttattaaaggctttttatatcatacatcggctgccaaagttatttgcgtctcgcctgtcatgtctggtaattcatatagagatcgaaaaaagagatcggtcgaagcatttcttgattggatggacacattcggattgcgagactccgttccggatagacgcaaattagacgatgtagcggatagtttcaatttggctatgagatacgtattagataaatggaatactaattatacaccttataataggtgtaaatctagaaattacataaaaaaaatgtaataacgttagtaacgccattatggataatctatttacctttctacatgaaatagaagatagatatgccagaactatttttaactttcatctaataagttgcgatgaaataggagatatatatggtcttatgaaagaacgcatttccttagaggatatgtttgataatatagtgtataataaagatatacatcctgccattaagaaactagtgtattgcgacatccaacttactaaacacattattaatcagaatacgtatccggtatttaacgattcttcacaagtgaaatgttgtcattatttcgacataaactcagataatagcaatattagctctcgtacagtagagatatttgagagggaaaagtcatctcttgtatcatatattaaaactaccaataagaagagaaaggtcaattacggcgaaataaagaaaactgttcatggaggcactaatgcaaattacttttccggtaaaaagtctgacgagtatctgagtactacagttagatccaacattaatcaaccttggatcaaaaccatctctaagaggatgagagttgatatcattaatcactctatagtaacgcgtggaaaaagctctatattacaaactatagaaattatttttactaatagaacatgtgtgaaaatattcaaggattctactatgcacattattctatccaaggacaaggatgaaaaggggtgtatacacatgattgacaaattattctatgtctattataatttatttctgttgttcgaagatatcatccaaaacgagtactttaaagaagtagctaatgttgtaaaccacgtactcacggctacggcattagatgagaaattattcctaattaagaaaatggctgaacacgatgtttatggagttagcaatttcaaaatagggatgtttaacctgacatttattaagtcgttggatcataccgttttcccctctctgttagatgaggatagcaaaataaagttttttaaggggaaaaagctcaatattgtagcattacgatctctggaggattgtataaattacgtgactaaatccgagaatatgatagaaatgatgaaggaaagatcgactattttaaatagcatagatatagaaacggaatcggtagatcgtctaaaagaattgcttctaaaatgaaaaaaaacactgattcagaaatggatcaacgactcggatataagtttttggtgcctgatcctaaagccggagttttttatagaccgttacatttccaatatgtatcgtattctaattttatattgcatcgattgcatgaaatcttgaccgtcaagcggccactcttatcgtttaagaataatacagaacgaattatgatagaaattagcaatgttaaagtgactcctccagattactcacctataatcgcgagtattaaaggtaagagttatgacgcattagccacgttcactgtaaatatctttaaagaggtaatgaccaaagagggtatatccatcactaaaataagtagttatgagggaaaagattctcatttgataaaaattccgctactaataggatacgggaataaaaatccacttgatacagccaagtatcttgttcctaatgtcataggtggagtctttatcaataaacaatctgtcgaaaaagtaggaattaatctagtagaaaagattacaacatggccaaaatttagggttgttaagccaaactcattcactttctcgttttcctccgtatcccctcctaatgtattaccgacaagatatcgccattacaagatatctctggatatatcacaattggaagcgttgaatatatcatcgacaaagacatttataacggtcaatattgttttgctgtctcaatatttatctagagtgagtctagaattcattagacgtagtttatcatacgatatgcctccagaagttgtctatctagtaaacgcgataatagatagtgctaaacgaattactgaatctattactgactttaatattgatacatacattaatgacctggtggaagctgaacacattaaacaaaaatctcagttaacgattaacgagttcaaatatgaaatgctgcataactttttacctcatatgaactatacacccgatcaactaaagggattttatatgatatctttactaagaaagtttctctactgtatcttccacacttctagatatccagatagagattcgatggtttgtcatcgcatcctaacgtacggcaaatattttgagacgttggcacatgatgaattagagaattacataggcaacatccgaaacgatatcatgaacaatcacaagaacagaggcacttacgcggtaaacattcatgtactaacaactcccggacttaatcacgcgttttctagcttattgagtggaaagttcaaaaagtcagacggtagttatcgaacacatcctcactattcatggatgcagaatatttctattcctaggagtgttggattttatccggatcaagtaaagatttcaaagatgttttctgtcagaaaataccatccaagtcaatatctttacttttgttcatcagacgttccggaaagaggtcctcaggtaggtttagtatctcaattgtctgtcttgagttccattacaaatatactaacgtctgagtatttggatttggaaaagaaaatttgtgagtatatcagatcatattataaagatgatataagttactttgaaacaggatttccaatcactatagaaaatgctctagtcgcatctcttaatccaaatatgatatgtgattttgtaactgactttagacgtagaaaacggatgggattcttcggtaacttggaggtaggtattactttagttagggatcacatgaatgaaattcgcattaatattggagcgggaagattagtcagaccattcttggttgtggataacggagagctcatgatggatgtgtgtccggagttagaaagcagattagacgacatgacattctctgacattcagaaagagtttccgcatgtcatcgaaatggtagatatagaacaatttacttttagtaacgtatgtgaatcggttcaaaaatttagaatgatgtcaaaggatgaaagaaagcaatacgatttatgtgactttcctgccgaatttagagatggatatgtagcatcttcactagtgggaatcaatcacaattctggacccagagctattcttggatgtgctcaagctaaacaagctatctcttgtctgagttcggatatacgaaataaaatagacaatggaattcatttgatgtatccagagaggccaatcgtgattagtaaggctttagaaacttcaaagattgcggctaattgcttcggccaacatgttactatagcattaatgtcgtacaaaggtatcaatcaagaggatggaattatcatcaaaaaacaatttattcagagaggcggtctcgatatagttaccgcaaagaaacatcaagtagaaattccattggaaaactttaataacaaagaaagagataggtctaacgcctattcaaaattagaaagtaatggattagttagactgaatgctttcttggaatccggagacgctatggcacgaaatatctcatcaagaactcttgaagatgattttgctagagataatcagattagcttcgatgtttccgagaaatataccgatatgtacaaatctcgcgttgaacgagtacaagtagaacttactgacaaagttaaggtacgagtattaaccatgaaagaaagaagacccattctaggagacaaatttaccactagaacgagtcaaaagggaacagtcgcgtatgtcgcggatgaaacggaacttccatacgacgaaaatggtatcacaccagatgtcattattaattctacatccatcttctctagaaaaactatatctatgttgatagaagttattttaacagccgcatattctgctaagccgtacaacaataagggagaaaaccgacctgtctgttttcctagtagtaacgaaacatccatcgatacatatatgcaattcgctaaacaatgttatgagcattcaaatccgaaattgtccgatgaagaattatcggataaaatcttttgtgaaaagattctctatgatcctgaaacggataagccttatgcatccaaagtattttttggaccaatttattacttgcgtctgaggcatttaactcaggacaaggcaaccgttagatgtagaggtaaaaagacgaagctcattagacaggcgaatgagggacgaaaacgtggaggaggtatcaagttcggagaaatggagagagactgtttaatagcgcatggtgcagccaatactattacagaagttttgaaagattcggaagaagattatcaagatgtgtatgtttgtgaaaattgtggagacatagcagcacaaatcaagggtattaatacatgtcttagatgttcaaaacttaatctctctcctctcttaacaaaaattgataccacgcacgtatctaaagtatttcttactcaaatgaacgccagaggcgtaaaagtcaaattagatttcgaacgaaggcctccttcgttttataaaccattagataaagttgatctcaagccgtcttttctggtgtaatattctagtttggtagtagatacatatcaatatcatcaaattcgagatccgaattataaaatgggcgtggattgttaactatagaatcggacgtctgatattcgaaaatctgtggagtttcaggttttggtggaggtgtaactgctacttgggatactgaagtctgatattcagaaagctgtggatgttctggttcggcatccaccgatggtgtcacatcactaatcggttcggtaacgtctgtggatggaggtgctacttctacagaacctgtagcctcagttgtcaacggagatacatttttaatgcgagaaaatgtataatttggtaatggtttcttatgtggatctgaagaagaggtaagatatctactagaaagataccgatcacgttctagttctcttttgtagaacttaactttttctttctccgcatctagttgatattccaacctcttcacgttactacgttcagattccaattcacgttcgcatgggttacctccgcagtttttacgagcgatttcacgttcagccttcatgcgtctctccctctctctatcgagtttatcagagcagtctttctgaaggcgatcgaactccataaatttctccaacgctttgattgtttccatagatttccgaagttcagcttttaggactgtgattctttttctttcgaattcacagctggatgtacaaccgtttccattaccgccatctctaagtttcttttctagatcggcaacatttcatccccatgccttttacattcctcgagtctactgtcgtcgaaatatcgttccagctccttttcgacatcaataactttagcacgttgtctctcaagctctcttttgtagttatctgattccctggcacgtttaagatcttcatgcaattgagtcagctcttaacttcctctcttgcttcttcgtcatagtacgcgcaatcactgtgagatccattgttaccacgtctacactcggcgagctcgcgtttaagagattcaatttcccgtttgtattggtccatgtttccattgctaccaccattagatttacaggctgctagttgtcgttcgagatcagaaatacgggttttcttggaattgatttcgtcgatgtacttggcatcgaaacacttattaagttctttttccaattctacgattttatttctttcgcgagtcaattccctcctgtagtaactatctgttttgtcagattcacgctctctacgtagactttcttgcaagttactaatttgttccctagcacgtccgagtttagttttatatgctgaatagagttctgattcatcctttgagcagatctctagcgatcgtttaagattcctaattctagtctttagcctatttacctcctcagaagatgttccgttaccgttgcgtttacactcgttaagctgtctatcaagatccatgattctatctctaagacgttgcatctctctttccatatcagcattgctttcattattacgtctgcagtcactcaactgtctttcaatatctgagattctatctctaagacgtcgcatctctctctgtttcggcattggtttcattattacgtctacagtcgttcaactgtctttcaagatctgatattctagattggagtctgctaatctctgtagcattttcacggcattcactcagttgtctttcaagatctgaaattttagattggagtctgctaatctctgtaagatttcctcctccgctctcgatgcagtcggtcaacttattctctagttctctaatacgcgaacgcagtgcatcaacttcttgcgtgtcttcctggttgcgtgtacattcatcgagtctagattcgagatctctaacgcgtcgtcgttcttcctcaagttctctgcgtactacagaaagcgtgtccctatcttgttgatatttagcaatttctgattctagagtactgattttgcttacgtagttactaatatttgtcttggccttatcaagatcctccttgtatttgtcgcattccttgatatccctacgaagtctggacagttcccattcgacattacgacgtttatcgatttcagctcggagatcgtcatcgcgttgttttagccacatacgactgagttcaagttctcgttgacaagatccatctacttttccattcctaatagtatccagttccttttctagttctgaacgcatttctcgttccctatcaagcgattctctcaattctcggatagtcttcttatcaatttctaataaatctgaaccatcatctgtcccattttgaatatccctgtgttctttgatctcttttgtaagtcggtcgattctttcggttttataaacagaatccctttccaaagtcctaatcttactgagtttatcactaagttctgcattcaattcggtgagttttctcttggcttcttccaactctgttttaaactctccactatttccgcattcttcctcgcatttatctaaccattcaattagtttattaataactagttggtaatcagcgattcctatagccgttcttgtaattgtgggaacataattaggatcttctaatggattgtatggcttgatagcatcatctttatcattattagggggatggacaaccttaattggttggtcctcatctcctccagtagcgtgtggttcttcaataccagtgttagtaataggcttaggcaaatgcttgtcgtacgcgggcacttcctcatccatcaagtatttataatcgggttctacttcagaatattcttttctaagagacgcgacttcgggagttagtagaagaactctgtttctgtatctatcaacgctggaatcaatactcaagttaaggatagcgaatacctcatcgtcatcatccgtatcttctgaaacaccatcatatgacatttcatgaagtctaacgtattgataaatagaatcagatttagtattaaacagatccttaacctttttagtaaacgcatatgtatattttagatctccagatttcataatatgatcacatgccttaaatgtcagtgcttccatgatataatctggaacactaatgggtgacgaaaaagatacagcaccatatgctacgttgataaataaatctgaaccactaagtagataatgattaatgttaagaaagaggaaatattcagtgtataggtatgtcttggcgtcatatcttgtactaaacacgctaaacagtttgttaatgtgatcaatttccaatagattaattagagcagcgggaataccaacaaacatattaccacatccgtattttctatgaatatcacatatcatgttaaaaaatcttgatagaagagcgaatatctcgtctgacttaatgagtcgtagttcagcagcaacataagtcataactgtaaatagaacatactttcctgtagtgttgattctagactccacatcaacaccattattaaaaatagttttatatacatctttaatctgctctccgttaatcgtcgaacgttctagtatacggaaacactttgatttcttatctgtagttaatgacttagtgatatcacgaagaatattacgaattacatttcttgtttttcttgagagacctgattcagaactcaactcatcgttccatagtttttctacctcagtggcgaaatctttggagtgcttggtacatttttcaataaggttcgtgacctccatttattataaaaaatttattcaaaacttaactacaatcgggtaattataaaatcgtagatctcccatgtggcggaatactaccatctatcgcatgtggatggacagtaggtaatggccatgggaacagtaatgtttgcatatttatctttcttgccagtattactgcatattgtcccaatgtttcgatgtgatgttctaacctatcaactgccgctgtatcacaacaatagtgtccgatgaaattaagattatgatccaatgtgtttaatatatgattatcaagtcttatacgatccgcgtcttttttgacaggatcaggttcttctacaggaagaagtttcggcctcttatgatattcatgtctgggaaacggtggtctagggtgaggctccggtatcggagtgggttttggattataatcatcatcgtctatgacatcatcttcgacttcgatatttattttgctatcttgatgatgtcctgtatcagttgcattttcagcactcgactgaatattagcgcattcattgtctattattaccatatttctaaacccaaaatgtatgtgttgaacatcagtactatcgttgatgagtcttatagcatgaattcgcttatcgttatcgggtttatcttctgtcaccttagcaattccttttttattaaactctacataatcatatccatttctattgtttgttctaatataaacgagtatagcatcattgctaaatttttcaatagtatcaaaaacagaatatcctaaaccatataatatatattcaggaacactcaaactaaatgtccaggattctcctaaatacgtaaactttaatagtgcgaaatcattcaaaaatctaccacttatagatagatagtacataaatgcgtatagtagtctacctatctctttattatgaaaaccggcattacgatcatatatgtcgtgatatacctgtgatccgtttacgttaaaccataaatacatgggtgatcctataaacatgaatttatttctaattctcagagctatagttaattgaccgtgtaatatttgcttacatgcatacttgatacgcttattaataagatttttatcattgctcgttatttcagaatcgtatatataaggagtaccatcgtgattcttaccagatattatacaaaatactatatataaaatatattgaccaacgttagtaatcatataaatgtttaacgttttaaattttgtattcaatgatccattatcatacgctagcatggtcttatgatattcattctttaaaatataatattgtgttagccattgcattggggctcctaatggagattttttattctcatccattttaggataggctttcataaagtccctaataacttcgtgaataatgtttctatgttttctactgatgcatgtatttgcttcgatttttttatcccatgtttcatctatcatagatttaaacgcagtaatgctcgcaacattaacatcttgaaccgttggtacaattccgttccataaatttataatgttcgccatttatataactcattttttgaatatacttttaattaacaaaagagttaagttactcatatggacgccgtccagtctgaacatcaatctttttagccagagatatcatagccgctcttagagtttcagcgtgattttccaacctaaatagaacttcatcgttgcgtttacaacacttttctatttgttcaaactttgttgttacattagtaatctttttttccaaattagttagccgttgtttgagagtttcctcattgtcgtctccatcggctttaacaattgcttcgcgtttagcctctggctttttagcagcctttgtagaaaaaaattcagttgctggaattgcaagatcgtcatctccggggaaaagagttccgtccatttaaagtacagattttagaaactgacactctgcgttatttatatttggtacaacacatggattataaatattgatgttaataacatcagaaaatgtaaagtctatacattgttgcatcgtgttaaattttctaatggatctagtattattgggtccaacttctgcctgaaatccaaatatggaagcggatacaaaaccgtttcctggataaaccacacatctccacttttgctttacatcagaaattgtgtcgttgacatcttgaactctcctatctaatgccggtgttccacctatagattttgaatattcgaatgctgcatgagtagcattaaattccttaatattgccataattttcatatattgagtaaccctggataaaaagtaaacacaccgcagccgtcgctaccacaataaaaaaaattgatagagagttcatttataatctattagaagctgacaaaatttttttacacgcatcagacaatgctttaataaatagttcaacatctacttttgtcatatcgaaccgatggtatgattctaacctagaattacatccgaaaaagttgactatgttcatagtcattaagtcattaacaaacaacattccagactctggattataagacgatactgtttcgtcacaattacctaccttaatcatgtgattatgaatattggctattagagcaccttctaagaaatctataatatctttgaaacacgatttaaaatcaaaccacgaatatacttctacgaagaaagttagtttacccataggagaaataactataaatggagatctaaatacaaaatccggatctatgatagttttaacattattatattctctattaaatacctccacatctaaaaatgttaattttgaaactatgtcttcgtttattaccgtacctgaactaaacgctataagctctattgtttgagaactctttaaacgatattcttgaaatacatgtaacaaagtttcctttaactcggtcggtttatctaccatagttacagaatttgtatccttatctataatataataatcaaaatcgtataaagttatataattatcgcgttcagattgggatcttttcaaatagactaaaaaccccatttctctagtaagtatcttatgtatatgtttgtaaaatatcttcatggtgggaatatgctctaccgcagttagccattcctcattgacagcggtagatgtattagacaaaactattccaatgtttaacaagggccattttacgagattattaaatccttgtttgataaatgtagccaatgagggttcgagttcaacgacgattgaattctcttcccgcggatgctgcatgatgaacgacgggatgttgttcgattgatttggaattctttttcgactttttgtttatattaaatattttaaaatttatagcggatagcaattcatgtaccacggataatgtagacgcgtattgcgcatcgatatctttattattagataaatttatcaataaatgtgagaagtttgcctcgttaaggtcttccatttaaatattatataaacatttgtgtttgtaacttattcgtcttttatggaatagttttttactagtaaagctgcaattacacactttgtccgtaaaacataaatataaacaccagcttttatcaatcgttccaaaaagtcgacggcggacatttttaacatggcatctattttaaatacacttaggtttttggaaaaaacatcattttataattgtaacgattcaataactaaagaaaagattaagattaaacataagggaatgtcatttgtattttataagccaaagcattctaccgttgttaaatacttgtctggaggaggtatatatcatgatgatttggttgtattggggaaggtaacaattaataatctaaagatgatgctattttacatggatttatcatatcatggagtgacaagtagtggagcaatttacaaattgggatcgtctatcgatagactttctctaaataggactattgttacaaaagttaataattatgatgatacattttttgacgacgatgattgatcgctattgcacaattttgtttttgtactttctaatatagtgtttaggttctttttcatatgagaatattgatttactaaaatatctatgtttaacttttgttctatgacgtccttatcggcggtatcggtacatatacgtaattcaccttcacaaaatacggagtcttcgataataatagccaatcgattattggatctagctgtctgtatcatattcaacatgtttaatatatcctttcgtttcccctttacaggcatcgatcgtagcatattttccgcgtctgatatggaaatgttaaaactacaaaaatgcgtaatgttagcccgtcctaatattggtacgtgtctataagtttggcatagtagaataatagacgtgtttaaatgccttccaaagtttaagaattctattagagtattgcattttgatagtttatcgcctacatcatcaaaaataagtaaaaagtgtgctgattttttatgattttgtgcgacagcaatacatttttctatgttacttttagttcgtatcagattatattctagagattcctgactactaacgaaattaatatgatttggccaaatgtatccatcataatctgggttataaacgggtgtaaacaagaatatatgtttatattttttaactagtgtagaaaacagagatagtaaatagatagtttttccagatccagatcctcctgttaaaaccattctaaacggcatttttaataaattttctcttgaaaattgtttttcttggaaacaattcataattatatttacagttactaaattaatttgataataaatcaaaatatggaaaactaaggttgttagtagggaggagaacaaagaaggcacatcgtgatataaataacatttattatcatgatgacaccagaaaacgacgaagagcagacatctgtgttctccgctactgtttacggagacaaaattcagggaaagaataaacgcaaacgcgtgattggtctatgtattagaatatctatggttatttcactactatctatgattaccatgtccgcgtttctcatagtgcgcctaaatcaatgcatgtctgctaacgaggctgctattactgacgccgctgttgccgttgctgctgcatcatctactcatagaaaggttgcgtctagcactacgcaatatgatcacaaagaaagctgtaatggtttatattaccagggttcttgttatatattacattcagactaccagttattctcggatgctaaagcaaattgcactgcggaatcatcaacactacccaataaatccgatgtcttgactacctggctcattgattatgttgaggatacatggggatctgatggtaatccaattacaaaaactacatccgattatcaagattctgatgtatcacaagaagttagaaagtatttttgtgttaaaacaatgaactaatatttatttttgtacattaataaatgaaatcgcttaatagacaaactgtaagtaggtttaagaagttgtcggtgccggccgctataatgatgatactctcaaccattattagtggcataggaacatttctgcattacaaagaagaactgatgcctagtgcttgcgccaatggatggatacaatacgataaacattgttatttagatactaacattaaaatgtctacagataatgcggtttatcagtgtcgtaaattacgagctagattgcctagacctgatactagacatctgagagtattgtttagtattttttataaagattattgggtaagtttaaaaaagaccaatgataaatggttagatattaataatgataaagatatagatattagtaaattaacaaattttaaacaactaaacagtacgacggatgctgaagcgtgttatatatacaagtctggaaaactggttaaaacagtatgtaaaagtactcaatctgtactatgtgttaaaaaattctacaagtgacaacaaaaaatgaattaataataagtcgttaacgtacgccgccatggacgccgcgtttgttattactccaatgggtgtgttgactataacagatacattgtatgatgatctcgatatctcaatcatggactttataggaccatacattataggtaacataaaaactgtccaaatagatgtacgggatataaaatattccgacatgcaaaaatgctactttagctataagggtaaaatagttcctcaggattctaatgatttggctagattcaacatttatagcatttgtgccgcatacagatcaaaaaataccatcatcatagcatgcgactatgatatcatgttagatatagaagataaacatcagccattttatctattcccatctattgatgtttttaacgctacaatcatagaagcgtataacctgtatacagctggagattatcatctaatcatcaatccttcagataatctgaaaatgaaattgtcgtttaattcttcattctgcatatcagacggcaatggatggatcataattgatgggaaatgcaatagtaattttttatcataaaagttgtaaagtaaataataaaacaataaatattgaactagtagtacgtatattgagcaatcagaaatgatgctggtacctcttatcacggtgaccgtagttgcgggaacaatattagtatgttatatattatatatttgtaggaaaaagatacgtactgtctataatgacaataaaattatcatgacaaaattaaaaaagataaagagttctaattccagcaaatctagtaaatcaactgatagcgaatcagactgggaggatcactgtagtgctatggaacaaaacaatgacgtagataatatttctaggaatgagatattggacgatgatagcttcgctggtagtttaatatgggataacgaatccaatgttatggcgcctagcacagaacacatttacgatagtgttgctggaagcacgctgctaataaataatgatcgtaatgaacagactatttatcagaacactacagtagtaattaatgaaacggagactgttgaagtacttaatgaagataccaaacagaatcctaactattcatccaatcctttcgtaaattataataaaaccagtatttgtagcaagtcaaatccgtttattacagaacttaacaataaatttagtgagaataatccgtttagacgagcacatagcgatgattatcttaataagcaagaacaagatcatgaacacgatgatatagaatcatcggtcgtatcattggtgtgattagtttcctttttataaaattgaagtaatatttagtattattgctgccgtcacgttgtacaaatggagatattccctgtattcggcatttctaaaattagcaattttattgctaataatgactgtagatattatatagatacagaacatcaaaaaattatatctgatgagatcaatagacagatggatgaaacggtacttcttaccaacatcttaagcgtagaagttgtaaatgacaatgagatgtaccatcttattcctcatagattatcgacgattatactctgtattagttctgtcggaggatgtgttatctctatagataatgacgtcaatggcaaaaatattctaacctttcccattgatcatgctgtaatcatatccccactgagtaaatgtgtcgtagttagcaagggtcctacaaccatattggttgttaaagcggatatacctagcaaacgattggtaacatcgtttacaaacgacatactatatgtaaacaatctgtcactgattaattatttgccgttgtctgtattcattattagacgagtcaccgactatttggatagacacatatgcgatcagatatttgctaataataagtggtattcccttataaccatcgacgataagcaatatcctattccatcaaactgtataggtatgtcctctgccaagtacataaattctagcatcgagcaagatactttaatccatgtttgtaacctcgagcatccgttcgactcagtatacaaaaaaatgcagtcgtacaattctctacctatcaaggaacaaatattgtacggtagaattgataatataaatatgagcattagtatttctgtggattaatagatttctagtatggggatcattaatcatctctaatctctaaatacctcataaaacgaaaaaaaagctattatcaaatactgtacggaatggattcattctcttctctttttatgaaactctgttgtatatctactgataaaactggaagcaaaaaatctgatagaaagaataagaataagatcaaggattatatggaacacgattattataaaataacaatagttcctggttcctcttccacgtctactagctcgtggtattatacacatgcctagtaatagtctctttgcgttgacggaaagcagactagaaataacaggctaaaatgttcagacaccataatagttcccaacccagataataacagagttccatcaacacattcctttaaactcaatcccaaacccaaaaccgttaaaatgtatccggccaattgatagtagataatgaggtgtacagcgcatgataatttacacagtaaccaaaatgaaaacactttagtaattataagaaatatagacggtaatgtcatcatcaacaatccgataatatgcctgagagtaaacattgatggataaaacaaaaatgctccgcataactctatcatggcaataacacaaccaaacacttgtaaaattcctaaattagtagaaaatacaacgaatatcgatgtataagtgatctcgagaaataataagaataaagtaatgcccgtaaagataaacatcaacattgtttggtaatcattaaaccaattagtatgaagttgaactaatttcacagtagattttattccagtgttatcctcgcatgtataagtacctggtaagatatctttatattccataatcaatgagacatcactatctgataacgaatgaagtctagcactagtatgccatttacttaatattgtcgtcttggaagttttattataagttaaaatatcatggttatccaatttccatctaatatactttgtcggattatctatagtacacggaataatgatggtatcattacatgctgtatactctatggtctttgtagttgttataacaaccaacgtatagaggtatatcaacgatattctaactcttgacattttttatttatttaaaatgatacctttgttatttattttattctattttgctaacggtattgaatggcataagtttgaaacgagtgaagaaataatttctacttacttattagacgacgtattatacacgggtgttaatggggcggtatacacattttcaaataataaactaaacaaaactggtttaactaataataattatataacaacatctataaaagtagaggatgcggataaggatacattagtatgcggaaccaataacggaaatcccaaatgttggaaaatagacggttcagacgacccaaaacatagaggtagaggatacgctccttatcaaaatagcaaagtaacgataatcagtcacaacggatgtgtactatctgacataaacatatcaaaagaaggaattaaacgatggagaagatttgacggaccatgtggttatgatttattcacggcggataacgtaattccaaaagatggtttacgaggagcattcgtcgataaagacggtacttatgacaaagtttacattcttttcactgatactatcggctcaaagagaattgtcaaaattccgtatatagcacaaatgtgcctaaacgacgaaggtggtccatcatcattgtctagtcatagatggtcgacgtttctcaaagtcgaattagaatgtgatatcgacggaagaagttatagacaaattattcattctagaactataaaaacagataatgatacgatactatatgtattcttcgatagtccttattccaagtccgcattatgtacctattctatgaataccattaaacaatctttttctacgtcaaaattggaaggatatacaaagcaattgccgtctccagctcctggtatatgtttaccagctggaaaagttgttccacataccacgtttgaagtcatagaacaatataatgtactagatgatattataaagcctttatctaaccaacctatcttcgaaggaccgtctggtgttaaatggttcgatataaaggagaaggaaaatgaacatcgggaatatagaatatacttcataaaagaaaattctatatattcgttcgatacaaaatctaaacaaactcgtagctcgcaagtcgatgcgcgactattttcagtaatggtaactgcgaaaccgttatttatagcagatatagggataggagtaggaatgccacaaatgaaaaaaatacttaaaatgtaatcttaatcgagtacaccacacgacaatgaacaaacataagacagattatgctggttatgcttgctgcgtaatatgcggtctaattgtcggaattatttttacagcgacactattaaaagttgtagaacgtaaattagttcatacaccattaatagataaaacgataaaagatgcatatattagagaagattgtcctactgactggataagctataataataaatgtatccatttatctactgatcgaaaaacctgggaggaaggacgtaatgcatgcaaagctctaaattcaaattcggatctaattaagatagagactccaaacgagttaagttttttaagaagccttagacgaggctattgggtaggagaatccgaaatattaaaccagacaaccccatataattttatagctaagaatgccacgaagaatggaactaaaaaacggaaatatatttgtagcacaacgaatactcccaaactgcattcgtgttacactatataacaattacactacatttttatcataccactacttcggttagatgttttagaaaaaaataaatatcgccgtaccgttcttgtttttataaaaataacaattaacaattatcaaattttttctttaatattttacgtggttgaccattcttggtggtaaaataatctcttagtgttggaatggaatgctgtttaatgtttccacactcatcgtatattttgacgtatgtagtcacatcgtttacgcaatagtcagactgtagttctatcatgcttcctacatcagaaggaggaacagttttaaagtctcttggttttaatctattaccgttagttttcatgaaatcctttgttttatccacttcacattttaaataaatgtccactatacattcttttgttaattttactagatcgtcatgggtcatagaatttataggttccgtagtccatggatccaaactagcaaacttcgcgtatacggtatcgcgattagtgtatacaccaactgtatgaaaattaagaaaacagtttaataaatcaacagaaatatttaatcctccgtttgatacagatgcgccatatttatggatttcggattcacacgttgtttgtctgaggtgttcgtctagtgttgcttctacgtaaacttcgattcccatatattctttattgtcagaatcgcataccgatttatcatcatacactgtttgaaaactaaatggtatacacatcaaaataataaataataacgagtacattctgcaatattgttatcgtaattggaaaaatagtgttcgagtgagttggattatgtgagtattggattgtatattttattttatattttgtaataagaataaaatgctaatgtcaagtttattccaatagatgtcttattaaaaacatatataataaataacaatggctgaatggcataaaattatcgaggatatctcaaaaaataataagttcgaggatgccgccatcgttgattacaagactacaaagaatgttctagctgctattcctaacagaacatttgccaagattaatccgggtgaaattattcctctcatcactaatcgtaatattctaaaacctcttattggtcagaaatattgtattgtatatactaactctctaatggatgagaacacgtatgctatggagttgcttactgggtacgcccctgtatctccgatcgttatagcgagaactcataccgcacttatatttttgatgggtaagccaacaacatccagacgtgacgtgtatagaacgtgtagagatcacgctacccgtgtacgtgcaactggtaattaaaataaaaagtaatattcatatgtagtgtcaattttaaatgatgatgatgaaatggataatatccatattgacgatgtcaataatgccggtattggcatacagttcatcgatttttagatttcattcagaggatgtggaattatgttatgggcatttgtattttgataggatctataatgtagtaaatataaaatataatccgcatattccatatagatataattttattaatcgcacgttaaccgtagatgaactagacgataatgtcttttttacacatggttattttttaaaacacaaatatggttcacttaatcctagtttgattgtctcattatcaggaaacttaaaatataatgatatacaatgctcagtaaatgtatcgtgtctcattaaaaatttggcaacgagtacatctactatattaacatctaaacataagacttattctctacatcggtccacgtgtattactataataggatacgattctattatatggtataaagatataaatgacaagtataatgacatctatgattttactgcaatatgtatgctaatagcgtctacattgatagtgaccatatacgtgtttaaaaaaataaaaatgaactcttaattatgctatgctattagaaatggataaaatcaaaattacggttgattcaaaaattggtaatgttgttaccatatcgtataacttggaaaagataactattgatgtcacacctaaaaagaaaaaagaaaaggatgtattattagcgcaatcagttgctgtcgaagaggcaaaagatgtcaaggtagaagaaaaaaatattatcgatattgaagatgacgatgatatggatgtagaaagcgcgtaatacgatctataaaaataagtatataaatactttttatttactgtactcttactgtgtagtggtgataccctactcgattatttttttaaaaaaaaaatacttattctgattcttctagccatttccgtgttcgtttgaatgccacatcgacgtcaaagataggggagtagttgaaatctagttctgcattgttggtacgcacctcaaatgtagtgttggatatcttcaacgtatagttgttgagtagtgatggttttctaaatagaattctcttcatatcattcttgcacgcgtacatttttagcatccatcttggaatcctagatccttgttctattcccaatggtttcatcaatagaagattaaacatatcgtacgaacacgatggagagtaatcgtagcaaaagtaagcatttcctttaatctcagatcccggatactggatatattttgcagccaacacgtgcatccatgcaacatttcctacatatacccggctatgcaccgcgtcatcatcgactgtacgatacataatgttaccgtgttgcttacattgctcgtaaaagactttcatcaatttgtctccttctccgtaaattccagtgggtcttaggcaacaagtatacaattttgctccattcatgattacggaattattggctttcataaccagttgctcggccatacgtttactttttgcgtatacatgtcctggtgatatatcataaagggtatgctcatggccgatgaatggatcaccgtgtttattgggtcctattgcttccatgctactagtatagatcaaatacttgattcctaggtccacacaagctgccaaaatagtctgtgttccataatagtttactttcatgatttcattatcggtgtattttccaaatacatccactagagcagccgtatgaataatcagatttaccccatctagcgcttctctcaccttatcaaagtcgtttatatcacattgtatatagtttataaccttaactttcgaggttattggttgtggatcttctacaatatctatgactctgatttcttgaacatcatctgcactaattaacagttttactatatacctgcctagaaatccggcaccaccagtaaccgcgtacacggccattgctgccactcataatatcagactacttattctattttactaaataatggctgtttgtataatagaccacgataatatcagaggagttatttactttgaaccagtccatggaaaagataaagttttaggatcagttattggattaaaatccggaacgtatagtttgataattcatcgttacggagatattagtcaaggatgtgattccataggcagtccagaaatatttatcggtaacatctttgtaaacagatatggtgtagcatatgtttatttagatacagatgtaaatatatttacaattattggaaaggcgttatctatttcaaaaaatgatcagagattagcgtgtggagttattggtatttcttacataaatgaaaagataatacattttcttacaattaacgagaatggcgtttgatatatcagttaatgcgtctaaaacaataaatgcattagtttacttttctactcagcaaaataaattagtcatacgtaatgaagttaatgatacacactacactgtcgaatttgatagggacaaagtagttgacacgtttatttcatataatagacataatgacaccatagaaataagaggggtgcttccagaggaaactaatattggttgcgcggttaatacgccggttagtatgacttacttgtataataagtatagttttaaactgattttagcagaatatataagacacagaaatactatatccggcaatatttattcggcattgatgacactagatgatttggctattaaacagtatggagacattgatctattatttaatgagaaacttaaagtagactccgattcgggactatttgactttgtcaactttgtaaaggatatgatatgttgtgattctagaatagtagtagctctatctagtctagtatctaaacattgggaattgacaaataaaaaatataggtgtatggcattagccgaacatatatctgatagtattccaatatctgagctatctagactacgatacaatctatgtaagtatctacgcgggcacactgagagcatagaggatgaatttgattattttgaagacgatgattcgtctacatgttctgccgtaaccgacagggaaacggatgtataatttttttttatagcgtgaaggatatgataaaaaatataattgttgtatttatcccattccaatcaccttatatgattctgtaacacaataaaggagtcttatagatgtatagaggtcagatactggtttgataaactgtttattccacataagtatgtttgactttatggttagacccgcatactttaacaaatcactgaaaattggagttaggtattgacctctcagaatcagttgccgttctggaacattaaatgtattttttatgatatactccaacgcatttatgtgggcatacaacaagtcattactaatggagtattccaagagttttagttgtctagtatttaacaagagaagagatttcaacagactgtttatgaactcgaatgccgcctcattgtcgcttatattgatgatgtcgaattctcccaatatcatcaccgatgagtagctcatcttgttatcgggatccaagttttctaaagatgtcattaaaccctcgatcatgaatggatttatcatcatcgtttttatgttggacatgagcttagtccgtttgtccacatctatagacgacgatttctgaattatttcatatatccctctctttaactccaggaacttgtcaggatggtctactttaatatgttctcgtctaagagatgaaaatctttggatggttgtacgcgacttttctctaaaggatgacgttgcccaagatcctctcttaaatgaatccatcttatccttggacaagatggacagtctattttccttagatggtttaatatttttgttacccatgatctataaaggtagacctaatcgtctcggatgacctatatatttattttcagttttattatacgcataaattgtaaaaaatatgttaggtttacaaaaatgtctcgtggggcattaatcgtttttgaaggattggacaaatctggaaaaacaacacaatgtatgaacatcatggaatctataccggcaaacacgataaaatatcttaactttcctcagagatccactgtcactggaaagatgatagatgactatctaactcgtaaaaaaacctataatgatcatatagttaatctattattttgtgcaaatagatgggagtttgcatcttttatacaagaacaactagaacagggaattactttaatagttgatagatacgcattttctggagtagcgtatgccgccgctaaaggcgcgtcaatgactctcagtaagagttatgaatctggattgcctaaacccgacttagttatattcttggaatctggtagcaaagaaattaatagaaacgtcggcgaggaaatttatgaagatgttacattccaacaaaaggtattacaagaatataaaaaaatgattgaagaaggagatattcattggcaaattatttcttctgaattcgaggaagatgtaaagaaggagttgattaagaatatagttatagaggctatacacacggttactggaccagtggggcaactgtggatgtaatagtgaaattacattttttataaatagatgttagtacagtgttataaatggatgaagcatattactctggcaacttggaatcagtactcggatacgtgtccgatatgcataccgaactcgcatcaatatctcaattagttattgccaagatagaaactatagataatgatatattaaacaaggacattgtaaattttatcatgtgtagatcaaacttggataatccatttatctctttcctagatactgtatatactattatagatcaagagaactatcagactgagttgattaattcattagacgacaatgaaattatcgattgtatagttaataagtttatgagcttttataaggataacctagaaaatatagtagatgctatcattactctaaaatatataatgaataatccagattttaaaactacgtatgcagaagtactcggttccagaatagccgatatagatattaaacaagtgatacgtaagaatatactacaattgtctaatgatatccgcgaacgatatttgtgaaaatattaaaaaaaaatactttttttattaaatgacgtcgcttcgcgaatttagaaaattatgctgtgatatatatcacgcatcaggatataaagaaaaatctaaattaattagagactttataacagatagggatgataaatatttgatcattaagctattgcttcccggattagacgatagaatttataacatgaacgataaacaaattataaaattatatagtataatatttaaacaatctcaggaagatatgctacaagatttaggatacggatatataggagacactattaggactttcttcaaagagaacacagaaatccgtccacgagataaaagcattttaactttagaagaagtggatagttttttaactacgttatcatccgtaactaaagaatcgcatcaaataaaattattgactgatatcgcatccgtttgtacatgtaatgatttaaaatgtgtagtcatgcttattgataaagatctaaaaattaaagcgggtcctcggtacgtacttaacgctattagtcctaatgcctatgatgtgtttagaaaatctaataacttgaaagagataatagaaaatgcatctaaacaaaatctagactctatatctatttctgttatgactccaattaatcccatgttagcggaatcgtgtgattctgtcaataaggcgtttaaaaaatttccatcaggaatgtttgcggaagtcaaatacgatggtgaaagagtacaagttcataaaaataataacgagtttgccttctttagtagaaacatgaaaccagtactctctcataaagtggattatctcaaagaatacataccgaaagcatttaaaaaagctacgtctatcgtattggattctgaaattgttcttgtagacgaacataatgtaccgctcccgtttggaagtttaggaatacacaaaaagaaagaatataaaaactctaacatgtgtttgttcgtgtttgactgtttgtactttgatggattcgatatgacggacattccattgtacgaacgaagatcttttctcaaagatgttatggttgaaatacccaatagaatagtattctcagagttgacgaatattagtaacgagtctcagttaactgacgtattggatgatgcactaacgagaaaattagaaggattggtcttaaaagatattaatggagtatacgaaccgggaaagagaagatggttaaaaataaagcgagactatttgaacgagggttccatggcagattctgccgatttagtagtactaggtgcttactatggtaaaggagcaaagggtggtatcatggcagtctttctaatgggttgttacgacgatgaatccggtaaatggaagacggttaccaagtgttcaggacacgatgataatacgttaagggagttgcaagaccaattaaagatgattaaaattaacaaggatcccaaaaaaattccagagtggttagtagttaataaaatctatattcccgattttgtagtagaggatccgaaacaatctcagatatgggaaatttcaggagcagagtttacatcttccaagtcccataccgcaaatggaatatccattagatttcctagatttactaggataagagaggataaaacgtggaaagaatctactcatctaaacgatttagtaaacttgactaaatcttaatagttacatacaaactgaaaattaaaataacactatttagttggtggtcgccatggatggtgttattgtatactgtctaaacgcgctagtaaaacatggcgaggaaataaatcatataaaaaatgatttcatgattaaaccatgttgtgaaagagtttgtgaaaaagtcaagaacgttcacattggcggacaatctaaaaacaatacagtgattgcagatttgccatatctggataatgcggtatccgatgtatgcaattcactgtataaaaagaatgtatcaagaatatccagatttgctaatttgataaagatagatgacgatgacaagactcctactggtgtatataattattttaaacctaaagatgccattcctgttattatatccataggaaaggatagagatgtttgtgaactattaatctcatcagacatatcgtgtgcatgcgtggagttaaattcatatcacgtagccattcttcccatggatgtttccttttttaccaaaggaaatgcatcattgattattctcctgtttgatttctctatcgatgcggcacctctcttaagaagtgtaaccgataataatgttattatatctagacaccagcgtatacatgacgagcttccgagttccaattggttcaagttttacataagtataaagtccgactattgttctatattatatatggttgttgatggatctgtgatgcatgcgatagctgataatagaactcacgcaattattagcaaaaatatattagacaatactacgattaacgatgagtgtagatgctgttattttgaaccacagattaggattcttgatagagatgagatgctcaatggatcatcgtgtgatatgaacagacattgtattatgatgaatttacctgatgtaggcgaatttggatctagtatgttggggaaatatgaacctgacatgattaagattgctctttcggtggctggtaatttaataagaaatcgagactacattcccgggagacgaggatatagctactacgtttacggtatagcctctagataatttttttaagcacgaaataaaaaacataattttaaaccaatctatttcatactattttgtgtgatcaccatggacataaagatagatattagtatttctggtgataaatttacggtgactactaggagggaaaatgaagaaagaaaaaaatatctacctctccaaaaagaaaaaactactgatgttatcaaacctgattatcttgagtacgatgacttgttagatagagatgagatgtttactattctagaggaatattttatgtacagaggtctattaggcctcagaataaaatatggacgactctttaacgaaattagaaaattcgacaatgatgcggaagaacaattcggtactatagaagaactcaagcagaaacttagattaaattctgaagagggagcagataactttatagattatataaaggtacaaaaacaggatatcgtcaaacttactgtatacgattgcatatctatgataggattgtgtgcatgcgtggtagatgtttggagaaatgagaaactgttttctagatggaaatattgtttacgagcgattaaactgtttattgatgatcacatgcttgataagataaaatctatactgcagaatagactagtatatgtggaaatgtcatagaaagttaaaagttaatgagagcaaaaatatataaggttgtattccatatttgttatttttttctgtaatagttagaaaaatacattcgatggtctatctatcagattattatgtgttataaggtactttttctcataataaactagagtatgagtaagatagtgtttttcaaaacatataaatctaaaattgatggatgagatatacagctattaatttcgaaaatatattttaatctgataactttaaacatggatttttgatggtggtttaacgttttaaaaaaagattttgttattgtagtatatgataatattaaaagatggatataaagaatttgctgactgcatgtactattttttacattactacattggctacggcagatatacctacttcgtcactgccacacgctccggtaaacggggcatgtgacgagggagaatatcttgataagaggcataatcaatgttgtaatcagtgtccacctggagaatttgccaaggtcagatgtagtggtagtgataacacaaaatgtgaacgctgcccacctcatacatataccgcaatccccaattactctaatggatgtcatcaatgtagaaaatgcccaacaggatcatttgataaggtaaagtgtaccggaacacagaacagtaaatgttcgtgtcttcctggttggtattgcgctactgattcttcacagactgaagattgtcgagattgtataccaaaaaggagatgtccatgcggatactttggtggaatagatgaacaaggaaatcctatttgtaaatcgtgttgtgttggtgaatattgcgactacctacgtaattatagacttgatccatttcctccatgcaaactatctaaatgtaattaattatgattttgatgataatgttaccatacattatatcgctacttggttagtgtattattcagtatgaagacctattaataattacttatcttttgacgatcttgttataattataatataaaaatacttatggcatagtaactcataattgctgacgcgataaattcgtaataatctgttttgttcaaaggaatctacaggcataaaaataaaaatataatttataatatactcttacagcgcgccatcatgaataacagcagtaaattaattgctgttattaatggatttagaaatagtggacgattttgtgatattaatatagttattaatgatgaaaggataaacgctcacagactcatcctatctggagcctccgaatatttttccattctgttttccaataattttatcgattctaatgaatacgaagttaatctaagtcatttagattatcaaagcgtaaacgatttgatcgattacatttatgggatacctttgagcctaactaacgataacgtgaaatatattctttcaaccgctgattttttacaaattggatctgctattacggagtgtgaaaattacatacttaaaaatctttgttctagaaactgtatcgatttctacatatacgctgataaatataataacaagaaaatagaatcagcgtcgtttaacacaatattacaaaatattttgagactcatcaacgatgaaaactttaaatacttaacagaggaatcaatgataaaaattttaagcgatgatatgttaaatataaaaaatgaggatttcgccccactaattctcattaaatggttagagagtactcaacaaccatgcaccgtcgagttacttaaatgcctcagaatatcattgctttccccacaagttataaaatcactttatagtcatcgactggttagttcaatctacgaatgtataacattcttaaacaatatagcattcttggatgaatcatttcctagataccatagcatcgagttgatatctatcggtataagtaattcgcatgataagatttccataaactgctacaatcataaaaaaaatacatgggaaatgatatcttcacgtagatataggtgtagtttcgcagtggccgtcctggataatattatttatatgatgggtggatatgatcagtccccgtatagaagttcaaaggttatagcgtacaatacatgtacaaattcttggatatatgatataccagagctaaaatatcctcgttctaattgtgggggactggctgatgacgaatacatttattgtataggcggcatacgcgatcaggattcatcgttgacatctagtattgatagatggaagccatcaaaaccatattggcagaagtatgctaaaatgcgcgaaccaaaatgtgatatgggggttgcgatgttaaacggattaatatatgttataggtggaatcgttaaaggtgacacgtgtaccgacgcactagagagtttatcagaagatggatggatgaagcatcaacgtcttccaataaaaatgtccaatatgtcgacgattgttcatgatggcaagatttatatatctggaggttacaacaatagtagtgtagttaatgtaatatcgaatttagtccttagctataattcgatatatgatgaatggaccaaattatcatcattaaacattcctagaattaatcccgctctatggtcagcgcataataaattatatgtaggaggaggaatatctgatgatgttcgaactaatacatctgaaacatacgacaaagaaaaagattgttggacattggataatggtcacgtgttaccacgcaattatataatgtataaatgcgaaccgattaaacataaatatccattggaaaaaacacagtacacgaatgattttctaaagtatttggaaagttttataggtagttgatagaacaaaatacataattttgtaaaaataaatcactttttatactaatatgacacgattaccaatacttttgttactaatatcattagtatacgctacaccttttcctcagacatctaaaaaaataggtgatgatgcaactctatcatgtaatcgaaataatacaaatgactacgttgttatgagtgcttggtataaggagcccaattccattattcttttagctgctaaaagcgacgtcttgtattttgataattataccaaggataaaatatcttacgactctccatacgatgatctagttacaactatcacaattaaatcattgactgctagagatgccggtacttatgtatgtgcattctttatgacatcgcctacaaatgacactgataaagtagattatgaagaatactccacagagttgattgtaaatacagatagtgaatcgactatagacataatactatctggatctacacattcaccggaaactagttctgagaaacctgattatatagataattctaattgctcgtcggtattcgaaatcgcgactccggaaccaattactgataatgtagaagatcatacagacaccgtcacatacactagtgatagcattaatacagtaagtgcatcatctggagaatccacaacagacgagactccggaaccaattactgataaagaagatcatacagttacagacactgtctcatacactacagtaagtacatcatctggaattgtcactactaaatcaaccaccgatgatacgtacaatgataatgatacagtaccaccaactactgtaggcggtagtacaacctctattagcaattataaaaccaaggactttgtagaaatatttggtattaccgcattaattatattgtcggccgtggcaatattctgtattacgtattatatatgtaataaacgttcacgtaaatacaaaacagagaacaaagtctagatttttgacttacataaatgtctgggatagtaaaatctatcatattgagcgggccatctggtttaggaaagacagccatagccaaaagactatgggaatatatttggatttgtggtgtcccataccactagatttcctcgtcctatggaacgagaaggtgtcgattaccattacgttaacagagaggccatctggaagggaatagccgccggaaactttctagaacatactgagtttttaggaaatatttacggaacttctaaaactgctgtgaatacagcggctattaataatcgtatttgtgtgatggatctaaacatcgatggcgttagaagtcttaaaaatacgtacctaatgccttactcggtgtatataagacctacctctcttaaaatggttgagaccaagcttcgttgtagaaacactgaagcggatgatgagattcatcgtcgtgtgatgttggcaaaaactgacatggatgaggcaggtgaagccggtctattcgacactattatcattgaagatgatgtgaatttagcatatagtaagttaattcagatactacaggaccgtattagaatgtattttaacactaattagagacttaagacttaaaacttgataattaataatataactcgtttttatatgtggctatttcaacgtctaatgtattagttaaatattaaaacttaccacgtaaaacttaaaatttaaaatgatatttcattgacagatagatcacacattatgaactttcaaggacttgtgttaactgacaattgcaaaaatcaatgggtcgttggaccattaataggaaaaggtggatttggtagtatttatactactaatgacaataattatgtagtaaaaatagagcccaaagctaacggatcattatttaccgaacaggcattttatactagagtacttaaaccatccgttatcgaagaatggaaaaaatctcacaatataaagcacgtaggtcttatcacgtgcaaggcatttggtctatacaaatccattaatgtggaatatcgattcttggtaattaatagattaggtgcagatctagatgcggtgatcagagccaataataatagattaccaaaaaggtcggtgatgttgatcggaatcgaaatcttaaataccatacaatttatgcacgagcaaggatattctcacggagatattaaagcgagtaatatagtcttggatcaaatagataagaataaattatatctagtggattacggattggtttctaaattcatgtctaatggcgaacatgttccatttataagaaatccaaataaaatggataacggtactctagaatttacacctatagattcgcataaaggatacgttgtatctagacgtggagatctagaaacacttggatattgtatgattagatggttgggaggtatcttgccatggactaagatatctgaaacaaagaattgtgcattagtaagtgccacaaaacagaaatatgttaacaatactgcgactttgttaatgaccagtttgcaatatgcacctagagaattgctgcaatatattaccatggtaaactctttgacatattttgaggaacccaattacgacaagtttcggcacatattaatgcagggtgtatattattaagtgtggtgtttggtcgataaaaattaaaaaataacttaatttattattgatctcgtgtgtacaaccgaaatcatggcgatgttttacgcacacgctctcggtgggtacgacgagaatcttcatgcctttcctggaatatcatcgactgttgccaatgatgtcaggaaatattctgttgtgttagtttataataacaagtatgacattgtaaaagacaaatatatgtggtgttacagtcaggtgaacaagagatatattggagcactgctgcctatgtttgagtgcaatgaatatctacaaattggagatccgatccatgatcaagaaggaaatcaaatctctatcatcacatatcgccacaaaaactactatgctctaagcggaatcgggtacgagagtctagacttgtgtttggaaggagtagggattcatcatcacgtacttgaaacaggaaacgctgtatatggaaaagttcaacatgattattctactatcaaagagaaggccaaagaaatgagtacacttagtccaggacctatcatcgattaccacgtctggataggagattgtatctgtcaagttactgctgtggacgtacatggaaaggaaattatgaaaatgagattcaaaaagggtgcggtgcttccgatcccaaatctggtaaaagttaaacttggggagaatgatacagaaaatctttcttctactatatcggcgacaccatcgaggtaaccacctctctggaagacagcgtgaataatgtactcatgaaacgtttggaaactatacgccatatgtggtctgttgtatatgatcattttgatattgtgaatggtaaagaatgctgttatgtgcatacgcatttgtctaatcaaaatcttataccgagtactgtaaaaacaaatttgtacatgaagactatgggatcatgcattcaaatggattccatggaagctctagagtatcttagcgaactgaaggaatcaggtggatggagtcccagaccagaaatgcaggaatttgaatatccagatggagtggaagacactgaatcaattgagagattggtagaggagttcttcaatagatcagaacttcaggctggtgaatcagtcaaatttggtaattctattaatgttaaacatacatctgtttcagctaagcaactaagaacacgtatacggcagcagcttccttctatactctcatcttttaccaacacaaagggtggatatttgttcattggagttgataataatacacacaaagtatttggattcacggtgggttacgactacctcagactgatagagaatgatatagaaaagcatatcaaaagactttgtgttgtgtatttctgtgagaagaaagaggacatcaagtacgcgtgtcgattcatcaaggtatataaacctggggatgaggctacctcgacatacgtgtgcgctatcaaagtggaaagatgctgttgtgctgtgtttgcagattggccagaatcatggtatatggatactaatggtatcaagaagtattctccagatgaatgggtgtcacatataaaattttaattaatgtaatagagaacaaataataaggttgtaatatcatatagacaataactaacaattaattagtaactgttatctcttttttaactaaccaactaactatatacctattaatacatcgtaattatagttcttaacatctattaatcattgattcgcttctttaattttttataaactaacattgttaattgaaaagggataacatgttacagaatataaattatatatggatttttttaaaaaggaaatacttgactggagtatatatttatctcttcattatatagcacgcgtgttttccaatttttccacatcccatataatacaggattataatctcgttcgaacatacgagaaagtggataaaacaatagttgattttttatctaggttgccaaatttattccatattttagaatatggggaaaatattctacatatttattctatggatgatgctaatacgaatattataattttttttctagatagagtattaaatattaataagaacgggtcatttatacacaatctcgggttatcatcatccattaatataaaagaatatgtatatcaattagttaataatgatcatccagataataggataagactaatgcttgaaaatggacgtagaacaagacattttttgtcctatatatcagatacagttaatatctatatatgtattttaataaatcatggattttatatagatgccgaagacagttacggttgtacattattacatagatgtatatatcactataagaaatcagaatcagaatcatacaatgaattaattaagatattgttaaataatggatcagatgtagataaaaaagatacgtacggaaacacaccttttatcctattatgtaaacacgatatcaacaacgtggaattgtttgagatatgtttagagaatgctaatatagactctgtagactttaatagatatacacctcttcattatgtctcatgtcgtaataaatatgattttgtaaagttattaatttctaaaggagcaaatgttaatgcgcgtaataaattcggaactactccattttattgtggaattatacacggtatctcgcttataaaactatatttggaatcagacacagagttagaaatagataatgaacatatagttcgtcatttaataatttttgatgctgttgaatctttagattatctattatccagaggagttattgatattaactatcgtactatatacaacgaaacatctatttacgacgctgtcagttataatgcgtataatacgttggtctatctattaaacaaaaatggtgattttgagacgattactactagtggatgtacatgtatttcggaagcagtcgcaaacaacaacaaaataataatggaagtactattgtctaaacgaccatctttgaaaattatgatacagtctatgatagcaattactaaacataaacagcataatgcagatttattgaaaatgtgtataaaatatactgcgtgtatgaccgattatgatactcttatagatgtacagtcgctacagcaatataaatggtatattttaagatgtttcgatgaaatagatatcatgaagagatgttatataaaaaataaaactgtattccaattagttttttgtatcaaagacattaatactttaatgagatacggtaaacatccttctttcgtgaaatgcactagtctcgacgtatacggaagtcgtgtacgtaatatcatagcatctattagatatcgtcagagattaattagtctattatccaagaagctggatcctggagataaatggtcgtgttttcctaacgaaataaaatataaaatattggaaaactttaacgataacgaactatccacatatctaaaaatcttataaacattattaaaatataaaatctaagtaggataaaatcacactacatcattgtttccttttagtgctcgacagtgtatactatttttaacgctcataaataaaaatgaaaacgatttccgttgttacgttgttatgcgtactacctgctgttgtttattcaacatgtactgtacccactatgaataacgctaaattaacgtctaccgaaacatcgtttaatgataaccagaaagttacgtttacatgtgatcagggatatcattctttggatccaaatgctgtctgtgaaacagataaatggaaatacgaaaatccatgcaaaaaaatgtgcacagtttctgattatgtctctgaactatataataaaccgctatacgaagtgaattccaccatgacactaagttgcaacggcgaaacaaaatattttcgttgcgaagaaaaaaatggaaatacttcttggaatgatactgttacgtgtcctaatgcggaatgtcaacctcttcaattagaacacggatcgtgtcaaccagttaaagaaaaatactcatttggggaatatatgactatcaactgtgatgttggatatgaggttattggtgcttcgtacataagttgtacagctaattcttggaatgttattccatcatgtcaacaaaaatgtgatatgccgtctctatctaacggattaatttccggatctacattttctatcggtggcgttatacatcttagttgtaaaagtggttttacactaacggggtctccatcatccacatgtatcgacggtaaatggaatcccatactcccaatatgtgtacgaactaacgaaaaatttgatccagtggatgatggtcccgacgatgagacagatttgagcaaactctcgaaagacgttgtacaatatgaacaagaaatagaatcgttagaagcaacttatcatataatcatagtggcgttgacaattatgggcgtcatatttttaatctccgttatagtattagtttgttcctgtgacaaaaataatgaccaatataagttccataaattgctaccgtaaatataaatccgttaaaataattaataatttaataacaaacaagtatcaaaagattaaagacttatagctagaatcaattgagatgtcttcttcagtggatgttgatatctacgatgccgttagagcatttttactcaggcactattataacaagagatttattgtgtatggaagaagtaacgccatattacataatatatacaggctatttacaagatgcgccgttataccgttcgatgatatagtacgtactatgccaaatgaatcacgtgttaaacaatgggtgatggatacacttaatggtataatgatgaatgaacgcgatattactgtaagcgttggcaccggaatactattcatggaaatgtttttcgattacaataaaaatagtatcaacaatcaactaatgtatgatataattaatagcgtatctataattctagctaatgagagatatagaagcgcttttaacgacgatggtatatacatccgtagaaatatgattaacaagttgtacggatacgcatctctaactactattggcacgatcgctggaggtgtttgttattatctgttgatgcatctagttagtttgtataaataattatttcaatatactagttaaaattttaagattttaaatgtataaaaaactaataacgtttttatttgtaataggtgcattagcatcctattcgaataatgagtacactccgtttaataaactgagtgtaaaactctatatagatggagtagataatatagaaaattcatatactgatgataataatgaattggtgttaaattttaaagagtacacaatttctattattacagagtcatgcgacgtcggatttgattccatagatatagatgttataaacgactataaaattattgatatgtataccattgactcgtctactattcaacgcagaggtcacacgtgtagaatatctaccaaattatcatgccattatgataagtacccttatattcacaaatatgatggtgatgagcgacaatattctattactgcagagggaaaatgctataaaggaataaaatatgaaataagtatgatcaacgatgatactctattgagaaaacatactcttaaaattggatctacttatatatttgatcgtcatggacatagtaatacatattattcaaaatatgatttttaaaaatttaaaatatattatcacttcagtgacagtagtcaaataacaaacaacaccatgagatatattataattctcgcagttttgttcattaatagtatacatgctaaaataactagttataagtttgaatccgtcaattttgattccaaaattgaatggactggggatggtctatacaatatatcccttaaaaattatggcatcaagacgtggcaaacaatgtatacaaatgtaccagaaggaacatacgacatatccgcatttccaaagaatgatttcgtatctttctgggttaaatttgaacaaggcgattataaagtggaagagtattgtacgggactatgcgtcgaagtaaaaattggaccaccgactgtaacattgactgaatacgacgaccatatcaatttgtacatcgagcatccgtatgctactagaggtagcaaaaagattcctatttacaaacgcggtgacatgtgtgatatctacttgttgtatacggctaacttcacattcggagattctaaagaaccagtaccatatgatatcgatgactacgattgcacgtctacaggttgcagcatagactttgtcacaacagaaaaagtgtgcgtgacagcacagggagccacagaagggtttctcgaaaaaattactccatggagttcgaaagtatgtctgacacctaaaaagagtgtatatacatgcgcaattagatccaaagaagatgttcccaatttcaaggacaaaatggccagagttatcaagagaaaatttaatacacagtctcaatcttatttaactaaatttctcggtagcacatcaaatgatgttaccacttttcttagcatgcttaacttgactaaatattcataactaatttttattaatgatacaaaaacgaaataaaactgcatattatacactggttaacgcccttataggctctaaccattttcaagatgaggtccctgattatagtccttctgttcccctctatcatctactccatgtctattagacgatgtgagaagactgaagaggaaacatggggattgaaaatagggttgtgtataattgccaaagatttctatcccgaaagaactgattgcagtgttcatctcccaactgcaagtgaaggattgataactgaaggcaatggattcagggatatacgaaacaccgataaattataaaaaaagcaatgtgtccgctgtttccgttaataatactattttcgtaactggcggattattcataaataactctaatagcacgatcgtggttaacaatatggaaaaacttgacatttataaagacaaacaatggtcgattatagaaatgcctatggctagggtatatcacggcatcgactcgacatttggaatgttatattttgccggaggtctatccgttaccgaacaatatggtaatttagagaaaaacaacgagatatcttgttacaatcctagaacgaataagtggtttgatatttcatatactatttataagatatccatatcatcattgtgtaaactaaataacgtcttctatgtatttagtaaggacattggatatgtggaaaagtatgatggtgcatggaagttagtacatgatcgtctccccgctataaaggcattatcaacttctccttattgattgaaaatgaaaatataaatagtttttatgtatagcagtattaccctatagttttattgcttactactaacatggatacagatgttacaaatgtagaagatatcataaatgaaatagatagagagaaagaagaaatactaaaaaatgtagaaattgaaaataataaaaacattaacaagaatcatccaagtggatatattagagaagcactcgttattaatactagtagtaatagtgattccattgataaagaagttatagaatgtatctgtcacgatgtaggaatatagatcatatctactaatttttataatcgatacaaaacataaaaaacaactcgttattacatagcaggcatggaatccttcaagtattgttttgataacgatggcaagaaatggattatcggaaatactttatattctggtaattcaatactctataaggtcagaaaaaatttcactagttcgttctacaattacgtaatgaagatagatcacaaatcacacaagccattgttgtctgaaatacgattctatatatctgtattggatcctttgactatcgacaactggacacgggaacgtggtataaagtatttggctattccagatctgtatggaattggagaaaccgatgattatatgttcttcgttataaagaattcgggaagagtattcgccccaaaggatactgaatcagtcttcgaagcatgcgtcactatgataaacacgttagagtttatacactctcaaggatttacccatggaaaaatagaaccgaggaatatactgattagaaataaacgtctttcactaattgactattctagaactaacaaactatacaagagtggaaactcacatatagattacaacgaggacatgataacttcaggaaatatcaattatatgtgtgtagacaatcatcttggagcaacagtttcaagacgaggagatttagaaatgttgggatattgcatgatagaatggttcggtggcaaacttccatggaaaaacgaaagtagtataaaagtaataaaacaaaaaaaagaatataaaaaatttatagctactttctttgaggactgttttcctgaaggaaatgaacctctggaattagttagatatatagaattagtatacacgttagattattctcaaactcctaattatgacagactacgtaaactgtttatacaagattgaaattatattcttttttttatagagtgtggtagtgttacggatatctaatattaatattagactatctctatcgcgctacacgaccaatatcgattactatggatatcttctatgaaaggagagaatgtatttatttctccagcgtcaatctcgtcagtattgacaatactgtattatggagctaatggatccactgctgaacagctatcaaaatatgtagaaacggaggagaacacggataaggttagcgctcagaatatctcattcaaatccatgaataaagtatatgggcgatattctgccgtgtttaaagattcctttttgagaaaaattggcgataagtttcaaactgttgacttcactgattgtcgcactatagatgcaatcaacaagtgtgtagatatctttactgaggggaaaatcaatccactattggatgaaccattgtctcctagcaattagtgccgtatactttaaagcaaaatggttgacgccattcgaaaaggaatttaccagtgattatcccttttacgtatctccgacggaaatggtagacgtaagtatgatgtctatgtacggcaaggcatttaatcacgcatctgtaaaagaatcattcggcaacttttcaatcatagaactgccatatgttggagatactagtatgatggtcattcttccagacaagattgatggattagaatccatagaacaaaatctaacagatacaaattttaagaaatggtgtgactttatggatgctatgtttatagatgttcacattcccaagtttaaggtaacaggctcgtataatctggtggatactctagtaaagtcaggactgacagaggtgttcggttcaactggagattatagcaatatgtgtaatttagatgtgagtgtcgacgctatgatccacaaaacgtatatagatgtcaatgaagagtatacagaagcagctgcagcaacttctgtactagtggcagactgtgcatcaacaattacaaatgagttctgtgcagatcatccgttcatctatgtgattaggcatgttgatggaaaaattcttttcgttggtagatattgctctccgacaactaattgttaaccattttttttaaaaaaaatagaaaaaacatgtggtattagtgcaggtcgttgttcttccaattgcaattggtaagatgacggccaactttagtacccacgtcttttcaccacagcactgtggatgtgacagactgaccagtattgatgacgtcaaacaatgtttgactgaatatatttattggtcgtcctatgcataccgcaacaggcaatgcgctggacaattgtattccacactcctctcttttagagatgatgcggaattagtgttcatcgacattcgcgagctggtaaaaaatatgccgtgggatgatgtcaaagattgtacagaaatcatccgttgttatataccggatgagcaaaaaaccatcagagagatttcggccatcatcggactttgtgcatatgctgctacttactggggaggtgaagaccatcccactagtaacagtctgaacgcattgtttgtgatgcttgagatgctaaattacgtggattataacatcatattccggcgtatgaattgatgagttgtacatcttgacattttctttcttctcttctccctttcttctcttctcccttcctccctcttctccctttcccagaaacaaacttttttacccactataaaataaaatgagtatactacctgttatatttctttctatatttttttattcttcattcgttcagacttttaacgcgtctgaatgtatcgacaaagggcaatattttgcatcattcatggagttagaaaacgagccagtaatcttaccatgtcctcaaataaatacgctatcatccggatataatatattagatattttatgggaaaaacgaggagcggataatgatagaattataccgatagataatggtagcaatatgctaattctgaacccgacacaatcagactctggtatttatatatgcattaccacgaacgaaacctactgtgacatgatgtcgttaaatttgacaatcgtgtctgtctcagaatcaaatatagattttatctcgtatccacaaatagtaaatgagagatctactggcgaaatggtatgtcccaatattaatgcatttattgctagtaacgtaaacgcagatattatatggagcggacatcgacgccttagaaataagagacttaaacaacggacacctggaattattaccatagaagatgttagaaaaaatgatgctggttattatacatgtgttttagaatatatatacggtggcaaaacatataacgtaaccagaattgtaaaattagaggtacgggataaaataataccttctactatgcaattaccagatggcattgtaacttcaataggtagtaatttgactattgcatcgttgagacctcccacaacggatgcagacgtcttttggataagtaatggtatgtattacgaagaagatgatggggacggaaacggtagaataagtgtagcaaataaaatctatatgaccgataagagacgtgttattacatcccggttaaacattaatcctgtcaaggaagaagatgctacaacgtttacgtgtatggcgtttactattcctagcatcagcaaaacagttactgttagtataacgtgaatgtatgttgttacatttccatgtcaattgagtttataagaatttttatacattatcttccaacaaacaattgacgaacgtattgctatgattaactcccacgatactatgcatattattaatcattaacttgcagactatacctagtgctattttgacatactcatgttcttgtgtaattgcggtatctatattattaaagtacgtaaatctagctatagttttattatttaattttagataatataccgtctccttatttttaaaaattgccacatcctttattaaatcatgaatgggaatttctatgtcatcgttagtatattgtgaacaacaagagcagatatctataggaaagggtggaatgcgatacattgatctatgtagttttaaaacacacgcgaactttgaagaatttatataaatcattccatcgatacatccttctatgttgagatgtatatatccaggaattcgtttattaatatcgggaaatgtataaactaaaacattgcccgaaagcggtgcctctatctgcgttatatccgttcttaacttacaaaatgtaaccaatacctttgcatgacttgttttgttcggcaacgttagtttaaacttgacgaatggattaattacaatagcatgatccgcgcatctattaagtttttttactttaacgcccttgtatgtttttacagagactttatctaaatttctagtgcttgtatgtgttataaatataacgggatatagaaccgaatcacctaccttagatacccaattacattttatcagatccagataataaacaaattttgtcgccctaactaattctatattgttatatattttacaattggttatgatatcatgtaataacttggagtctaacgcgcatcgtcgtacgtttatacaattgtgatttagtgtagtatatctacacatgtatttttccgcactatagtattctggactagtgataaaactatcgttatatctatcttcaatgaactcatcgagatattgctctctgtcatattcatacacctgcataaactttctagacatcttacaatccgtgttattttaggatcatatttacatatttacgggtatatcaaagatgttagattagttaatgggaatcgtctataataatgaatattaaacaattatatgaggacttttaccacaaagcatcataaaaatgagtcgtcgtctgatttatgttttaaatatcaaccgcaaatcaactcataaaatacaagagaatgaaatatatacatattttagtcattgcaatatagaccatacttctacagaacttgattttgtagttaaaaactatgatctaaacagacgacaacctgtaactgggtatactgcactacactgctatttgtataataattactttacaaacgatgtactgaagatattattaaatcatggagtggatgtaacgatgaaaaccagtagcggacgtatgcctgtttatatattgcttactagatgttgtaatatttcacatgatgtagtgatagatatgatagacaaagataaaaaccacttattacatagagactattccaacctattactagagtatataaaatctcgttacatgttattaaaggaagaggatatcgatgagaacatagtatccactttattagataagggaatcgatcctaactttaaacaagacggatatacagcgttacattattattatttgtgtctcgcacacgtttataaaccaggtgagtgtagaaaaccgataacgataaaaaaggccaagcgaattatttctttgtttatacaacatggagctaatctaaacgcgttagataattgtggtaatacaccattccatttgtatcttagtattgaaatgtgtaataatattcatatgactaaaatgctgttgacttttaatccgaatttcgaaatatgtaataatcatggattaacgcctatactatgttatataacttccgactacatacaacacgatattcttgttatgttaatacatcactatgaaacaaatgttggagaaatgccgatagatgagcgtcgtatgatcgtattcgagtttatcaaaacatattctacacgtccggcagattcgataacttatttgatgaataggtttaaaaatataaatatttatacccgctatgaaggaaagacattattacacgtagcatgtgaatataataatacacacgtaatagattatcttatacgtatcaacggagatataaatgcgttaaccgacaataacaaacacgctacacaactcattatagataacaaagaaaattccccatataccattaattgtttactgtatatacttagatatattgtagataagaatgtgataagatcgttggtggatcaacttccatctctacctatctttcgtcgcttatcatactagtcatatcctaaatgttgatcatattccaccaaatgattgtgaaagagattgagattaaatcgtctaacaaacaattagtttttatgacattaacatataataaataaattaatcattattgacttaacgatgacgaaagttatcatcatcttaggattcttgattattaatacaaattcattgtctatgaaatgtgaacaaggtgtctcatattataattcacaagaattaaagtgttgtaaactatgtaagccaggaacatattcagatcatcgatgtgataaatacagcgataccatttgtggacattgtccgagtgacacattcacgtcaatatataatcgttctccttggtgtcatagttgtagaggtccatgtggtactaatcgagtagaggtcacaccttgtacacctaccacaaatagaatctgtcattgtgactcgaatagttattgtctccttaaagcttctgatggtaactgtgttacatgtgctcctaaaacaaaatgtggtcgtgggtatggaaagaaaggagaagatgaaatgggtaataccatttgtaagaaatgtcggaagggtacttattcagatattgtatctgactctgatcaatgtaaaccaatgacaagataagacttactcgcatctactggatagacataaaatatcctcctcgtaataatgaaatataaatatacactaattattaatatcaataacaatcgagtattaatatataggtcatttttaaatcccttttgggttccgtcccaaacggcgtttcggtctgcgtcgccgccatggccatgccgagcctctccgcgtgctcctccatcgaggacgacttcaactatggcagctcggtggcgtctgccagcgtgcacatacgaatggcatttctaagaaaagtctacggtatcctttgtctacaatttcttttaacaacggcaacaactgcagtatttttatactttgactgcatgcggacatttatacaagggagtcctgttctaatattggcatcaatgttcggatctataggcttgattttcgcattgactttacacagacataaacatcccctgaatctgtacctgctttgtggatttacactgtcggaatctctaacgctggcctctgttgttactttctatgatgtgcatgtcgttatgcaagctttcatgctgactactgcagcgtttcttgctctgactacatatactctacaatcaaagagagatttcagtaaacttggagcaggattgtttgctgctttgtggattttaattttgtcaggactcttggggatatttgtgcaaaatgagacagtggagctggtcctgtctgcttttggggcccttgtattctgtggattcattatctatgacacgcactcactaatacataagctctcgcctgaagagtatgtgttagcctctatcaatctctacttggatatcatcaatctgttcttgcatctgttgcagcttttggaagtatctaataagaaataaagtttaaaatagaattaataaaaacatataggtcattttttaaacatggattggaaaccaaggtagttagttaatacacacaagatatatttttttcacatcatccacccatgggtaacaccaaggttgttagttaataatatacaagatattttttctcactctgatccatgtaaaccaaggacgagataagacactctcattcctcatccacaacccattaaaaaaatggaaattaaagccctctattagcataaacggctacaggtctaccatcaggttaaccttcgtctaccttcacaatggcctttccttgtgcccagttcagaccctgtcattgccacgctactaaggactccctgaataccgtggccgacgtcagacattgtctgactgaatacatcctgtgggtttctcatagatggacccatagagaaagcgctcatctgttctccgtgtggtctcggaacatattctcacaccgtctcttccgcagataaatgcgaacccgtacccagaaatacctttaactatatcgatgtggaaattaatctgtatcccgtcaacgacacatcgtgtactcggacgaccactaccggtctcagcgaatccatctcaacgtcggaactaactattactatgaatcataaagactgtaatcccgtctttcgtgatggatacttctccgttcttaataaggtagcgacttcaggtttctttacaggagaaaggtgtgcactctgaatttcgagattaaatgcaataacaaagattcttcctccaaacagttaacgaaagcaaagaatgatactatcatgccgcattcggagacagtaactctagtgggcgacatctatatactatatagtaataccaatactcaagactacgaaactgatacaatctcttatcatgtgggtaatgttctcgatgtcgatagccatatgcccggtagttgcgatatacataaactgatcactaattccaaacccacccactttttatagtaagtttttcacccataaataataaatacaataattaatttctcgtaaaagtagaaaatatattctaatttattgcacggtaaggaagtagaatcataaagaacagtactcaatcaatagcaattatgaaacaatatatcgtcctggcatgcatgtgcctggcggcagctgctatgcctgccagtcttcagcaatcatcctcatcctcctcctcgtgtacggaagaagaaaacaaacatcatatgggaatcgatgttattatcaaagtcacaaagcaagaccaaacaccgaccaatgataagatttgccaatccgtaacggaaattacagagtccgagtcagatccagatcccgaggtggaatcagaagatgattccacatcagtcgaggatgtagatcctcctaccacttattactccatcatcggtggaggtctgagaatgaactttggattcaccaaatgtcctcagattaaatccatctcagaatccgctgatggaaacacagtgaatgctagattgtccagcgtgtccccaggacaaggtaaggactcatgaagaagctcttgctatgatcaaagactgtgaggtgtctatcgacatcagatgtagcgaagaagagaaagacagcgacatccagtactcgggtctaacatctctcataagaaagtgagttacgaagatatcatcggttcaacgatcgtcgatacaaaatgtgtcaagaatctagagtttagcgttcgtatcggagacatgtgcaaggaatcatctgaacttgaggtcaaggatggattcaagtatgtcgacggatcggcatctgaaggtgcaaccgatgatacttcactcatcgattcaacaaaactcaaagcgtgtgtctgaatcgataactctattcatctgaaattggatgagtagggttaatcgaacgattcaggcacaccacgaattaaaaaagtgtaccggacactatattccggtttgcaaaacaaaaatgttcttaactacattcacaaaaagttacctctcgcgacttcttctttttctgtctcaatagtgtgatacgattatgacactattcctattcctattcctatttcctttcagagtatcacaaaaatattaaacctctttctgatggtctcataaaaaaagttttacaaaaatatttttattctctttctctctttgatggtctcataaaaaaagttttacaaaaatatttttattctctttctctctttgatggtctcataaaaaaagttttacaaaaatatttttattctctttctctctttgatggtctcataaaaaaagttttacaaaaatatttttattctctttctctctttgatggtctcataaaaaaagttttacaaaaatatttttattctctttctctctttgatggtctcataaaaaaagttttacaaaaatatttttattctctttctctctttgatggtctcataaaaaaagttttacaaaaatatttttattctctttctctctttgatggtctcataaaaaaagttttacaaaaatatttttattctctttctctctttgatggtctcataaaaaaagttttacaaaaatatttttattctctttctctctttgatggtctcataaaaaaagttttacaaaaatatttttattctctttctctctttgatggtctcataaaaaaa
